United States Patent Application Publication US 2007/0214517 A1 - sequence listing, part 31

SEQ ID NO: 36870 - protein, 241 aa, Arabidopsis thaliana; identical to SEQ ID NO: 22803
  peptide (1)..(241): Ceres Seq. ID no. 12562344
  misc_feature (1)..(239): Homolog of NCBI NO: 14279694 NR Description: sinapyl alcohol dehydrogenase [Populus
  misc_feature (1)..(239): Homolog of NCBI NO: 3913193 NR Description: Probable mannitol dehydrogenase 1 (NAD-dependent
  misc_feature (1)..(239): Homolog of NCBI NO: 10720088 NR Description: Probable mannitol dehydrogenase (NAD-dependent
  misc_feature (1)..(240): Homolog of NCBI NO: 15227106 NR Description: putative cinnamyl-alcohol dehydrogenase; protein
  misc_feature (1)..(240): Homolog of NCBI NO: 15227091 NR Description: putative cinnamyl-alcohol dehydrogenase; protein
  misc_feature (1)..(239): Homolog of NCBI NO: 22475166 NR Description: putative sinapyl alcohol dehydrogenase
  misc_feature (1)..(241): Homolog of NCBI NO: 2146727 NR Description: cinnamyl-alcohol dehydrogenase (EC 1.1.1.195)
  misc_feature (1)..(241): Homolog of NCBI NO: 1168728 NR Description: Probable mannitol dehydrogenase (NAD-dependent
  misc_feature (1)..(241): Homolog of NCBI NO: 21592964 NR Description: cinnamyl-alcohol dehydrogenase CAD1 [Arabidopsis
  misc_feature (1)..(241): Homolog of NCBI NO: 15235022 NR Description: cinnamyl-alcohol dehydrogenase CAD1
  misc_feature (1)..(239): Homolog of NCBI NO: 14279694 NR Description: sinapyl alcohol dehydrogenase [Populus
  misc_feature (1)..(239): Homolog of NCBI NO: 3913193 NR Description: Probable mannitol dehydrogenase 1 (NAD-dependent
  misc_feature (1)..(239): Homolog of NCBI NO: 10720088 NR Description: Probable mannitol dehydrogenase (NAD-dependent
  misc_feature (1)..(240): Homolog of NCBI NO: 15227106 NR Description: putative cinnamyl-alcohol dehydrogenase; protein
  misc_feature (1)..(240): Homolog of NCBI NO: 15227091 NR Description: putative cinnamyl-alcohol dehydrogenase; protein
  misc_feature (1)..(239): Homolog of NCBI NO: 22475166 NR Description: putative sinapyl alcohol dehydrogenase
  misc_feature (1)..(241): Homolog of NCBI NO: 2146727 NR Description: cinnamyl-alcohol dehydrogenase (EC 1.1.1.195)
  misc_feature (1)..(241): Homolog of NCBI NO: 1168728 NR Description: Probable mannitol dehydrogenase (NAD-dependent
  misc_feature (1)..(241): Homolog of NCBI NO: 21592964 NR Description: cinnamyl-alcohol dehydrogenase CAD1 [Arabidopsis
  misc_feature (1)..(241): Homolog of NCBI NO: 15235022 NR Description: cinnamyl-alcohol dehydrogenase CAD1

SEQ ID NO: 36871 - protein, 186 aa, Arabidopsis thaliana; identical to SEQ ID NO: 22804
  peptide (1)..(186): Ceres Seq. ID no. 12562345
  misc_feature (1)..(184): Homolog of NCBI NO: 14279694 NR Description: sinapyl alcohol dehydrogenase [Populus
  misc_feature (1)..(184): Homolog of NCBI NO: 3913193 NR Description: Probable mannitol dehydrogenase 1 (NAD-dependent
  misc_feature (1)..(184): Homolog of NCBI NO: 10720088 NR Description: Probable mannitol dehydrogenase (NAD-dependent
  misc_feature (1)..(185): Homolog of NCBI NO: 15227106 NR Description: putative cinnamyl-alcohol dehydrogenase; protein
  misc_feature (1)..(185): Homolog of NCBI NO: 15227091 NR Description: putative cinnamyl-alcohol dehydrogenase; protein
  misc_feature (1)..(184): Homolog of NCBI NO: 22475166 NR Description: putative sinapyl alcohol dehydrogenase
  misc_feature (1)..(186): Homolog of NCBI NO: 2146727 NR Description: cinnamyl-alcohol dehydrogenase (EC 1.1.1.195)
  misc_feature (1)..(186): Homolog of NCBI NO: 1168728 NR Description: Probable mannitol dehydrogenase (NAD-dependent
  misc_feature (1)..(186): Homolog of NCBI NO: 21592964 NR Description: cinnamyl-alcohol dehydrogenase CAD1 [Arabidopsis
  misc_feature (1)..(186): Homolog of NCBI NO: 15235022 NR Description: cinnamyl-alcohol dehydrogenase CAD1
  misc_feature (1)..(184): Homolog of NCBI NO: 14279694 NR Description: sinapyl alcohol dehydrogenase [Populus
  misc_feature (1)..(184): Homolog of NCBI NO: 3913193 NR Description: Probable mannitol dehydrogenase 1 (NAD-dependent
  misc_feature (1)..(184): Homolog of NCBI NO: 10720088 NR Description: Probable mannitol dehydrogenase (NAD-dependent
  misc_feature (1)..(185): Homolog of NCBI NO: 15227106 NR Description: putative cinnamyl-alcohol dehydrogenase; protein
  misc_feature (1)..(185): Homolog of NCBI NO: 15227091 NR Description: putative cinnamyl-alcohol dehydrogenase; protein
  misc_feature (1)..(184): Homolog of NCBI NO: 22475166 NR Description: putative sinapyl alcohol dehydrogenase
  misc_feature (1)..(186): Homolog of NCBI NO: 2146727 NR Description: cinnamyl-alcohol dehydrogenase (EC 1.1.1.195)
  misc_feature (1)..(186): Homolog of NCBI NO: 1168728 NR Description: Probable mannitol dehydrogenase (NAD-dependent
  misc_feature (1)..(186): Homolog of NCBI NO: 21592964 NR Description: cinnamyl-alcohol dehydrogenase CAD1 [Arabidopsis
  misc_feature (1)..(186): Homolog of NCBI NO: 15235022 NR Description: cinnamyl-alcohol dehydrogenase CAD1

SEQ ID NO: 36872 - DNA, 1502 bp, Arabidopsis thaliana
  misc_feature (1)..(1502): Ceres Seq. ID no. 12562346
  misc_feature: MA Experiment ID: 20000173 Result: Up-regulated in Transcription
  misc_feature: MA Experiment 20000173 PARAMETER Experiment Name: At_42deg_Heat_P Parameter: Age (day) Value: 14
  misc_feature: MA Experiment 20000173 PARAMETER Experiment Name: At_42deg_Heat_P Parameter: Organism Value: A. thaliana
  misc_feature: MA Experiment 20000173 PARAMETER Experiment Name: At_42deg_Heat_P Parameter: Plant Line Value: WS
  misc_feature: MA Experiment 20000173 PARAMETER Experiment Name: At_42deg_Heat_P Parameter: Temperature (deg C) Value: 42 vs. 22
  misc_feature: MA Experiment 20000173 PARAMETER Experiment Name: At_42deg_Heat_P Parameter: Timepoint (hr) Value: 6
  misc_feature: MA Experiment 20000173 PARAMETER Experiment Name: At_42deg_Heat_P Parameter: Tissue Value: Aerial
  misc_feature: MA Experiment ID: 20000438 Result: Up-regulated in Transcription
  misc_feature: MA Experiment 20000438 PARAMETER Experiment Name: At_Shoots__P Parameter: Age (day) Value: 14
  misc_feature: MA Experiment 20000438 PARAMETER Experiment Name: At_Shoots__P Parameter: Tissue Value: Shoots vs. Whole Plant
  misc_feature: MA Experiment ID: 20001248 Result: Down-regulated in Transcription
  misc_feature: MA Experiment 20001248 PARAMETER Experiment Name: At_Far-red-induction_P Parameter: Age (day) Value: 7
  misc_feature: MA Experiment 20001248 PARAMETER Experiment Name: At_Far-red-induction_P Parameter: Light Value: Far-red vs. White
  misc_feature: MA Experiment 20001248 PARAMETER Experiment Name: At_Far-red-induction_P Parameter: Organism Value: A. thaliana
  misc_feature: MA Experiment 20001248 PARAMETER Experiment Name: At_Far-red-induction_P Parameter: Plant Line Value: Columbia
  misc_feature: MA Experiment 20001248 PARAMETER Experiment Name: At_Far-red-induction_P Parameter: Timepoint (hr) Value: 4
  misc_feature: MA Experiment 20001248 PARAMETER Experiment Name: At_Far-red-induction_P Parameter: Tissue Value: Whole Plant
  misc_feature: MA Experiment ID: 20001911 Result: Up-regulated in Transcription
  misc_feature: MA Experiment 20001911 PARAMETER Experiment Name: At_Drought_Reproduction_P Parameter: Age (day) Value: 40
  misc_feature: MA Experiment 20001911 PARAMETER Experiment Name: At_Drought_Reproduction_P Parameter: Organism Value: A. thaliana
  misc_feature: MA Experiment 20001911 PARAMETER Experiment Name: At_Drought_Reproduction_P Parameter: Plant Line Value: WS
  misc_feature: MA Experiment 20001911 PARAMETER Experiment Name: At_Drought_Reproduction_P Parameter: Timepoint (day) Value: 10
  misc_feature: MA Experiment 20001911 PARAMETER Experiment Name: At_Drought_Reproduction_P Parameter: Tissue Value: Flowers
  misc_feature: MA Experiment 20001911 PARAMETER Experiment Name: At_Drought_Reproduction_P Parameter: Treatment Value: Drought vs. No Drought
gtacctttttttgttgtaatttttccatacacccaatttcccgtggaagaaaaggagtcagctttttcgtttgctttaaagcttgaatctttacatagttccagttactttctatagagcttcataatccctagttgcccaaaaggattctgggttttgtgagaatgatgacgtcatgtcggaatatagatttaggtacgatgatgatggcatgtggttgtggccgtcgtcagtttccttcattagcgaagactgtttgtaagtttactagcagcaatagaagctatggcggtctggtggggagttgcaaagcggtgccaacgaaatcaaaggagatctctttgctcaatggtattggtcaatctcaaacagtgagttttgatttgaaacaagagtcaaaacagcctatttcgttggtgactctgtttgagctagtagctgttgatctgcagactttgaatgacaatcttttatcgattgttggtgcggaaaatccggttttgatatctgcggctgagcagattttcggagctggtggtaaaagaatgagaccgggtttggtattccttgtatcacatgccacggcggaattagcaggcctaaaggaactaacaacagaacaccggcgtttggctgagatcatcgagatgatacacactgcaagcttgatacacgacgatgtgttagacgagagtgacatgcgaagaggaaaggaaacagttcatgagcttttcggcacaagagtagcggtgctagctggagatttcatgtttgctcaagcgtcatggtacttagcaaatctcgagaatcttgaagttattaagctcatcagtcaggtgatcaaagactttgcaagcggagagataaagcaggcgtccagcttatttgactgcgacaccaagctcgacgagtacttactcaaaagtttctacaagacagcctctttagtggctgcgagcaccaaaggagctgccattttcagcagagttgagcctgatgtgacagaacaaatgtacgagtttgggaagaatctcggtctctctttccagatagttgatgatattttggatttcactcagtcgacagagcagctcgggaagccagcagggagtgatttggctaaaggtaacttaacagcacctgtgattttcgctctggagagggagccaaggctaagagagatcattgagtcagagttttgtgaggcgggttctctggaagaagcgattgaagcggtgacaaaaggtggggggattaagagagcacaagaattggctagggagaaagctgatgacgctataaagaatctacagtgtctacctcgaagtggcttcaggtcggctctagaagatatggtgttgtataacctcgaaagaattgattagctttccaaaagaagttggaaacactgagacatgcttatagacttatagtacagtaaaacacacacaaaagaggaatgattgtaactcctatttcaaaagtaataacacatgatttcg

SEQ ID NO: 36873 - protein, 406 aa, Arabidopsis thaliana
  peptide (1)..(406): Ceres Seq. ID no. 12562347
  misc_feature (113)..(360): Pfam Name: Polyprenyl synthetase Pfam Description: Polyprenyl synthetase
  misc_feature (94)..(404): Homolog of NCBI NO: 30468171 NR Description: prenyl transferase [Cyanidioschyzon merolae]
  misc_feature (86)..(405): Homolog of NCBI NO: 17227592 NR Description: solanesyl diphosphate synthase [Nostoc sp. PCC
  misc_feature (86)..(405): Homolog of NCBI NO: 23125555 NR Description: hypothetical protein [Nostoc punctiforme]
  misc_feature (83)..(405): Homolog of NCBI NO: 22299300 NR Description: solanesyl diphosphate synthase
  misc_feature (82)..(405): Homolog of NCBI NO: 16329171 NR Description: solanesyl diphosphate synthase [Synechocystis sp.
  misc_feature (86)..(406): Homolog of NCBI NO: 28393675 NR Description: putative geranyl diphosphate synthase (GPPS)
  misc_feature (45)..(406): Homolog of NCBI NO: 25314280 NR Description: prenyl transferase homolog [imported] -
  misc_feature (1)..(406): Homolog of NCBI NO: 22329620 NR Description: geranyl diphosphate synthase
  misc_feature (63)..(406): Homolog of NCBI NO: 25314331 NR Description: hypothetical protein T30F21.15 [imported] -
  misc_feature (1)..(406): Homolog of NCBI NO: 30699332 NR Description: geranyl diphosphate synthase
MMTSCRNIDLGTMMMACGCGRRQFPSLAKTVCKFTSSNRSYGGLVGSCKAVPTKSKEISLLNGIGQSQTVSFDLKQESKQPISLVTLFELVAVDLQTLNDNLLSIVGAENPVLISAAEQIFGAGGKRMRPGLVFLVSHATAELAGLKELTTEHRRLAEIIEMIHTASLIHDDVLDESDMRRGKETVHELFGTRVAVLAGDFMFAQASWYLANLENLEVIKLISQVIKDFASGEIKQASSLFDCDTKLDEYLLKSFYKTASLVAASTKGAAIFSRVEPDVTEQMYEFGKNLGLSFQIVDDILDFTQSTEQLGKPAGSDLAKGNLTAPVIFALEREPRLREIIESEFCEAGSLEEAIEAVTKGGGIKRAQELAREKADDAIKNLQCLPRSGFRSALEDMVLYNLERID

SEQ ID NO: 36874 - protein, 405 aa, Arabidopsis thaliana
  peptide (1)..(405): Ceres Seq. ID no. 12562348
  misc_feature (112)..(359): Pfam Name: Polyprenyl synthetase Pfam Description: Polyprenyl synthetase
  misc_feature (93)..(403): Homolog of NCBI NO: 30468171 NR Description: prenyl transferase [Cyanidioschyzon merolae]
  misc_feature (85)..(404): Homolog of NCBI NO: 17227592 NR Description: solanesyl diphosphate synthase [Nostoc sp. PCC
  misc_feature (85)..(404): Homolog of NCBI NO: 23125555 NR Description: hypothetical protein [Nostoc punctiforme]
  misc_feature (82)..(404): Homolog of NCBI NO: 22299300 NR Description: solanesyl diphosphate synthase
  misc_feature (81)..(404): Homolog of NCBI NO: 16329171 NR Description: solanesyl diphosphate synthase [Synechocystis sp.
  misc_feature (85)..(405): Homolog of NCBI NO: 28393675 NR Description: putative geranyl diphosphate synthase (GPPS)
  misc_feature (44)..(405): Homolog of NCBI NO: 25314280 NR Description: prenyl transferase homolog [imported] -
  misc_feature (1)..(405): Homolog of NCBI NO: 22329620 NR Description: geranyl diphosphate synthase
  misc_feature (62)..(405): Homolog of NCBI NO: 25314331 NR Description: hypothetical protein T30F21.15 [imported] -
  misc_feature (1)..(405): Homolog of NCBI NO: 30699332 NR Description: geranyl diphosphate synthase
MTSCRNIDLGTMMMACGCGRRQFPSLAKTVCKFTSSNRSYGGLVGSCKAVPTKSKEISLLNGIGQSQTVSFDLKQESKQPISLVTLFELVAVDLQTLNDNLLSIVGAENPVLISAAEQIFGAGGKRMRPGLVFLVSHATAELAGLKELTTEHRRLAEIIEMIHTASLIHDDVLDESDMRRGKETVHELFGTRVAVLAGDFMFAQASWYLANLENLEVIKLISQVIKDFASGEIKQASSLFDCDTKLDEYLLKSFYKTASLVAASTKGAAIFSRVEPDVTEQMYEFGKNLGLSFQIVDDILDFTQSTEQLGKPAGSDLAKGNLTAPVIFALEREPRLREIIESEFCEAGSLEEAIEAVTKGGGIKRAQELAREKADDAIKNLQCLPRSGFRSALEDMVLYNLERID

SEQ ID NO: 36875 - protein, 394 aa, Arabidopsis thaliana
  peptide (1)..(394): Ceres Seq. ID no. 12562349
  misc_feature (101)..(348): Pfam Name: Polyprenyl synthetase Pfam Description: Polyprenyl synthetase
  misc_feature (82)..(392): Homolog of NCBI NO: 30468171 NR Description: prenyl transferase [Cyanidioschyzon merolae]
  misc_feature (74)..(393): Homolog of NCBI NO: 17227592 NR Description: solanesyl diphosphate synthase [Nostoc sp. PCC
  misc_feature (74)..(393): Homolog of NCBI NO: 23125555 NR Description: hypothetical protein [Nostoc punctiforme]
  misc_feature (71)..(393): Homolog of NCBI NO: 22299300 NR Description: solanesyl diphosphate synthase
  misc_feature (70)..(393): Homolog of NCBI NO: 16329171 NR Description: solanesyl diphosphate synthase [Synechocystis sp.
  misc_feature (74)..(394): Homolog of NCBI NO: 28393675 NR Description: putative geranyl diphosphate synthase (GPPS)
  misc_feature (33)..(394): Homolog of NCBI NO: 25314280 NR Description: prenyl transferase homolog [imported] -
  misc_feature (1)..(394): Homolog of NCBI NO: 22329620 NR Description: geranyl diphosphate synthase
  misc_feature (51)..(394): Homolog of NCBI NO: 25314331 NR Description: hypothetical protein T30F21.15 [imported] -
  misc_feature (1)..(394): Homolog of NCBI NO: 30699332 NR Description: geranyl diphosphate synthase
MMMACGCGRRQFPSLAKTVCKFTSSNRSYGGLVGSCKAVPTKSKEISLLNGIGQSQTVSFDLKQESKQPISLVTLFELVAVDLQTLNDNLLSIVGAENPVLISAAEQIFGAGGKRMRPGLVFLVSHATAELAGLKELTTEHRRLAEIIEMIHTASLIHDDVLDESDMRRGKETVHELFGTRVAVLAGDFMFAQASWYLANLENLEVIKLISQVIKDFASGEIKQASSLFDCDTKLDEYLLKSFYKTASLVAASTKGAAIFSRVEPDVTEQMYEFGKNLGLSFQIVDDILDFTQSTEQLGKPAGSDLAKGNLTAPVIFALEREPRLREIIESEFCEAGSLEEAIEAVTKGGGIKRAQELAREKADDAIKNLQCLPRSGFRSALEDMVLYNLERID

SEQ ID NO: 36876 - DNA, 1121 bp, Arabidopsis thaliana
  misc_feature (1)..(1121): Ceres Seq. ID no. 13592128
  misc_feature: MA Experiment ID: 20000227 Result: Up-regulated in Transcription
  misc_feature: MA Experiment 20000227 PARAMETER Experiment Name: At_Root-Tips-vs-Tops_P Parameter: Tissue Value: Root Tips vs. Root Tops
  misc_feature: MA Experiment ID: 20000495 Result: Up-regulated in Transcription
  misc_feature: MA Experiment 20000495 PARAMETER Experiment Name: At_Guard_Cells_P Parameter: Harvest Date Value: 8/2/2002
  misc_feature: MA Experiment 20000495 PARAMETER Experiment Name: At_Guard_Cells_P Parameter: Organism Value: A. thaliana
  misc_feature: MA Experiment 20000495 PARAMETER Experiment Name: At_Guard_Cells_P Parameter: Tissue Value: Guard Cells vs. Leaves
  misc_feature: MA Experiment ID: 20000794 Result: Down-regulated in Transcription
  misc_feature: MA Experiment 20000794 PARAMETER Experiment Name: At_Petals_P Parameter: Age (day) Value: 23-25 days
  misc_feature: MA Experiment 20000794 PARAMETER Experiment Name: At_Petals_P Parameter: Plant Line Value: WS
  misc_feature: MA Experiment 20000794 PARAMETER Experiment Name: At_Petals_P Parameter: Tissue Value: Petals vs. Whole plant
  misc_feature: MA Experiment ID: 20001458 Result: Up-regulated in Transcription
  misc_feature: MA Experiment 20001458 PARAMETER Experiment Name: At_50mM_NH4NO3_L-to-H_P Parameter: Age (day) Value: Undefined
  misc_feature: MA Experiment 20001458 PARAMETER Experiment Name: At_50mM_NH4NO3_L-to-H_P Parameter: Organism Value: Undefined
  misc_feature: MA Experiment 20001458 PARAMETER Experiment Name: At_50mM_NH4NO3_L-to-H_P Parameter: Plant Line Value: Undefined
  misc_feature: MA Experiment 20001458 PARAMETER Experiment Name: At_50mM_NH4NO3_L-to-H_P Parameter: Timepoint (hr) Value: 2
  misc_feature: MA Experiment 20001458 PARAMETER Experiment Name: At_50mM_NH4NO3_L-to-H_P Parameter: Tissue Value: Siliques
  misc_feature: MA Experiment 20001458 PARAMETER Experiment Name: At_50mM_NH4NO3_L-to-H_P Parameter: Treatment Value: 50mM NH4NO3 vs. 100mM Manitol
  misc_feature: MA Experiment ID: 20001558 Result: Up-regulated in Transcription
  misc_feature: MA Experiment 20001558 PARAMETER Experiment Name: At_Drought_Soil_Dry_P Parameter: Age (day) Value: 27
  misc_feature: MA Experiment 20001558 PARAMETER Experiment Name: At_Drought_Soil_Dry_P Parameter: Organism Value: A. thaliana
  misc_feature: MA Experiment 20001558 PARAMETER Experiment Name: At_Drought_Soil_Dry_P Parameter: Plant Line Value: WS
  misc_feature: MA Experiment 20001558 PARAMETER Experiment Name: At_Drought_Soil_Dry_P Parameter: Post Timepoint (hr) Value: 6
  misc_feature: MA Experiment 20001558 PARAMETER Experiment Name: At_Drought_Soil_Dry_P Parameter: Post-Treatment Value: Re-Water vs. No Drought
  misc_feature: MA Experiment 20001558 PARAMETER Experiment Name: At_Drought_Soil_Dry_P Parameter: Timepoint (day) Value: 13
  misc_feature: MA Experiment 20001558 PARAMETER Experiment Name: At_Drought_Soil_Dry_P Parameter: Treatment Value: Drought vs. No Drought
  misc_feature: MA Experiment ID: 20001757 Result: Up-regulated in Transcription
  misc_feature: MA Experiment 20001757 PARAMETER Experiment Name: At_50mM_NH4NO3_L-to-H_P Parameter: Timepoint (hr) Value: 6
  misc_feature: MA Experiment 20001757 PARAMETER Experiment Name: At_50mM_NH4NO3_L-to-H_P Parameter: Tissue Value: Leaf
  misc_feature: MA Experiment 20001757 PARAMETER Experiment Name: At_50mM_NH4NO3_L-to-H_P Parameter: Treatment Value: 50mM NH4NO3 vs 100mM Mannitol
aaatgaaaagccagtgaattagggctttctctcacttgttgaagccgcttcttcttcttcctcactgtagctcgtcgtcgctacaccatctagaagacccttaaccatggctgtcgggaagaacaagaggatttcaaagggtaggaaaggaggaaagaagaaggctgttgatcccttctccaagaaggattggtatgacgtgaaggctcctggttctttcacgaacaggaatgttgggaagactcttgtttccaggactcagggtaccaagattgcctctgagggactgaaacacagggtgtttgaggtttctcttgctgatctacaaaatgatgaggataatgcctacaggaagatccgtcttagagctgaagatgttcagggaaggaatgtgttgacccagttctggggtatggatttcacaaccgacaagctaaggtcattggtgaagaagtggcagactttgattgaagcccatgtcgatgtgaaaaccacagacggctacaccttgaggatgttctgcatcgccttcacaaagagacgtgctaaccaagtgaagcgtacctgttacgctcaatccagccaaatccgtcagatccgcagaaagatgagtgagattatggtgaaggaggcttcatcttgtgacctcaaggagctagtggccaagttcatcccagaggccattggaagagagattgagaaggcaacacagggcatctacccgttgcagaatgtgttcatccgtaaagtgaagatcctaaaggctcccaagtttgaccttggaaagctcatggaggtgcatggagattacacagcagaggatgttggtgtgaaggtagacaggccagctgatgagacaatggttgaggagccaacagaaatcatcggagcttaggggattatagatttgtttgttttttcgctggcaaaaaaaaaaaagaacctaatgttatgtcgccattggtgtgactggttttggactcgtttttgatggatgatctttattgtttatcatgttttaccttttttattatatgtcttagttcttcacttcttcttttcatttttggaatctggatttgctctctcttcaaatatttaaatggacaagattaggattt

SEQ ID NO: 36877 - protein, 262 aa, Arabidopsis thaliana [sequence omitted]

SEQ ID NO: 36878 - protein, 160 aa, Arabidopsis thaliana
  peptide (1)..(160): Ceres Seq. ID no. 13592130
  misc_feature (1)..(120): Pfam Name: Ribosomal S3Ae family Pfam Description: Ribosomal S3Ae family
  misc_feature (1)..(120): Pfam Name: Ribosomal S3Ae family Pfam Description: Ribosomal S3Ae family
  misc_feature (1)..(137): Homolog of NCBI NO: 1856971 NR Description: This gene is specifically expressed at the S during the cell cycle in the synchronous culture of periwinkle
  misc_feature (1)..(153): Homolog of NCBI NO: 7441116 NR Description: ribosomal protein S3a, cytosolic - rice
  misc_feature (1)..(150): Homolog of NCBI NO: 1350986 NR Description: 40S RIBOSOMAL PROTEIN S3A (CYC07 PROTEIN)
  misc_feature (1)..(160): Homolog of NCBI NO: 1350983 NR Description: 40S RIBOSOMAL PROTEIN S3A (CYC07 PROTEIN)
  misc_feature (1)..(160): Homolog of NCBI NO: 1350984 NR Description: 40S RIBOSOMAL PROTEIN S3A
  misc_feature (1)..(137): Homolog of NCBI NO: 1856971 NR Description: This gene is specifically expressed at the S during the cell cycle in the synchronous culture of periwinkle
  misc_feature (1)..(150): Homolog of NCBI NO: 1350986 NR Description: 40S RIBOSOMAL PROTEIN S3A (CYC07 PROTEIN)
  misc_feature (1)..(160): Homolog of NCBI NO: 1350984 NR Description: 40S RIBOSOMAL PROTEIN S3A
  misc_feature (1)..(160): Homolog of NCBI NO: 15236171 NR Description: 40S ribosomal protein S3A (RPS3aB) [Arabidopsis
  misc_feature (1)..(160): Homolog of NCBI NO: 15229364 NR Description: 40S ribosomal protein S3A (RPS3aA) [Arabidopsis
  misc_feature (1)..(160): Homolog of NCBI NO: 1350981 NR Description: 40S RIBOSOMAL PROTEIN S3A (S PHASE SPECIFIC
  misc_feature (1)..(160): Homolog of NCBI NO: 6714564 NR Description: cyc07 [Daucus carota]
  misc_feature (1)..(160): Homolog of NCBI NO: 24817254 NR Description: ribosomal protein S3a [Cicer arietinum]
  misc_feature (1)..(160): Homolog of NCBI NO: 1350983 NR Description: 40S RIBOSOMAL PROTEIN S3A (CYC07 PROTEIN)
  misc_feature (1)..(153): Homolog of NCBI NO: 7441116 NR Description: ribosomal protein S3a, cytosolic - rice
  misc_feature (1)..(160): Homolog of NCBI NO: 24817254 NR Description: ribosomal protein S3a [Cicer arietinum]
  misc_feature (1)..(160): Homolog of NCBI NO: 6714564 NR Description: cyc07 [Daucus carota]
  misc_feature (1)..(160): Homolog of NCBI NO: 1350981 NR Description: 40S RIBOSOMAL PROTEIN S3A (S PHASE SPECIFIC
  misc_feature (1)..(160): Homolog of NCBI NO: 15229364 NR Description: 40S ribosomal protein S3A (RPS3aA) [Arabidopsis
  misc_feature (1)..(160): Homolog of NCBI NO: 15236171 NR Description: 40S ribosomal protein S3A (RPS3aB) [Arabidopsis
MDFTTDKLRSLVKKWQTLIEAHVDVKTTDGYTLRMFCIAFTKRRANQVKRTCYAQSSQIRQIRRKMSEIMVKEASSCDLKELVAKFIPEAIGREIEKATQGIYPLQNVFIRKVKILKAPKFDLGKLMEVHGDYTAEDVGVKVDRPADETMVEEPTEIIGA

SEQ ID NO: 36879 - DNA, 732 bp, Arabidopsis thaliana
  misc_feature (1)..(732): Ceres Seq. ID no. 13580657
  misc_feature: MA Experiment ID: 20000169 Result: Up-regulated in Transcription
  misc_feature: MA Experiment 20000169 PARAMETER Experiment Name: At_100uM_ABA_P Parameter: Age (day) Value: 14
  misc_feature: MA Experiment 20000169 PARAMETER Experiment Name: At_100uM_ABA_P Parameter: Organism Value: A. thaliana
  misc_feature: MA Experiment 20000169 PARAMETER Experiment Name: At_100uM_ABA_P Parameter: Plant Line Value: WS
  misc_feature: MA Experiment 20000169 PARAMETER Experiment Name: At_100uM_ABA_P Parameter: Timepoint (hr) Value: 6
  misc_feature: MA Experiment 20000169 PARAMETER Experiment Name: At_100uM_ABA_P Parameter: Tissue Value: Aerial
  misc_feature: MA Experiment 20000169 PARAMETER Experiment Name: At_100uM_ABA_P Parameter: Treatment Value: 100uM ABA vs. No Treatment
  misc_feature: MA Experiment ID: 20000171 Result: Up-regulated in Transcription
  misc_feature: MA Experiment 20000171 PARAMETER Experiment Name: At_42deg_Heat_P Parameter: Age (day) Value: 14
  misc_feature: MA Experiment 20000171 PARAMETER Experiment Name: At_42deg_Heat_P Parameter: Organism Value: A. thaliana
  misc_feature: MA Experiment 20000171 PARAMETER Experiment Name: At_42deg_Heat_P Parameter: Plant Line Value: WS
  misc_feature: MA Experiment 20000171 PARAMETER Experiment Name: At_42deg_Heat_P Parameter: Temperature (deg C) Value: 42 vs. 22
  misc_feature: MA Experiment 20000171 PARAMETER Experiment Name: At_42deg_Heat_P Parameter: Timepoint (hr) Value: 1
  misc_feature: MA Experiment 20000171 PARAMETER Experiment Name: At_42deg_Heat_P Parameter: Tissue Value: Aerial
  misc_feature: MA Experiment ID: 20000179 Result: Up-regulated in Transcription
  misc_feature: MA Experiment 20000179 PARAMETER Experiment Name: At_Germinating_Seeds_P Parameter: Age (hr) Value: 6 vs. 0
  misc_feature: MA Experiment 20000179 PARAMETER Experiment Name: At_Germinating_Seeds_P Parameter: Tissue Value: Germinating Seeds
  misc_feature: MA Experiment ID: 20000180 Result: Up-regulated in Transcription
  misc_feature: MA Experiment 20000180 PARAMETER Experiment Name: At_Germinating_Seeds_P Parameter: Age (hr) Value: 24 vs. 0
  misc_feature: MA Experiment 20000180 PARAMETER Experiment Name: At_Germinating_Seeds_P Parameter: Tissue Value: Germinating Seeds
  misc_feature: MA Experiment ID: 20000460 Result: Down-regulated in Transcription
  misc_feature: MA Experiment 20000460 PARAMETER Experiment Name: At_10percent_PEG_P Parameter: Age (day) Value: 12
  misc_feature: MA Experiment 20000460 PARAMETER Experiment Name: At_10percent_PEG_P Parameter: Organism Value: A. thaliana
  misc_feature: MA Experiment 20000460 PARAMETER Experiment Name: At_10percent_PEG_P Parameter: Plant Line Value: WS
  misc_feature: MA Experiment 20000460 PARAMETER Experiment Name: At_10percent_PEG_P Parameter: Timepoint (day) Value: 12
  misc_feature: MA Experiment 20000460 PARAMETER Experiment Name: At_10percent_PEG_P Parameter: Tissue Value: Whole Plant
  misc_feature: MA Experiment 20000460 PARAMETER Experiment Name: At_10percent_PEG_P Parameter: Treatment Value: 10percent PEG vs. No Treatment
  misc_feature: MA Experiment ID: 20000527 Result: Down-regulated in Transcription
  misc_feature: MA Experiment 20000527 PARAMETER Experiment Name: At_10percent_PEG_P Parameter: Age (day) Value: 20
  misc_feature: MA Experiment 20000527 PARAMETER Experiment Name: At_10percent_PEG_P Parameter: Organism Value: A. thaliana
  misc_feature: MA Experiment 20000527 PARAMETER Experiment Name: At_10percent_PEG_P Parameter: Plant Line Value: WS
  misc_feature: MA Experiment 20000527 PARAMETER Experiment Name: At_10percent_PEG_P Parameter: Timepoint (day) Value: 20
  misc_feature: MA Experiment 20000527 PARAMETER Experiment Name: At_10percent_PEG_P Parameter: Tissue Value: Whole Plant
  misc_feature: MA Experiment 20000527 PARAMETER Experiment Name: At_10percent_PEG_P Parameter: Treatment Value: 10percent PEG vs. No Treatment
  misc_feature: MA Experiment ID: 20000573 Result: Down-regulated in Transcription
  misc_feature: MA Experiment 20000573 PARAMETER Experiment Name: At_100uM_ABA_Mutants__P Parameter: Organism Value: A. thaliana
  misc_feature: MA Experiment 20000573 PARAMETER Experiment Name: At_100uM_ABA_Mutants__P Parameter: Plant Line Value: CS22 vs. Ler wt
  misc_feature: MA Experiment 20000573 PARAMETER Experiment Name: At_100uM_ABA_Mutants__P Parameter: Timepoint (hr) Value: N/A
  misc_feature: MA Experiment 20000573 PARAMETER Experiment Name: At_100uM_ABA_Mutants__P Parameter: Tissue Value: Whole Plant
  misc_feature: MA Experiment 20000573 PARAMETER Experiment Name: At_100uM_ABA_Mutants__P Parameter: Treatment Value: None
  misc_feature: MA Experiment ID: 20000574 Result: Down-regulated in Transcription
  misc_feature: MA Experiment 20000574 PARAMETER Experiment Name: At_100uM_ABA_Mutants__P Parameter: Organism Value: A. thaliana
  misc_feature: MA Experiment 20000574 PARAMETER Experiment Name: At_100uM_ABA_Mutants__P Parameter: Plant Line Value: CS23 vs. Ler wt
  misc_feature: MA Experiment 20000574 PARAMETER Experiment Name: At_100uM_ABA_Mutants__P Parameter: Timepoint (hr) Value: N/A
  misc_feature: MA Experiment 20000574 PARAMETER Experiment Name: At_100uM_ABA_Mutants__P Parameter: Tissue Value: Whole Plant
  misc_feature: MA Experiment 20000574 PARAMETER Experiment Name: At_100uM_ABA_Mutants__P Parameter: Treatment Value: None
  misc_feature: MA Experiment ID: 20001248 Result: Down-regulated in Transcription
  misc_feature: MA Experiment 20001248 PARAMETER Experiment Name: At_Far-red-induction_P Parameter: Age (day) Value: 7
  misc_feature: MA Experiment 20001248 PARAMETER Experiment Name: At_Far-red-induction_P Parameter: Light Value: Far-red vs. White
  misc_feature: MA Experiment 20001248 PARAMETER Experiment Name: At_Far-red-induction_P Parameter: Organism Value: A. thaliana
  misc_feature: MA Experiment 20001248 PARAMETER Experiment Name: At_Far-red-induction_P Parameter: Plant Line Value: Columbia
  misc_feature: MA Experiment 20001248 PARAMETER Experiment Name: At_Far-red-induction_P Parameter: Timepoint (hr) Value: 4
  misc_feature: MA Experiment 20001248 PARAMETER Experiment Name: At_Far-red-induction_P Parameter: Tissue Value: Whole Plant
  misc_feature: MA Experiment ID: 20001450 Result: Down-regulated in Transcription
  misc_feature: MA Experiment 20001450 PARAMETER Experiment Name: At_Far-red-induction_P Parameter: Age (day) Value: 7
  misc_feature: MA Experiment 20001450 PARAMETER Experiment Name: At_Far-red-induction_P Parameter: Light Value: Far-red vs. White
  misc_feature: MA Experiment 20001450 PARAMETER Experiment Name: At_Far-red-induction_P Parameter: Organism Value: A. thaliana
  misc_feature: MA Experiment 20001450 PARAMETER Experiment Name: At_Far-red-induction_P Parameter: Plant Line Value: Columbia
  misc_feature: MA Experiment 20001450 PARAMETER Experiment Name: At_Far-red-induction_P Parameter: Timepoint (hr) Value: 8
  misc_feature: MA Experiment 20001450 PARAMETER Experiment Name: At_Far-red-induction_P Parameter: Tissue Value: Whole Plant
  misc_feature: MA Experiment ID: 20001560 Result: Up-regulated in Transcription
  misc_feature: MA Experiment 20001560 PARAMETER Experiment Name: At_Drought_Soil_Dry_P Parameter: Age (day) Value: 28
  misc_feature: MA Experiment 20001560 PARAMETER Experiment Name: At_Drought_Soil_Dry_P Parameter: Organism Value: A. thaliana
  misc_feature: MA Experiment 20001560 PARAMETER Experiment Name: At_Drought_Soil_Dry_P Parameter: Plant Line Value: WS
  misc_feature: MA Experiment 20001560 PARAMETER Experiment Name: At_Drought_Soil_Dry_P Parameter: Post Timepoint (hr) Value: None
  misc_feature: MA Experiment 20001560 PARAMETER Experiment Name: At_Drought_Soil_Dry_P Parameter: Post-Treatment Value: None
  misc_feature: MA Experiment 20001560 PARAMETER Experiment Name: At_Drought_Soil_Dry_P Parameter: Timepoint (day) Value: 14
  misc_feature: MA Experiment 20001560 PARAMETER Experiment Name: At_Drought_Soil_Dry_P Parameter: Treatment Value: Drought vs. No Drought
agaacatcctaatcaaaaaataaaaagtagtactcgtatcttactcgtgccagccactcgcatttctccagattttattatccttcctcgaaacaagagcttagctaagatgacgaagaactacccaaccgtgagcgaagattacaagaaggctgttgagaagtgcaggaggaagctcagaggtttgatcgctgagaagaactgtgcacccatcatggtccgactcgcatggcactctgctggaactttcgattgtcaatcaaggactggaggtccattcggaacaatgaggtttgacgctgagcaagctcatggagccaacagtggtatccacattgctcttaggttgttggaccccatcagggagcaattccctaccatctcttttgctgatttccatcagcttgctggtgttgtggccgttgaagttactggtggccctgacattcctttccaccctggaagagaggacaagccccaaccacctccagagggtcgtcttcctgatgcttaagctgtgacgtatgctctgtgtgtgtgtgtgtgtctccccgagagtcatggctgtttttggttgggggctggaggggtcgcattgcatttgaactttgtcatatgattgcttaatgtactctcggatttacgtatctgtttttttcggtgggttgtgatttgaacacatccgttgcgcttttgctgcttagacacattaataaaattaatttctctcgc

SEQ ID NO: 36880 - protein, 170 aa, Arabidopsis thaliana
  peptide (1)..(170): Ceres Seq. ID no. 13580658
  misc_feature (55)..(170): Pfam Name: Peroxidase Pfam Description: Peroxidase
  misc_feature (55)..(170): Pfam Name: Peroxidase Pfam Description: Peroxidase
  misc_feature (37)..(170): Homolog of NCBI NO: 24636598 NR Description: ascorbate peroxidase [Solanum tuberosum]
  misc_feature (37)..(170): Homolog of NCBI NO: 541927 NR Description: L-ascorbate peroxidase (EC 1.11.1.11) - radish
  misc_feature (37)..(170): Homolog of NCBI NO: 1890354 NR Description: L-ascorbate peroxidase [Brassica napus]
  misc_feature (37)..(170): Homolog of NCBI NO: 7488439 NR Description: L-ascorbate peroxidase (EC 1.11.1.11) - leaf
  misc_feature (37)..(170): Homolog of NCBI NO: 18265379 NR Description: ascorbate peroxidase [Brassica oleracea]
  misc_feature (37)..(170): Homolog of NCBI NO: 24636598 NR Description: ascorbate peroxidase [Solanum tuberosum]
  misc_feature (37)..(170): Homolog of NCBI NO: 1890354 NR Description: L-ascorbate peroxidase [Brassica napus]
  misc_feature (37)..(170): Homolog of NCBI NO: 18265379 NR Description: ascorbate peroxidase [Brassica oleracea]
  misc_feature (24)..(170): Homolog of NCBI NO: 99735 NR Description: L-ascorbate peroxidase (EC 1.11.1.11) precursor -
  misc_feature (37)..(170): Homolog of NCBI NO: 15223049 NR Description: ascorbate peroxidase, putative (APX) [Arabidopsis
  misc_feature (37)..(170): Homolog of NCBI NO: 24421233 NR Description: ascorbate peroxidase [Brassica juncea]
  misc_feature (37)..(170): Homolog of NCBI NO: 24421231 NR Description: ascorbate peroxidase [Brassica juncea]
  misc_feature (37)..(170): Homolog of NCBI NO: 18265381 NR Description: ascorbate peroxidase [Brassica oleracea]
  misc_feature (37)..(170): Homolog of NCBI NO: 7488439 NR Description: L-ascorbate peroxidase (EC 1.11.1.11) - leaf
  misc_feature (37)..(170): Homolog of NCBI NO: 541927 NR Description: L-ascorbate peroxidase (EC 1.11.1.11) - radish
  misc_feature (37)..(170): Homolog of NCBI NO: 18265381 NR Description: ascorbate peroxidase [Brassica oleracea]
  misc_feature (37)..(170): Homolog of NCBI NO: 24421231 NR Description: ascorbate peroxidase [Brassica juncea]
  misc_feature (37)..(170): Homolog of NCBI NO: 24421233 NR Description: ascorbate peroxidase [Brassica juncea]
  misc_feature (37)..(170): Homolog of NCBI NO: 15223049 NR Description: ascorbate peroxidase, putative (APX) [Arabidopsis
  misc_feature (24)..(170): Homolog of NCBI NO: 99735 NR Description: L-ascorbate peroxidase (EC 1.11.1.11) precursor -
EHPNQKIKSSTRILLVPATRISPDFIILPRNKSLAKMTKNYPTVSEDYKKAVEKCRRKLRGLIAEKNCAPIMVRLAWHSAGTFDCQSRTGGPFGTMRFDAEQAHGANSGIHIALRLLDPIREQFPTISFADFHQLAGVVAVEVTGGPDIPFHPGREDKPQPPPEGRLPDA

SEQ ID NO: 36881 - protein, 134 aa, Arabidopsis thaliana
  peptide (1)..(134): Ceres Seq. ID no. 13580659
  misc_feature (19)..(134): Pfam Name: Peroxidase Pfam Description: Peroxidase
  misc_feature (19)..(134): Pfam Name: Peroxidase Pfam Description: Peroxidase
  misc_feature (1)..(134): Homolog of NCBI NO: 24636598 NR Description: ascorbate peroxidase [Solanum tuberosum]
  misc_feature (1)..(134): Homolog of NCBI NO: 541927 NR Description: L-ascorbate peroxidase (EC 1.11.1.11) - radish
  misc_feature (1)..(134): Homolog of NCBI NO: 1890354 NR Description: L-ascorbate peroxidase [Brassica napus]
  misc_feature (1)..(134): Homolog of NCBI NO: 7488439 NR Description: L-ascorbate peroxidase (EC 1.11.1.11) - leaf
  misc_feature (1)..(134): Homolog of NCBI NO: 18265379 NR Description: ascorbate peroxidase [Brassica oleracea]
  misc_feature (1)..(134): Homolog of NCBI NO: 24636598 NR Description: ascorbate peroxidase [Solanum tuberosum]
  misc_feature (1)..(134): Homolog of NCBI NO: 1890354 NR Description: L-ascorbate peroxidase [Brassica napus]
  misc_feature (1)..(134): Homolog of NCBI NO: 18265379 NR Description: ascorbate peroxidase [Brassica oleracea]
  misc_feature (1)..(134): Homolog of NCBI NO: 99735 NR Description: L-ascorbate peroxidase (EC 1.11.1.11) precursor -
  misc_feature (1)..(134): Homolog of NCBI NO: 15223049 NR Description: ascorbate peroxidase, putative (APX) [Arabidopsis
  misc_feature (1)..(134): Homolog of NCBI NO: 24421233 NR Description: ascorbate peroxidase [Brassica juncea]
  misc_feature (1)..(134): Homolog of NCBI NO: 24421231 NR Description: ascorbate peroxidase [Brassica juncea]
  misc_feature (1)..(134): Homolog of NCBI NO: 18265381 NR Description: ascorbate peroxidase [Brassica oleracea]
  misc_feature (1)..(134): Homolog of NCBI NO: 7488439 NR Description: L-ascorbate peroxidase (EC 1.11.1.11) - leaf
  misc_feature (1)..(134): Homolog of NCBI NO: 541927 NR Description: L-ascorbate peroxidase (EC 1.11.1.11) - radish
  misc_feature (1)..(134): Homolog of NCBI NO: 18265381 NR Description: ascorbate peroxidase [Brassica oleracea]
  misc_feature (1)..(134): Homolog of NCBI NO: 24421231 NR Description: ascorbate peroxidase [Brassica juncea]
  misc_feature (1)..(134): Homolog of NCBI NO: 24421233 NR Description: ascorbate peroxidase [Brassica juncea]
  misc_feature (1)..(134): Homolog of NCBI NO: 15223049 NR Description: ascorbate peroxidase, putative (APX) [Arabidopsis
  misc_feature (1)..(134): Homolog of NCBI NO: 99735 NR Description: L-ascorbate peroxidase (EC 1.11.1.11) precursor -
MTKNYPTVSEDYKKAVEKCRRKLRGLIAEKNCAPIMVRLAWHSAGTFDCQSRTGGPFGTMRFDAEQAHGANSGIHIALRLLDPIREQFPTISFADFHQLAGVVAVEVTGGPDIPFHPGREDKPQPPPEGRLPDA

SEQ ID NO: 36882 - protein, 99 aa, Arabidopsis thaliana
  peptide (1)..(99): Ceres Seq. ID no. 13580660
  misc_feature (1)..(99): Pfam Name: Peroxidase Pfam Description: Peroxidase
  misc_feature (1)..(99): Pfam Name: Peroxidase Pfam Description: Peroxidase
  misc_feature (1)..(99): Homolog of NCBI NO: 24636598 NR Description: ascorbate peroxidase [Solanum tuberosum]
  misc_feature (1)..(99): Homolog of NCBI NO: 541927 NR Description: L-ascorbate peroxidase (EC 1.11.1.11) - radish
  misc_feature (1)..(99): Homolog of NCBI NO: 1890354 NR Description: L-ascorbate peroxidase [Brassica napus]
  misc_feature (1)..(99): Homolog of NCBI NO: 7488439 NR Description: L-ascorbate peroxidase (EC 1.11.1.11) - leaf
  misc_feature (1)..(99): Homolog of NCBI NO: 18265379 NR Description: ascorbate peroxidase [Brassica oleracea]
  misc_feature (1)..(99): Homolog of NCBI NO: 24636598 NR Description: ascorbate peroxidase [Solanum tuberosum]
  misc_feature (1)..(99): Homolog of NCBI NO: 1890354 NR Description: L-ascorbate peroxidase [Brassica napus]
  misc_feature (1)..(99): Homolog of NCBI NO: 18265379 NR Description: ascorbate peroxidase [Brassica oleracea]
  misc_feature (1)..(99): Homolog of NCBI NO: 99735 NR Description: L-ascorbate peroxidase (EC 1.11.1.11) precursor -
  misc_feature (1)..(99): Homolog of NCBI NO: 15223049 NR Description: ascorbate peroxidase, putative (APX) [Arabidopsis
  misc_feature (1)..(99): Homolog of NCBI NO: 24421233 NR Description: ascorbate peroxidase [Brassica juncea]
  misc_feature (1)..(99): Homolog of NCBI NO: 24421231 NR Description: ascorbate peroxidase [Brassica juncea]
  misc_feature (1)..(99): Homolog of NCBI NO: 18265381 NR Description: ascorbate peroxidase [Brassica oleracea]
  misc_feature (1)..(99): Homolog of NCBI NO: 7488439 NR Description: L-ascorbate peroxidase (EC 1.11.1.11) - leaf
  misc_feature (1)..(99): Homolog of NCBI NO: 541927 NR Description: L-ascorbate peroxidase (EC 1.11.1.11) - radish
  misc_feature (1)..(99): Homolog of NCBI NO: 18265381 NR Description: ascorbate peroxidase [Brassica oleracea]
  misc_feature (1)..(99): Homolog of NCBI NO: 24421231 NR Description: ascorbate peroxidase [Brassica juncea]
  misc_feature (1)..(99): Homolog of NCBI NO: 24421233 NR Description: ascorbate peroxidase [Brassica juncea]
  misc_feature (1)..(99): Homolog of NCBI NO: 15223049 NR Description: ascorbate peroxidase, putative (APX) [Arabidopsis
  misc_feature (1)..(99): Homolog of NCBI NO: 99735 NR Description: L-ascorbate peroxidase (EC 1.11.1.11) precursor -
MVRLAWHSAGTFDCQSRTGGPFGTMRFDAEQAHGANSGIHIALRLLDPIREQFPTISFADFHQLAGVVAVEVTGGPDIPFHPGREDKPQPPPEGRLPDA

SEQ ID NO: 36883 - DNA, 739 bp, Arabidopsis thaliana
  misc_feature (1)..(739): Ceres Seq. ID no. 13592931
  misc_feature: MA Experiment ID: 20000173 Result: Up-regulated in Transcription
  misc_feature: MA Experiment 20000173 PARAMETER Experiment Name: At_42deg_Heat_P Parameter: Age (day) Value: 14
  misc_feature: MA Experiment 20000173 PARAMETER Experiment Name: At_42deg_Heat_P Parameter: Organism Value: A. thaliana
  misc_feature: MA Experiment 20000173 PARAMETER Experiment Name: At_42deg_Heat_P Parameter: Plant Line Value: WS
  misc_feature: MA Experiment 20000173 PARAMETER Experiment Name: At_42deg_Heat_P Parameter: Temperature (deg C) Value: 42 vs. 22
  misc_feature: MA Experiment 20000173 PARAMETER Experiment Name: At_42deg_Heat_P Parameter: Timepoint (hr) Value: 6
  misc_feature: MA Experiment 20000173 PARAMETER Experiment Name: At_42deg_Heat_P Parameter: Tissue Value: Aerial
  misc_feature: MA Experiment ID: 20000180 Result: Down-regulated in Transcription
  misc_feature: MA Experiment 20000180 PARAMETER Experiment Name: At_Germinating_Seeds_P Parameter: Age (hr) Value: 24 vs. 0
  misc_feature: MA Experiment 20000180 PARAMETER Experiment Name: At_Germinating_Seeds_P Parameter: Tissue Value: Germinating Seeds
  misc_feature: MA Experiment ID: 20000184 Result: Up-regulated in Transcription
  misc_feature: MA Experiment 20000184 PARAMETER Experiment Name: At_Shoots__P Parameter: Age (day) Value: 7
  misc_feature: MA Experiment 20000184 PARAMETER Experiment Name: At_Shoots__P Parameter: Tissue Value: Shoots vs. Whole Plant
  misc_feature: MA Experiment ID: 20000264 Result: Down-regulated in Transcription
  misc_feature: MA Experiment 20000264 PARAMETER Experiment Name: At_Open_Flower_P Parameter: Age (day) Value: 21
  misc_feature: MA Experiment 20000264 PARAMETER Experiment Name: At_Open_Flower_P Parameter: Plant Line Value: WS
  misc_feature: MA Experiment 20000264 PARAMETER Experiment Name: At_Open_Flower_P Parameter: Tissue Value: Open Flower vs. Whole Plant
  misc_feature: MA Experiment ID: 20000439 Result: Down-regulated in Transcription
  misc_feature: MA Experiment 20000439 PARAMETER Experiment Name: At_Roots__P Parameter: Age (day) Value: 14 vs. 21
  misc_feature: MA Experiment 20000439 PARAMETER Experiment Name: At_Roots__P Parameter: Organism Value: A. thaliana
  misc_feature: MA Experiment 20000439 PARAMETER Experiment Name: At_Roots__P Parameter: Tissue Value: Roots vs. Whole Plant
  misc_feature: MA Experiment ID: 20000794 Result: Down-regulated in Transcription
  misc_feature: MA Experiment 20000794 PARAMETER Experiment Name: At_Petals_P Parameter: Age (day) Value: 23-25 days
  misc_feature: MA Experiment 20000794 PARAMETER Experiment Name: At_Petals_P Parameter: Plant Line Value: WS
  misc_feature: MA Experiment 20000794 PARAMETER Experiment Name: At_Petals_P Parameter: Tissue Value: Petals vs. Whole plant
  misc_feature: MA Experiment ID: 20001450 Result: Up-regulated in Transcription
  misc_feature: MA Experiment 20001450 PARAMETER Experiment Name: At_Far-red-induction_P Parameter: Age (day) Value: 7
  misc_feature: MA Experiment 20001450 PARAMETER Experiment Name: At_Far-red-induction_P Parameter: Light Value: Far-red vs. White
  misc_feature: MA Experiment 20001450 PARAMETER Experiment Name: At_Far-red-induction_P Parameter: Organism Value: A. thaliana
  misc_feature: MA Experiment 20001450 PARAMETER Experiment Name: At_Far-red-induction_P Parameter: Plant Line Value: Columbia
  misc_feature: MA Experiment 20001450 PARAMETER Experiment Name: At_Far-red-induction_P Parameter: Timepoint (hr) Value: 8
  misc_feature: MA Experiment 20001450 PARAMETER Experiment Name: At_Far-red-induction_P Parameter: Tissue Value: Whole Plant
  misc_feature: MA Experiment ID: 20001451 Result: Up-regulated in Transcription
  misc_feature: MA Experiment 20001451 PARAMETER Experiment Name: At_Far-red-induction_P Parameter: Age (day) Value: 7
  misc_feature: MA Experiment 20001451 PARAMETER Experiment Name: At_Far-red-induction_P Parameter: Light Value: Far-red vs. White
  misc_feature: MA Experiment 20001451 PARAMETER Experiment Name: At_Far-red-induction_P Parameter: Organism Value: A. thaliana
  misc_feature: MA Experiment 20001451 PARAMETER Experiment Name: At_Far-red-induction_P Parameter: Plant Line Value: Columbia
  misc_feature: MA Experiment 20001451 PARAMETER Experiment Name: At_Far-red-induction_P Parameter: Timepoint (hr) Value: 24
  misc_feature: MA Experiment 20001451 PARAMETER Experiment Name: At_Far-red-induction_P Parameter: Tissue Value: Whole Plant
  misc_feature: MA Experiment ID: 20001560 Result: Up-regulated in Transcription
  misc_feature: MA Experiment 20001560 PARAMETER Experiment Name: At_Drought_Soil_Dry_P Parameter: Age (day) Value: 28
  misc_feature: MA Experiment 20001560 PARAMETER Experiment Name: At_Drought_Soil_Dry_P Parameter: Organism Value: A. thaliana
  misc_feature: MA Experiment 20001560 PARAMETER Experiment Name: At_Drought_Soil_Dry_P Parameter: Plant Line Value: WS
  misc_feature: MA Experiment 20001560 PARAMETER Experiment Name: At_Drought_Soil_Dry_P Parameter: Post Timepoint (hr) Value: None
  misc_feature: MA Experiment 20001560 PARAMETER Experiment Name: At_Drought_Soil_Dry_P Parameter: Post-Treatment Value: None
  misc_feature: MA Experiment 20001560 PARAMETER Experiment Name: At_Drought_Soil_Dry_P Parameter: Timepoint (day) Value: 14
  misc_feature: MA Experiment 20001560 PARAMETER Experiment Name: At_Drought_Soil_Dry_P Parameter: Treatment Value: Drought vs. No Drought
agaacatcctaatcgaaaaatagtttcgagtttcttcgacagtggcaatgttttcatcttcgattaggttaatcgtatctgggttccaccggactcaacccctaaaatcgccggtaaattctccgagcgtcttcatctccgtacctaaattcttcaactctgagtcaaaatcgacgggaactggttcaagatccgtagcaatgagcagcgtcgagaaaaccgggtcggattctggagcaatagagaatcgagcgagcaggatgagagagaagcttcaaaaagagctcgaaccagtggagttagtgatcgaagatgtttcgtatcagcacgctggtcacgccggaatgaaaggtagaaccgacgatgagacgcatttcaatgtgaagatcgtttctaaaggattcgagggaatgaatttggtgaagagacacaggttggtctatcatttgctccgggaagagttggatactggattgcacgctctttctatcgtctccaagacgccgtctgagtctccttctaaagactagtgtactggtactgtttaatgtatcttctgtttctgttatcagagtttctcatcaaactctgttcgattcaaagattgaatttttaccatcaaagtgctctgttttggaatttattgcggagccaaagtcttcatttttacatacgcttgaggttgtgtgttggtgtttctggaattgtgtgttggaacaaagacacttgcttttagtcc

SEQ ID NO: 36884 - protein, 160 aa, Arabidopsis thaliana
  peptide (1)..(160): Ceres Seq. ID no. 13592932
  misc_feature (75)..(156): Pfam Name: BolA-like protein Pfam Description: BolA-like protein
  misc_feature (1)..(155): Homolog of NCBI NO: 28393578 NR Description: unknown protein [Arabidopsis thaliana]
  misc_feature (1)..(155): Homolog of NCBI NO: 15236742 NR Description: expressed protein [Arabidopsis thaliana]
  misc_feature (1)..(102): Homolog of NCBI NO: 8778331 NR Description: F14J16.3 [Arabidopsis thaliana]
  misc_feature (52)..(160): Homolog of NCBI NO: 18405543 NR Description: expressed protein [Arabidopsis thaliana]
  misc_feature (1)..(129): Homolog of NCBI NO: 8778492 NR Description: F20N2.18 [Arabidopsis thaliana]
MFSSSIRLIVSGFHRTQPLKSPVNSPSVFISVPKFFNSESKSTGTGSRSVAMSSVEKTGSDSGAIENRASRMREKLQKELEPVELVIEDVSYQHAGHAGMKGRTDDETHFNVKIVSKGFEGMNLVKRHRLVYHLLREELDTGLHALSIVSKTPSESPSKD

SEQ ID NO: 36885 - protein, 109 aa, Arabidopsis thaliana
  peptide (1)..(109): Ceres Seq. ID no. 13592933
  misc_feature (24)..(105): Pfam Name: BolA-like protein Pfam Description: BolA-like protein
  misc_feature (1)..(104): Homolog of NCBI NO: 28393578 NR Description: unknown protein [Arabidopsis thaliana]
  misc_feature (1)..(104): Homolog of NCBI NO: 15236742 NR Description: expressed protein [Arabidopsis thaliana]
  misc_feature (1)..(51): Homolog of NCBI NO: 8778331 NR Description: F14J16.3 [Arabidopsis thaliana]
  misc_feature (1)..(109): Homolog of NCBI NO: 18405543 NR Description: expressed protein [Arabidopsis thaliana]
  misc_feature (1)..(78): Homolog of NCBI NO: 8778492 NR Description: F20N2.18 [Arabidopsis thaliana]
MSSVEKTGSDSGAIENRASRMREKLQKELEPVELVIEDVSYQHAGHAGMKGRTDDETHFNVKIVSKGFEGMNLVKRHRLVYHLLREELDTGLHALSIVSKTPSESPSKD

SEQ ID NO: 36886 - protein, 89 aa, Arabidopsis thaliana
  peptide (1)..(89): Ceres Seq. ID no. 13592934
  misc_feature (4)..(85): Pfam Name: BolA-like protein Pfam Description: BolA-like protein
  misc_feature (1)..(84): Homolog of NCBI NO: 28393578 NR Description: unknown protein [Arabidopsis thaliana]
  misc_feature (1)..(84): Homolog of NCBI NO: 15236742 NR Description: expressed protein [Arabidopsis thaliana]
  misc_feature (1)..(31): Homolog of NCBI NO: 8778331 NR Description: F14J16.3 [Arabidopsis thaliana]
  misc_feature (1)..(89): Homolog of NCBI NO: 18405543 NR Description: expressed protein [Arabidopsis thaliana]
  misc_feature (1)..(58): Homolog of NCBI NO: 8778492 NR Description: F20N2.18 [Arabidopsis thaliana]
MREKLQKELEPVELVIEDVSYQHAGHAGMKGRTDDETHFNVKIVSKGFEGMNLVKRHRLVYHLLREELDTGLHALSIVSKTPSESPSKD

SEQ ID NO: 36887 - DNA, 1601 bp, Arabidopsis thaliana
  misc_feature (1)..(1601): Ceres Seq. ID no. 13592957
  misc_feature: MA Experiment ID: 108434 Result: Up-regulated in Transcription
  misc_feature: MA Experiment 108434 PARAMETER Experiment Name: At_Root_Tips_cDNA_P Parameter: Tissue Value: Root Tips
  misc_feature: MA Experiment ID: 108435 Result: Up-regulated in Transcription
  misc_feature: MA Experiment 108435 PARAMETER Experiment Name: At_stm_Mutants_cDNA_P Parameter: Plant Line Value: wt Landsburg vs stm
  misc_feature: MA Experiment 108435 PARAMETER Experiment Name: At_stm_Mutants_cDNA_P Parameter: Tissue Value: Shoot Apical Meristem Region
  misc_feature: MA Experiment ID: 108461 Result: Up-regulated in Transcription
  misc_feature: MA Experiment 108461 PARAMETER Experiment Name: At_Germinating_Seeds_cDNA_P Parameter: Age (day) Value: 1 vs. 0
  misc_feature: MA Experiment 108461 PARAMETER Experiment Name: At_Germinating_Seeds_cDNA_P Parameter: Tissue Value: Germinating Seeds
  misc_feature: MA Experiment ID: 108462 Result: Up-regulated in Transcription
  misc_feature: MA Experiment 108462 PARAMETER Experiment Name: At_Germinating_Seeds_cDNA_P Parameter: Age (day) Value: 2 vs. 0
  misc_feature: MA Experiment 108462 PARAMETER Experiment Name: At_Germinating_Seeds_cDNA_P Parameter: Tissue Value: Germinating Seeds
  misc_feature: MA Experiment ID: 108561 Result: Down-regulated in Transcription
  misc_feature: MA Experiment 108561 PARAMETER Experiment Name: At_100uM_ABA_cDNA_P Parameter: Timepoint (hr) Value: 6
  misc_feature: MA Experiment 108561 PARAMETER Experiment Name: At_100uM_ABA_cDNA_P Parameter: Tissue Value: Aerial
  misc_feature: MA Experiment 108561 PARAMETER Experiment Name: At_100uM_ABA_cDNA_P Parameter: Treatment Value: 100uM ABA vs. No Treatment
  misc_feature: MA Experiment ID: 20000069 Result: Down-regulated in Transcription
  misc_feature: MA Experiment 20000069 PARAMETER Experiment Name: At_100uM_ABA_Mutants_cDNA_P Parameter: Plant Line Value: CS23
  misc_feature: MA Experiment 20000069 PARAMETER Experiment Name: At_100uM_ABA_Mutants_cDNA_P Parameter: Timepoint (hr) Value: 6
  misc_feature: MA Experiment 20000069 PARAMETER Experiment Name: At_100uM_ABA_Mutants_cDNA_P Parameter: Tissue Value: Aerial
  misc_feature: MA Experiment 20000069 PARAMETER Experiment Name: At_100uM_ABA_Mutants_cDNA_P Parameter: Treatment Value: 100uM ABA vs. No Treatment
  misc_feature: MA Experiment ID: 20000070 Result: Down-regulated in Transcription
  misc_feature: MA Experiment 20000070 PARAMETER Experiment Name: At_100uM_ABA_Mutants_cDNA_P Parameter: Plant Line Value: CS24
  misc_feature: MA Experiment 20000070 PARAMETER Experiment Name: At_100uM_ABA_Mutants_cDNA_P Parameter: Timepoint (hr) Value: 6
  misc_feature: MA Experiment 20000070 PARAMETER Experiment Name: At_100uM_ABA_Mutants_cDNA_P Parameter: Tissue Value: Aerial
  misc_feature: MA Experiment 20000070 PARAMETER Experiment Name: At_100uM_ABA_Mutants_cDNA_P Parameter: Treatment Value: 100uM ABA vs. No Treatment
  misc_feature: MA Experiment ID: 20000071 Result: Down-regulated in Transcription
  misc_feature: MA Experiment 20000071 PARAMETER Experiment Name: At_100uM_ABA_Mutants_cDNA_P Parameter: Plant Line Value: CS8104
  misc_feature: MA Experiment 20000071 PARAMETER Experiment Name: At_100uM_ABA_Mutants_cDNA_P Parameter: Timepoint (hr) Value: 6
  misc_feature: MA Experiment 20000071 PARAMETER Experiment Name: At_100uM_ABA_Mutants_cDNA_P Parameter: Tissue Value: Aerial
  misc_feature: MA Experiment 20000071 PARAMETER Experiment Name: At_100uM_ABA_Mutants_cDNA_P Parameter: Treatment Value: 100uM ABA vs. No Treatment
  misc_feature: MA Experiment ID: 20000072 Result: Down-regulated in Transcription
  misc_feature: MA Experiment 20000072 PARAMETER Experiment Name: At_100uM_ABA_Mutants_cDNA_P Parameter: Plant Line Value: CS8105
  misc_feature: MA Experiment 20000072 PARAMETER Experiment Name: At_100uM_ABA_Mutants_cDNA_P Parameter: Timepoint (hr) Value: 6
  misc_feature: MA Experiment 20000072 PARAMETER Experiment Name: At_100uM_ABA_Mutants_cDNA_P Parameter: Tissue Value: Aerial
  misc_feature: MA Experiment 20000072 PARAMETER Experiment Name: At_100uM_ABA_Mutants_cDNA_P Parameter: Treatment Value: 100uM ABA vs. No Treatment
  misc_feature: MA Experiment ID: 20000089 Result: Down-regulated in Transcription
  misc_feature: MA Experiment ID: 20000112 Result: Down-regulated in Transcription
  misc_feature: MA Experiment 20000112 PARAMETER Experiment Name: At_42deg_Heat_cDNA_P Parameter: Temperature (deg C) Value: 42 vs. 22
  misc_feature: MA Experiment 20000112 PARAMETER Experiment Name: At_42deg_Heat_cDNA_P Parameter: Timepoint (hr) Value: 2
  misc_feature: MA Experiment 20000112 PARAMETER Experiment Name: At_42deg_Heat_cDNA_P Parameter: Tissue Value: Aerial
  misc_feature: MA Experiment ID: 20000113 Result: Down-regulated in Transcription
  misc_feature: MA Experiment 20000113 PARAMETER Experiment Name: At_42deg_Heat_cDNA_P Parameter: Temperature (deg C) Value: 42 vs. 22
  misc_feature: MA Experiment 20000113 PARAMETER Experiment Name: At_42deg_Heat_cDNA_P Parameter: Timepoint (hr) Value: 8
  misc_feature: MA Experiment 20000113 PARAMETER Experiment Name: At_42deg_Heat_cDNA_P Parameter: Tissue Value: Aerial
  misc_feature: MA Experiment ID: 20000117 Result: Down-regulated in Transcription
  misc_feature: MA Experiment 20000117 PARAMETER Experiment Name: At_100uM_ABA_Mutants_cDNA_P Parameter: Plant Line Value: Columbia
  misc_feature: MA Experiment 20000117 PARAMETER Experiment Name: At_100uM_ABA_Mutants_cDNA_P Parameter: Timepoint (hr) Value: 6
  misc_feature: MA Experiment 20000117 PARAMETER Experiment Name: At_100uM_ABA_Mutants_cDNA_P Parameter: Tissue Value: Aerial
  misc_feature: MA Experiment 20000117 PARAMETER Experiment Name: At_100uM_ABA_Mutants_cDNA_P Parameter: Treatment Value: 100uM ABA vs. No Treatment
  misc_feature: MA Experiment ID: 20000180 Result: Up-regulated in Transcription
  misc_feature: MA Experiment 20000180 PARAMETER Experiment Name: At_Germinating_Seeds_P Parameter: Age (hr) Value: 24 vs. 0
  misc_feature: MA Experiment 20000180 PARAMETER Experiment Name: At_Germinating_Seeds_P Parameter: Tissue Value: Germinating Seeds
  misc_feature: MA Experiment ID: 20000184 Result: Up-regulated in Transcription
  misc_feature: MA Experiment 20000184 PARAMETER Experiment Name: At_Shoots__P Parameter: Age (day) Value: 7
  misc_feature: MA Experiment 20000184 PARAMETER Experiment Name: At_Shoots__P Parameter: Tissue Value: Shoots vs. Whole Plant
  misc_feature: MA Experiment ID: 20000235 Result: Up-regulated in Transcription
  misc_feature: MA Experiment 20000235 PARAMETER Experiment Name: At_Siliques_P Parameter: Age (day) Value: 21
  misc_feature: MA Experiment 20000235 PARAMETER Experiment Name: At_Siliques_P Parameter: Organism Value: A. thaliana
  misc_feature: MA Experiment 20000235 PARAMETER Experiment Name: At_Siliques_P Parameter: Plant Line Value: WS
  misc_feature: MA Experiment 20000235 PARAMETER Experiment Name: At_Siliques_P Parameter: Tissue Value: 5-10mm Siliques vs. Whole Plant
  misc_feature: MA Experiment ID: 20000437 Result: Down-regulated in Transcription
  misc_feature: MA Experiment 20000437 PARAMETER Experiment Name: At_Drought_P Parameter: Age (day) Value: 8
  misc_feature: MA Experiment 20000437 PARAMETER Experiment Name: At_Drought_P Parameter: Organism Value: A. thaliana
  misc_feature: MA Experiment 20000437 PARAMETER Experiment Name: At_Drought_P Parameter: Plant Line Value: WS
  misc_feature: MA Experiment 20000437 PARAMETER Experiment Name: At_Drought_P Parameter: Timepoint (hr) Value: 24
  misc_feature: MA Experiment 20000437 PARAMETER Experiment Name: At_Drought_P Parameter: Tissue Value: Whole Plant
  misc_feature: MA Experiment 20000437 PARAMETER Experiment Name: At_Drought_P Parameter: Treatment Value: Drought vs. No Drought
  misc_feature: MA Experiment ID: 20000495 Result: Up-regulated in Transcription
  misc_feature: MA Experiment 20000495 PARAMETER Experiment Name: At_Guard_Cells_P Parameter: Harvest Date Value: 8/2/2002
  misc_feature: MA Experiment 20000495 PARAMETER Experiment Name: At_Guard_Cells_P Parameter: Organism Value: A. thaliana
  misc_feature: MA Experiment 20000495 PARAMETER Experiment Name: At_Guard_Cells_P Parameter: Tissue Value: Guard Cells vs. Leaves
  misc_feature: MA Experiment ID: 20001248 Result: Down-regulated in Transcription
  misc_feature: MA Experiment 20001248 PARAMETER Experiment Name: At_Far-red-induction_P Parameter: Age (day) Value: 7
  misc_feature: MA Experiment 20001248 PARAMETER Experiment Name: At_Far-red-induction_P Parameter: Light Value: Far-red vs. White
  misc_feature: MA Experiment 20001248 PARAMETER Experiment Name: At_Far-red-induction_P Parameter: Organism Value: A. thaliana
  misc_feature: MA Experiment 20001248 PARAMETER Experiment Name: At_Far-red-induction_P Parameter: Plant Line Value: Columbia
  misc_feature: MA Experiment 20001248 PARAMETER Experiment Name: At_Far-red-induction_P Parameter: Timepoint (hr) Value: 4
  misc_feature: MA Experiment 20001248 PARAMETER Experiment Name: At_Far-red-induction_P Parameter: Tissue Value: Whole Plant
actttaagctcttcttcactcacactctctcaaaaatcaccaaacgaaactcttcactctctccaacaatggccaagaagatgagttctctcatcatcatcttcaacattctccttctcctcacaactcaaacccacgcgcacaacgtcacgcgcctcctagcaaaccacccatcattctcttccttcagccatttcctaacacaaacacacctcgccgacgaaatcaaccggagaagaaccataaccgtttgcgcagtagataacgccgccatgtcagcattaacctctaaaggctatacactctcaactctcaaaaacattctctccctccacgtccttttagattacttcggaaccaaaaaactccaccagatccgtgacggctctgctctcgccgctactctgtttcaagccaccggagctgctcctggaacctcaggattcgttaacataacggatctgagaggtggtaaagttgggtttggtcctgacggtggagatctgtcttctttctttgttaaatctattgaagaagttccgtataacatctccattattcagatcagtagagttttaccgtcggagactgcggcggctccgactcctgctccggcggagatgaatcttaccggaataatgtcggctcatggatgcaaagtgtttgctgagactcttctcactaaccctggagcttcaaaaacctatcaggagagtttagaaggaggcatgacagtgttctgtccaggagatgatgcaatgaaaggtttcttgcccaaatacaagaacttgacagctccaaagaaagaagcatttctcgatttcctcgctgtcccgacatattactcaatggcgatgctcaaatccaacaatggtccgatgaacacacttgcgacagatggagctaacaagtttgagcttactgtacagaacgatggagagaaggttaccctcaagacaaggatcaacactgtcaagatcgttgatactcttattgatgagcagcctttagctatatatgcgactgataaggttttgttgcctaaagagttgtttaaggcttcggctgttgaagctccggctcctgctccggcaccagaggatggtgatgttgcggattctccaaaagcggctaaagggaaagcgaaaggaaagaagaagaaggctgcaccgtcgccagataatgatccttttggtgactcggattcgcctgccgaagggcctgacggagaggccgatgatgcgacggcagatgatgcttgtgcggttaggatcatcggaggagctaaggctggtttggtggtgagcttgctctgcttgtttgcttcttcttggcttctatagtttcacttcttgtttcttcgattcttccatgttttttttttttttgtgaatcttttatttatggtttttgggggagagtaaatgaggattatttatttccctctattgttgagtttttttatttatttaaaagttggttgtcgaattaaatagtcggtagtttatatatttgtgtgttcttgtttcacgtgtttgtttagttgatgatgtaaacaagtcctgattttggtgatcttgtcatatttttcttgtttttgt

SEQ ID NO: 36888 - protein, 446 aa, Arabidopsis thaliana
  peptide (1)..(446): Ceres Seq. ID no. 13592958
  misc_feature (205)..(347): Pfam Name: Fasciclin domain Pfam Description: Fasciclin domain
  misc_feature (23)..(414): Homolog of NCBI NO: 15232973 NR Description: fasciclin-like arabinogalactan-protein (FLA10)
  misc_feature (23)..(414): Homolog of NCBI NO: 14190409 NR Description: AT3g60900/T4C21_310 [Arabidopsis thaliana]
  misc_feature (24)..(422): Homolog of NCBI NO: 21595125 NR Description: endosperm-specific protein-like protein
  misc_feature (24)..(422): Homolog of NCBI NO: 18406799 NR Description: fasciclin-like arabinogalactan-protein (FLA8)
  misc_feature (31)..(421): Homolog of NCBI NO: 38424037 NR Description: putative fasciclin-like arabinogalactan-protein
  misc_feature (254)..(446): Homolog of NCBI NO: 21618321 NR Description: unknown [Arabidopsis thaliana]
  misc_feature (28)..(404): Homolog of NCBI NO: 13377778 NR Description: fasciclin-like arabinogalactan-protein 2
  misc_feature (23)..(404): Homolog of NCBI NO: 15235459 NR Description: fasciclin-like arabinogalactan-protein (FLA2)
  misc_feature (28)..(404): Homolog of NCBI NO: 21593810 NR Description: putative pollen surface protein [Arabidopsis
  misc_feature (23)..(446): Homolog of NCBI NO: 15240570 NR Description: fasciclin-like arabinogalactan-protein (FLA1)
FKLFFTHTLSKITKRNSSLSPTMAKKMSSLIIIFNILLLLTTQTHAHNVTRLLANHPSFSSFSHFLTQTHLADEINRRRTITVCAVDNAAMSALTSKGYTLSTLKNILSLHVLLDYFGTKKLHQIRDGSALAATLFQATGAAPGTSGFVNITDLRGGKVGFGPDGGDLSSFFVKSIEEVPYNISIIQISRVLPSETAAAPTPAPAEMNLTGIMSAHGCKVFAETLLTNPGASKTYQESLEGGMTVFCPGDDAMKGFLPKYKNLTAPKKEAFLDFLAVPTYYSMAMLKSNNGPMNTLATDGANKFELTVQNDGEKVTLKTRINTVKIVDTLIDEQPLAIYATDKVLLPKELFKASAVEAPAPAPAPEDGDVADSPKAAKGKAKGKKKKAAPSPDNDPFGDSDSPAEGPDGEADDATADDACAVRIIGGAKAGLVVSLLCLFASSWLL

SEQ ID NO: 36889 - protein, 424 aa, Arabidopsis thaliana
  peptide (1)..(424): Ceres Seq. ID no. 13592959
  misc_feature (183)..(325): Pfam Name: Fasciclin domain Pfam Description: Fasciclin domain
  misc_feature (1)..(392): Homolog of NCBI NO: 15232973 NR Description: fasciclin-like arabinogalactan-protein (FLA10)
  misc_feature (1)..(392): Homolog of NCBI NO: 14190409 NR Description: AT3g60900/T4C21_310 [Arabidopsis thaliana]
  misc_feature (2)..(400): Homolog of NCBI NO: 21595125 NR Description: endosperm-specific protein-like protein
  misc_feature (2)..(400): Homolog of NCBI NO: 18406799 NR Description: fasciclin-like arabinogalactan-protein (FLA8)
  misc_feature (9)..(399): Homolog of NCBI NO: 38424037 NR Description: putative fasciclin-like arabinogalactan-protein
  misc_feature (232)..(424): Homolog of NCBI NO: 21618321 NR Description: unknown [Arabidopsis thaliana]
  misc_feature (6)..(382): Homolog of NCBI NO: 13377778 NR Description: fasciclin-like arabinogalactan-protein 2
  misc_feature (1)..(382): Homolog of NCBI NO: 15235459 NR Description: fasciclin-like arabinogalactan-protein (FLA2)
  misc_feature (6)..(382): Homolog of NCBI NO: 21593810 NR Description: putative pollen surface protein [Arabidopsis
  misc_feature (1)..(424): Homolog of NCBI NO: 15240570 NR Description: fasciclin-like arabinogalactan-protein (FLA1)
MAKKMSSLIIIFNILLLLTTQTHAHNVTRLLANHPSFSSFSHFLTQTHLADEINRRRTITVCAVDNAAMSALTSKGYTLSTLKNILSLHVLLDYFGTKKLHQIRDGSALAATLFQATGAAPGTSGFVNITDLRGGKVGFGPDGGDLSSFFVKSIEEVPYNISIIQISRVLPSETAAAPTPAPAEMNLTGIMSAHGCKVFAETLLTNPGASKTYQESLEGGMTVFCPGDDAMKGFLPKYKNLTAPKKEAFLDFLAVPTYYSMAMLKSNNGPMNTLATDGANKFELTVQNDGEKVTLKTRINTVKIVDTLIDEQPLAIYATDKVLLPKELFKASAVEAPAPAPAPEDGDVADSPKAAKGKAKGKKKKAAPSPDNDPFGDSDSPAEGPDGEADDATADDACAVRIIGGAKAGLVVSLLCLFASSWLL

SEQ ID NO: 36890 - protein, 420 aa, Arabidopsis thaliana
  peptide (1)..(420): Ceres Seq. ID no. 13592960
  misc_feature (179)..(321): Pfam Name: Fasciclin domain Pfam Description: Fasciclin domain
  misc_feature (1)..(388): Homolog of NCBI NO: 15232973 NR Description: fasciclin-like arabinogalactan-protein (FLA10)
  misc_feature (1)..(388): Homolog of NCBI NO: 14190409 NR Description: AT3g60900/T4C21_310 [Arabidopsis thaliana]
  misc_feature (1)..(396): Homolog of NCBI NO: 21595125 NR Description: endosperm-specific protein-like protein
  misc_feature (1)..(396): Homolog of NCBI NO: 18406799 NR Description: fasciclin-like arabinogalactan-protein (FLA8)
  misc_feature (5)..(395): Homolog of NCBI NO: 38424037 NR Description: putative fasciclin-like arabinogalactan-protein
  misc_feature (228)..(420): Homolog of NCBI NO: 21618321 NR Description: unknown [Arabidopsis thaliana]
  misc_feature (2)..(378): Homolog of NCBI NO: 13377778 NR Description: fasciclin-like arabinogalactan-protein 2
  misc_feature (1)..(378): Homolog of NCBI NO: 15235459 NR Description: fasciclin-like arabinogalactan-protein (FLA2)
  misc_feature (2)..(378): Homolog of NCBI NO: 21593810 NR Description: putative pollen surface protein [Arabidopsis
  misc_feature (1)..(420): Homolog of NCBI NO: 15240570 NR Description: fasciclin-like arabinogalactan-protein (FLA1)
MSSLIIIFNILLLLTTQTHAHNVTRLLANHPSFSSFSHFLTQTHLADEINRRRTITVCAVDNAAMSALTSKGYTLSTLKNILSLHVLLDYFGTKKLHQIRDGSALAATLFQATGAAPGTSGFVNITDLRGGKVGFGPDGGDLSSFFVKSIEEVPYNISIIQISRVLPSETAAAPTPAPAEMNLTGIMSAHGCKVFAETLLTNPGASKTYQESLEGGMTVFCPGDDAMKGFLPKYKNLTAPKKEAFLDFLAVPTYYSMAMLKSNNGPMNTLATDGANKFELTVQNDGEKVTLKTRINTVKIVDTLIDEQPLAIYATDKVLLPKELFKASAVEAPAPAPAPEDGDVADSPKAAKGKAKGKKKKAAPSPDNDPFGDSDSPAEGPDGEADDATADDACAVRIIGGAKAGLVVSLLCLFASSWLL

SEQ ID NO: 36891 - DNA, 1668 bp, Arabidopsis thaliana
  misc_feature (1)..(1668): Ceres Seq. ID no. 12558667
  misc_feature: MA Experiment ID: 108461 Result: Up-regulated in Transcription
  misc_feature: MA Experiment 108461 PARAMETER Experiment Name: At_Germinating_Seeds_cDNA_P Parameter: Age (day) Value: 1 vs. 0
  misc_feature: MA Experiment 108461 PARAMETER Experiment Name: At_Germinating_Seeds_cDNA_P Parameter: Tissue Value: Germinating Seeds
  misc_feature: MA Experiment ID: 108463 Result: Up-regulated in Transcription
  misc_feature: MA Experiment 108463 PARAMETER Experiment Name: At_Germinating_Seeds_cDNA_P Parameter: Age (day) Value: 3 vs. 0
  misc_feature: MA Experiment 108463 PARAMETER Experiment Name: At_Germinating_Seeds_cDNA_P Parameter: Tissue Value: Germinating Seeds
  misc_feature: MA Experiment ID: 108488 Result: Down-regulated in Transcription
  misc_feature: MA Experiment ID: 108573 Result: Up-regulated in Transcription
  misc_feature: MA Experiment 108573 PARAMETER Experiment Name: At_Drought_cDNA_P Parameter: Timepoint (hr) Value: 6
  misc_feature: MA Experiment 108573 PARAMETER Experiment Name: At_Drought_cDNA_P Parameter: Tissue Value: Aerial
  misc_feature: MA Experiment 108573 PARAMETER Experiment Name: At_Drought_cDNA_P Parameter: Treatment Value: Drought vs. No Drought
  misc_feature: MA Experiment ID: 108608 Result: Down-regulated in Transcription
  misc_feature: MA Experiment 108608 PARAMETER Experiment Name: At_100uM_ABA_cDNA_P Parameter: Timepoint (hr) Value: 1
  misc_feature: MA Experiment 108608 PARAMETER Experiment Name: At_100uM_ABA_cDNA_P Parameter: Tissue Value: Aerial
  misc_feature: MA Experiment 108608 PARAMETER Experiment Name: At_100uM_ABA_cDNA_P Parameter: Treatment Value: 100uM ABA vs. No Treatment
  misc_feature: MA Experiment ID: 20000070 Result: Up-regulated in Transcription
  misc_feature: MA Experiment 20000070 PARAMETER Experiment Name: At_100uM_ABA_Mutants_cDNA_P Parameter: Plant Line Value: CS24
  misc_feature: MA Experiment 20000070 PARAMETER Experiment Name: At_100uM_ABA_Mutants_cDNA_P Parameter: Timepoint (hr) Value: 6
  misc_feature: MA Experiment 20000070 PARAMETER Experiment Name: At_100uM_ABA_Mutants_cDNA_P Parameter: Tissue Value: Aerial
  misc_feature: MA Experiment 20000070 PARAMETER Experiment Name: At_100uM_ABA_Mutants_cDNA_P Parameter: Treatment Value: 100uM ABA vs. No Treatment
  misc_feature: MA Experiment ID: 20000071 Result: Up-regulated in Transcription
  misc_feature: MA Experiment 20000071 PARAMETER Experiment Name: At_100uM_ABA_Mutants_cDNA_P Parameter: Plant Line Value: CS8104
  misc_feature: MA Experiment 20000071 PARAMETER Experiment Name: At_100uM_ABA_Mutants_cDNA_P Parameter: Timepoint (hr) Value: 6
  misc_feature: MA Experiment 20000071 PARAMETER Experiment Name: At_100uM_ABA_Mutants_cDNA_P Parameter: Tissue Value: Aerial
  misc_feature: MA Experiment 20000071 PARAMETER Experiment Name: At_100uM_ABA_Mutants_cDNA_P Parameter: Treatment Value: 100uM ABA vs. No Treatment
  misc_feature: MA Experiment ID: 20000072 Result: Up-regulated in Transcription
  misc_feature: MA Experiment 20000072 PARAMETER Experiment Name: At_100uM_ABA_Mutants_cDNA_P Parameter: Plant Line Value: CS8105
  misc_feature: MA Experiment 20000072 PARAMETER Experiment Name: At_100uM_ABA_Mutants_cDNA_P Parameter: Timepoint (hr) Value: 6
  misc_feature: MA Experiment 20000072 PARAMETER Experiment Name: At_100uM_ABA_Mutants_cDNA_P Parameter: Tissue Value: Aerial
  misc_feature: MA Experiment 20000072 PARAMETER Experiment Name: At_100uM_ABA_Mutants_cDNA_P Parameter: Treatment Value: 100uM ABA vs. No Treatment
  misc_feature: MA Experiment ID: 20000086 Result: Up-regulated in Transcription
  misc_feature: MA Experiment 20000086 PARAMETER Experiment Name: At_100uM_ABA_Mutants_cDNA_P Parameter: Plant Line Value: CS22
  misc_feature: MA Experiment 20000086 PARAMETER Experiment Name: At_100uM_ABA_Mutants_cDNA_P Parameter: Timepoint (hr) Value: 6
  misc_feature: MA Experiment 20000086 PARAMETER Experiment Name: At_100uM_ABA_Mutants_cDNA_P Parameter: Tissue Value: Aerial
  misc_feature: MA Experiment 20000086 PARAMETER Experiment Name: At_100uM_ABA_Mutants_cDNA_P Parameter: Treatment Value: 100uM ABA vs. No Treatment
  misc_feature: MA Experiment ID: 20000088 Result: Up-regulated in Transcription
  misc_feature: MA Experiment 20000088 PARAMETER Experiment Name: At_100uM_ABA_Mutants_cDNA_P Parameter: Plant Line Value: Landsberg
  misc_feature: MA Experiment 20000088 PARAMETER Experiment Name: At_100uM_ABA_Mutants_cDNA_P Parameter: Timepoint (hr) Value: 6
  misc_feature: MA Experiment 20000088 PARAMETER Experiment Name: At_100uM_ABA_Mutants_cDNA_P Parameter: Tissue Value: Aerial
  misc_feature: MA Experiment 20000088 PARAMETER Experiment Name: At_100uM_ABA_Mutants_cDNA_P Parameter: Treatment Value: 100uM ABA vs. No Treatment
  misc_feature: MA Experiment ID: 20000173 Result: Down-regulated in Transcription
  misc_feature: MA Experiment 20000173 PARAMETER Experiment Name: At_42deg_Heat_P Parameter: Age (day) Value: 14
  misc_feature: MA Experiment 20000173 PARAMETER Experiment Name: At_42deg_Heat_P Parameter: Organism Value: A. thaliana
  misc_feature: MA Experiment 20000173 PARAMETER Experiment Name: At_42deg_Heat_P Parameter: Plant Line Value: WS
  misc_feature: MA Experiment 20000173 PARAMETER Experiment Name: At_42deg_Heat_P Parameter: Temperature (deg C) Value: 42 vs. 22
  misc_feature: MA Experiment 20000173 PARAMETER Experiment Name: At_42deg_Heat_P Parameter: Timepoint (hr) Value: 6
  misc_feature: MA Experiment 20000173 PARAMETER Experiment Name: At_42deg_Heat_P Parameter: Tissue Value: Aerial
  misc_feature: MA Experiment ID: 20000182 Result: Down-regulated in Transcription
  misc_feature: MA Experiment 20000182 PARAMETER Experiment Name: At_2mM_SA_P Parameter: Age (day) Value: 14
  misc_feature: MA Experiment 20000182 PARAMETER Experiment Name: At_2mM_SA_P Parameter: Organism Value: A. thaliana
  misc_feature: MA Experiment 20000182 PARAMETER Experiment Name: At_2mM_SA_P Parameter: Plant Line Value: WS
  misc_feature: MA Experiment 20000182 PARAMETER Experiment Name: At_2mM_SA_P Parameter: Timepoint (hr) Value: 6
  misc_feature: MA Experiment 20000182 PARAMETER Experiment Name: At_2mM_SA_P Parameter: Tissue Value: Aerial
  misc_feature: MA Experiment 20000182 PARAMETER Experiment Name: At_2mM_SA_P Parameter: Treatment Value: 2mM SA vs. No Treatment
  misc_feature: MA Experiment ID: 20000227 Result: Down-regulated in Transcription
  misc_feature: MA Experiment 20000227 PARAMETER Experiment Name: At_Root-Tips-vs-Tops_P Parameter: Tissue Value: Root Tips vs. Root Tops
  misc_feature: MA Experiment ID: 20000234 Result: Down-regulated in Transcription
  misc_feature: MA Experiment 20000234 PARAMETER Experiment Name: At_Siliques_P Parameter: Age (day) Value: 21
  misc_feature: MA Experiment 20000234 PARAMETER Experiment Name: At_Siliques_P Parameter: Organism Value: A. thaliana
  misc_feature: MA Experiment 20000234 PARAMETER Experiment Name: At_Siliques_P Parameter: Plant Line Value: WS
  misc_feature: MA Experiment 20000234 PARAMETER Experiment Name: At_Siliques_P Parameter: Tissue Value: Less Than 5mm Siliques vs. Whole Plant
  misc_feature: MA Experiment ID: 20000235 Result: Down-regulated in Transcription
  misc_feature: MA Experiment 20000235 PARAMETER Experiment Name: At_Siliques_P Parameter: Age (day) Value: 21
  misc_feature: MA Experiment 20000235 PARAMETER Experiment Name: At_Siliques_P Parameter: Organism Value: A. thaliana
  misc_feature: MA Experiment 20000235 PARAMETER Experiment Name: At_Siliques_P Parameter: Plant Line Value: WS
  misc_feature: MA Experiment 20000235 PARAMETER Experiment Name: At_Siliques_P Parameter: Tissue Value: 5-10mm Siliques vs. Whole Plant
  misc_feature: MA Experiment ID: 20000264 Result: Down-regulated in Transcription
  misc_feature: MA Experiment 20000264 PARAMETER Experiment Name: At_Open_Flower_P Parameter: Age (day) Value: 21
  misc_feature: MA Experiment 20000264 PARAMETER Experiment Name: At_Open_Flower_P Parameter: Plant Line Value: WS
  misc_feature: MA Experiment 20000264 PARAMETER Experiment Name: At_Open_Flower_P Parameter: Tissue Value: Open Flower vs. Whole Plant
  misc_feature: MA Experiment ID: 20000286 Result: Down-regulated in Transcription
  misc_feature: MA Experiment 20000286 PARAMETER Experiment Name: At_Open_Flower_P Parameter: Age (day) Value: 21
  misc_feature: MA Experiment 20000286 PARAMETER Experiment Name: At_Open_Flower_P Parameter: Plant Line Value: WS
  misc_feature: MA Experiment 20000286 PARAMETER Experiment Name: At_Open_Flower_P Parameter: Tissue Value: Half Open vs. Whole Plant
  misc_feature: MA Experiment ID: 20001557 Result: Down-regulated in Transcription
  misc_feature: MA Experiment 20001557 PARAMETER Experiment Name: At_Drought_Soil_Dry_P Parameter: Age (day) Value: 27
  misc_feature: MA Experiment 20001557 PARAMETER Experiment Name: At_Drought_Soil_Dry_P Parameter: Organism Value: A. thaliana
  misc_feature: MA Experiment 20001557 PARAMETER Experiment Name: At_Drought_Soil_Dry_P Parameter: Plant Line Value: WS
  misc_feature: MA Experiment 20001557 PARAMETER Experiment Name: At_Drought_Soil_Dry_P Parameter: Post Timepoint (hr) Value: 3
  misc_feature: MA Experiment 20001557 PARAMETER Experiment Name: At_Drought_Soil_Dry_P Parameter: Post-Treatment Value: Re-Water vs. No Drought
  misc_feature: MA Experiment 20001557 PARAMETER Experiment Name: At_Drought_Soil_Dry_P Parameter: Timepoint (day) Value: 13
  misc_feature: MA Experiment 20001557 PARAMETER Experiment Name: At_Drought_Soil_Dry_P Parameter: Treatment Value: Drought vs. No Drought
  misc_feature: MA Experiment ID: 20001558 Result: Down-regulated in Transcription
  misc_feature: MA Experiment 20001558 PARAMETER Experiment Name: At_Drought_Soil_Dry_P Parameter: Age (day) Value: 27
  misc_feature: MA Experiment 20001558 PARAMETER Experiment Name: At_Drought_Soil_Dry_P Parameter: Organism Value: A. thaliana
  misc_feature: MA Experiment 20001558 PARAMETER Experiment Name: At_Drought_Soil_Dry_P Parameter: Plant Line Value: WS
  misc_feature: MA Experiment 20001558 PARAMETER Experiment Name: At_Drought_Soil_Dry_P Parameter: Post Timepoint (hr) Value: 6
  misc_feature: MA Experiment 20001558 PARAMETER Experiment Name: At_Drought_Soil_Dry_P Parameter: Post-Treatment Value: Re-Water vs. No Drought
  misc_feature: MA Experiment 20001558 PARAMETER Experiment Name: At_Drought_Soil_Dry_P Parameter: Timepoint (day) Value: 13
  misc_feature: MA Experiment 20001558 PARAMETER Experiment Name: At_Drought_Soil_Dry_P Parameter: Treatment Value: Drought vs. No Drought
  misc_feature: MA Experiment ID: 20001560 Result: Down-regulated in Transcription
  misc_feature: MA Experiment 20001560 PARAMETER Experiment Name: At_Drought_Soil_Dry_P Parameter: Age (day) Value: 28
  misc_feature: MA Experiment 20001560 PARAMETER Experiment Name: At_Drought_Soil_Dry_P Parameter: Organism Value: A. thaliana
  misc_feature: MA Experiment 20001560 PARAMETER Experiment Name: At_Drought_Soil_Dry_P Parameter: Plant Line Value: WS
  misc_feature: MA Experiment 20001560 PARAMETER Experiment Name: At_Drought_Soil_Dry_P Parameter: Post Timepoint (hr) Value: None
  misc_feature: MA Experiment 20001560 PARAMETER Experiment Name: At_Drought_Soil_Dry_P Parameter: Post-Treatment Value: None
  misc_feature: MA Experiment 20001560 PARAMETER Experiment Name: At_Drought_Soil_Dry_P Parameter: Timepoint (day) Value: 14
  misc_feature: MA Experiment 20001560 PARAMETER Experiment Name: At_Drought_Soil_Dry_P Parameter: Treatment Value: Drought vs. No Drought
atctattttctctctctattttatctatcttgtcctctcctctgtttataatcagcaagatttctttttgtttattagaagatttttggaaaattaatatataaagagaggagaaattaagcgtaagagtggtggcgggggaaaataaaagcatggaagaaggacttcttcggcatgaaaacgacagagatgatcgtcgtatcacagcttgtgttatcctcagcacttttgttgctgtttgtagttccttcagctatggatgtgctaatggttatacttccggcgctgaaactgcaatcatgaaagagttagacctttctatggcacaattttcagcgtttggttcctttttgaacttgggaggtgcggtgggagctttgtttagcggtcaattagcagtcatccttggcagaagacgaacgttgtgggcatgcgatttgttctgcatttttggttggctctccattgcttttgcaaagaatgtcttgtggctggacttgggaagaatttctttaggcatcggagtgggcttgactagctacgtggtccctgtctatattgcggaaatcactcctaaacatgttcgtggcgcattttctgcttcaaccctgcttcttcaaaacagtggaatttctctgatttattttttcggaactgtaattaattggcgggttctggctgttataggtgctcttccatgtttcattccagtgatcggtatatatttcataccggaatcaccaagatggttggctaaaatcggttcagttaaagaagtagaaaactctctgcatcgccttagagggaaagatgctgatgtttcagatgaagccgctgaaattcaggttatgacaaaaatgcttgaagaagattcaaagtccagtttttgtgacatgtttcagaagaagtatagacgaactctagtggttggaattggtttaatgttgatacaacaattatctggagctagcggtatcacatattattcaaatgccatatttagaaaagctggcttttcagagagacttggatcaatgatatttggtgtgttcgtgatcccaaaagctttggttggtctgattcttgtggatagatggggaagacgaccactcctattggcttctgctgttggaatgtctatcggatccttgcttattggggttagcttcacgttacaggaaatgaatctgtttcctgaatttattccagttttcgtcttcataaatattctggtctactttggattttttgcaatcggtataggagggctaccttggatcattatgtctgagatatttccgataaatataaaagtttcagcagggtcaatcgttgcattaacatcgtggaccactgggtggttcgttagttatggtttcaactttatgtttgaatggagcgcacaaggaaccttttacatatttgcgatggtggggggattgtcattgctttttatatggatgctcgtgccggaaaccaaaggacagtcgcttgaagaattgcaagcatcccttacggggacaacctaaatacacatttacatctattggcagtgtctttgcaaacattatttacataataaagtacacaacctgctcttcatagtgattgatgtgtaaaccttttccttgcgaacattgtcgtatatatcctagctatattttttcc

SEQ ID NO: 36892 - protein, 458 aa, Arabidopsis thaliana
  peptide (1)..(458): Ceres Seq. ID no. 12558668
  misc_feature (23)..(403): Pfam Name: Sugar (and other) transporter Pfam Description: Sugar (and other) transporter
  misc_feature (1)..(455): Homolog of NCBI NO: 6686827 NR Description: putative sugar transporter [Arabidopsis thaliana]
  misc_feature (175)..(458): Homolog of NCBI NO: 15081630 NR Description: AT3g05160/T12H1_13 [Arabidopsis thaliana]
  misc_feature (1)..(455): Homolog of NCBI NO: 18390957 NR Description: putative sugar transport protein, ERD6
  misc_feature (1)..(454): Homolog of NCBI NO: 18421106 NR Description: sugar transporter-like protein
  misc_feature (1)..(454): Homolog of NCBI NO: 14585699 NR Description: sugar-porter family protein 1 [Arabidopsis
  misc_feature (1)..(454): Homolog of NCBI NO: 18421108 NR Description: sugar transporter-like protein
  misc_feature (1)..(424): Homolog of NCBI NO: 20260272 NR Description: putative sugar transporter [Arabidopsis thaliana]
  misc_feature (1)..(458): Homolog of NCBI NO: 18397141 NR Description: Expressed protein; protein id: At3g05165.1
  misc_feature (1)..(403): Homolog of NCBI NO: 6729026 NR Description: putative sugar transporter [Arabidopsis thaliana]
  misc_feature (1)..(458): Homolog of NCBI NO: 18397139 NR Description: putative sugar transporter
MEEGLLRHENDRDDRRITACVILSTFVAVCSSFSYGCANGYTSGAETAIMKELDLSMAQFSAFGSFLNLGGAVGALFSGQLAVILGRRRTLWACDLFCIFGWLSIAFAKNVLWLDLGRISLGIGVGLTSYVVPVYIAEITPKHVRGAFSASTLLLQNSGISLIYFFGTVINWRVLAVIGALPCFIPVIGIYFIPESPRWLAKIGSVKEVENSLHRLRGKDADVSDEAAEIQVMTKMLEEDSKSSFCDMFQKKYRRTLVVGIGLMLIQQLSGASGITYYSNAIFRKAGFSERLGSMIFGVFVIPKALVGLILVDRWGRRPLLLASAVGMSIGSLLIGVSFTLQEMNLFPEFIPVFVFINILVYFGFFAIGIGGLPWIIMSEIFPINIKVSAGSIVALTSWTTGWFVSYGFNFMFEWSAQGTFYIFAMVGGLSLLFIWMLVPETKGQSLEELQASLTGTT

SEQ ID NO: 36893 - protein, 409 aa, Arabidopsis thaliana
  peptide (1)..(409): Ceres Seq. ID no. 12558669
  misc_feature (1)..(354): Pfam Name: Sugar (and other) transporter Pfam Description: Sugar (and other) transporter
  misc_feature (1)..(406): Homolog of NCBI NO: 6686827 NR Description: putative sugar transporter [Arabidopsis thaliana]
  misc_feature (126)..(409): Homolog of NCBI NO: 15081630 NR Description: AT3g05160/T12H1_13 [Arabidopsis thaliana]
  misc_feature (1)..(406): Homolog of NCBI NO: 18390957 NR Description: putative sugar transport protein, ERD6
  misc_feature (1)..(405): Homolog of NCBI NO: 18421106 NR Description: sugar transporter-like protein
  misc_feature (1)..(405): Homolog of NCBI NO: 14585699 NR Description: sugar-porter family protein 1 [Arabidopsis
  misc_feature (1)..(405): Homolog of NCBI NO: 18421108 NR Description: sugar transporter-like protein
  misc_feature (1)..(375): Homolog of NCBI NO: 20260272 NR Description: putative sugar transporter [Arabidopsis thaliana]
  misc_feature (1)..(409): Homolog of NCBI NO: 18397141 NR Description: Expressed protein; protein id: At3g05165.1
  misc_feature (1)..(354): Homolog of NCBI NO: 6729026 NR Description: putative sugar transporter [Arabidopsis thaliana]
  misc_feature (1)..(409): Homolog of NCBI NO: 18397139 NR Description: putative sugar transporter
MKELDLSMAQFSAFGSFLNLGGAVGALFSGQLAVILGRRRTLWACDLFCIFGWLSIAFAKNVLWLDLGRISLGIGVGLTSYVVPVYIAEITPKHVRGAFSASTLLLQNSGISLIYFFGTVINWRVLAVIGALPCFIPVIGIYFIPESPRWLAKIGSVKEVENSLHRLRGKDADVSDEAAEIQVMTKMLEEDSKSSFCDMFQKKYRRTLVVGIGLMLIQQLSGASGITYYSNAIFRKAGFSERLGSMIFGVFVIPKALVGLILVDRWGRRPLLLASAVGMSIGSLLIGVSFTLQEMNLFPEFIPVFVFINILVYFGFFAIGIGGLPWIIMSEIFPINIKVSAGSIVALTSWTTGWFVSYGFNFMFEWSAQGTFYIFAMVGGLSLLFIWMLVPETKGQSLEELQASLTGTT

SEQ ID NO: 36894 - protein, 402 aa, Arabidopsis thaliana
  peptide (1)..(402): Ceres Seq. ID no. 12558670
  misc_feature (1)..(347): Pfam Name: Sugar (and other) transporter Pfam Description: Sugar (and other) transporter
  misc_feature (1)..(399): Homolog of NCBI NO: 6686827 NR Description: putative sugar transporter [Arabidopsis thaliana]
  misc_feature (119)..(402): Homolog of NCBI NO: 15081630 NR Description: AT3g05160/T12H1_13 [Arabidopsis thaliana]
  misc_feature (1)..(399): Homolog of NCBI NO: 18390957 NR Description: putative sugar transport protein, ERD6
  misc_feature (1)..(398): Homolog of NCBI NO: 18421106 NR Description: sugar transporter-like protein
  misc_feature (1)..(398): Homolog of NCBI NO: 14585699 NR Description: sugar-porter family protein 1 [Arabidopsis
  misc_feature (1)..(398): Homolog of NCBI NO: 18421108 NR Description: sugar transporter-like protein
  misc_feature (1)..(368): Homolog of NCBI NO: 20260272 NR Description: putative sugar transporter [Arabidopsis thaliana]
  misc_feature (1)..(402): Homolog of NCBI NO: 18397141 NR Description: Expressed protein; protein id: At3g05165.1
  misc_feature (1)..(347): Homolog of NCBI NO: 6729026 NR Description: putative sugar transporter [Arabidopsis thaliana]
  misc_feature (1)..(402): Homolog of NCBI NO: 18397139 NR Description: putative sugar transporter
MAQFSAFGSFLNLGGAVGALFSGQLAVILGRRRTLWACDLFCIFGWLSIAFAKNVLWLDLGRISLGIGVGLTSYVVPVYIAEITPKHVRGAFSASTLLLQNSGISLIYFFGTVINWRVLAVIGALPCFIPVIGIYFIPESPRWLAKIGSVKEVENSLHRLRGKDADVSDEAAEIQVMTKMLEEDSKSSFCDMFQKKYRRTLVVGIGLMLIQQLSGASGITYYSNAIFRKAGFSERLGSMIFGVFVIPKALVGLILVDRWGRRPLLLASAVGMSIGSLLIGVSFTLQEMNLFPEFIPVFVFINILVYFGFFAIGIGGLPWIIMSEIFPINIKVSAGSIVALTSWTTGWFVSYGFNFMFEWSAQGTFYIFAMVGGLSLLFIWMLVPETKGQSLEELQASLTGTT

SEQ ID NO: 36895 - DNA, 1003 bp, Arabidopsis thaliana
  misc_feature (1)..(1003): Ceres Seq. ID no. 13576663
  misc_feature: MA Experiment ID: 20000173 Result: Down-regulated in Transcription
  misc_feature: MA Experiment 20000173 PARAMETER Experiment Name: At_42deg_Heat_P Parameter: Age (day) Value: 14
  misc_feature: MA Experiment 20000173 PARAMETER Experiment Name: At_42deg_Heat_P Parameter: Organism Value: A. thaliana
  misc_feature: MA Experiment 20000173 PARAMETER Experiment Name: At_42deg_Heat_P Parameter: Plant Line Value: WS
  misc_feature: MA Experiment 20000173 PARAMETER Experiment Name: At_42deg_Heat_P Parameter: Temperature (deg C) Value: 42 vs. 22
  misc_feature: MA Experiment 20000173 PARAMETER Experiment Name: At_42deg_Heat_P Parameter: Timepoint (hr) Value: 6
  misc_feature: MA Experiment 20000173 PARAMETER Experiment Name: At_42deg_Heat_P Parameter: Tissue Value: Aerial
  misc_feature: MA Experiment ID: 20000179 Result: Up-regulated in Transcription
  misc_feature: MA Experiment 20000179 PARAMETER Experiment Name: At_Germinating_Seeds_P Parameter: Age (hr) Value: 6 vs. 0
  misc_feature: MA Experiment 20000179 PARAMETER Experiment Name: At_Germinating_Seeds_P Parameter: Tissue Value: Germinating Seeds
  misc_feature: MA Experiment ID: 20000180 Result: Up-regulated in Transcription
  misc_feature: MA Experiment 20000180 PARAMETER Experiment Name: At_Germinating_Seeds_P Parameter: Age (hr) Value: 24 vs. 0
  misc_feature: MA Experiment 20000180 PARAMETER Experiment Name: At_Germinating_Seeds_P Parameter: Tissue Value: Germinating Seeds
  misc_feature: MA Experiment ID: 20000184 Result: Down-regulated in Transcription
  misc_feature: MA Experiment 20000184 PARAMETER Experiment Name: At_Shoots__P Parameter: Age (day) Value: 7
  misc_feature: MA Experiment 20000184 PARAMETER Experiment Name: At_Shoots__P Parameter: Tissue Value: Shoots vs. Whole Plant
  misc_feature: MA Experiment ID: 20000438 Result: Down-regulated in Transcription
  misc_feature: MA Experiment 20000438 PARAMETER Experiment Name: At_Shoots__P Parameter: Age (day) Value: 14
  misc_feature: MA Experiment 20000438 PARAMETER Experiment Name: At_Shoots__P Parameter: Tissue Value: Shoots vs. Whole Plant
  misc_feature: MA Experiment ID: 20000496 Result: Down-regulated in Transcription
  misc_feature: MA Experiment 20000496 PARAMETER Experiment Name: At_Guard_Cells_P Parameter: Harvest Date Value: 7/19/2002
  misc_feature: MA Experiment 20000496 PARAMETER Experiment Name: At_Guard_Cells_P Parameter: Organism Value: Canola
  misc_feature: MA Experiment 20000496 PARAMETER Experiment Name: At_Guard_Cells_P Parameter: Tissue Value: Guard Cells vs. Leaves
  misc_feature: MA Experiment ID: 20001451 Result: Down-regulated in Transcription
  misc_feature: MA Experiment 20001451 PARAMETER Experiment Name: At_Far-red-induction_P Parameter: Age (day) Value: 7
  misc_feature: MA Experiment 20001451 PARAMETER Experiment Name: At_Far-red-induction_P Parameter: Light Value: Far-red vs. White
  misc_feature: MA Experiment 20001451 PARAMETER Experiment Name: At_Far-red-induction_P Parameter: Organism Value: A. thaliana
  misc_feature: MA Experiment 20001451 PARAMETER Experiment Name: At_Far-red-induction_P Parameter: Plant Line Value: Columbia
  misc_feature: MA Experiment 20001451 PARAMETER Experiment Name: At_Far-red-induction_P Parameter: Timepoint (hr) Value: 24
  misc_feature: MA Experiment 20001451 PARAMETER Experiment Name: At_Far-red-induction_P Parameter: Tissue Value: Whole Plant
  misc_feature: MA Experiment ID: 20001905 Result: Down-regulated in Transcription
  misc_feature: MA Experiment 20001905 PARAMETER Experiment Name: At_Drought_Reproduction_P Parameter: Age (day) Value: 40
  misc_feature: MA Experiment 20001905 PARAMETER Experiment Name: At_Drought_Reproduction_P Parameter: Organism Value: A. thaliana
  misc_feature: MA Experiment 20001905 PARAMETER Experiment Name: At_Drought_Reproduction_P Parameter: Plant Line Value: WS
  misc_feature: MA Experiment 20001905 PARAMETER Experiment Name: At_Drought_Reproduction_P Parameter: Timepoint (day) Value: 10
  misc_feature: MA Experiment 20001905 PARAMETER Experiment Name: At_Drought_Reproduction_P Parameter: Tissue Value: Rosettes
  misc_feature: MA Experiment 20001905 PARAMETER Experiment Name: At_Drought_Reproduction_P Parameter: Treatment Value: Drought vs. No Drought
  misc_feature: MA Experiment ID: 20001906 Result: Down-regulated in Transcription
  misc_feature: MA Experiment 20001906 PARAMETER Experiment Name: At_Drought_Reproduction_P Parameter: Age (day) Value: 35
  misc_feature: MA Experiment 20001906 PARAMETER Experiment Name: At_Drought_Reproduction_P Parameter: Organism Value: A. thaliana
  misc_feature: MA Experiment 20001906 PARAMETER Experiment Name: At_Drought_Reproduction_P Parameter: Plant Line Value: WS
  misc_feature: MA Experiment 20001906 PARAMETER Experiment Name: At_Drought_Reproduction_P Parameter: Timepoint (day) Value: 5
  misc_feature: MA Experiment 20001906 PARAMETER Experiment Name: At_Drought_Reproduction_P Parameter: Tissue Value: Siliques
  misc_feature: MA Experiment 20001906 PARAMETER Experiment Name: At_Drought_Reproduction_P Parameter: Treatment Value: Drought vs. No Drought
  misc_feature: MA Experiment ID: 20001908 Result: Down-regulated in Transcription
  misc_feature: MA Experiment 20001908 PARAMETER Experiment Name: At_Drought_Reproduction_P Parameter: Age (day) Value: 40
  misc_feature: MA Experiment 20001908 PARAMETER Experiment Name: At_Drought_Reproduction_P Parameter: Organism Value: A. thaliana
  misc_feature: MA Experiment 20001908 PARAMETER Experiment Name: At_Drought_Reproduction_P Parameter: Plant Line Value: WS
  misc_feature: MA Experiment 20001908 PARAMETER Experiment Name: At_Drought_Reproduction_P Parameter: Timepoint (day) Value: 10
  misc_feature: MA Experiment 20001908 PARAMETER Experiment Name: At_Drought_Reproduction_P Parameter: Tissue Value: Siliques
  misc_feature: MA Experiment 20001908 PARAMETER Experiment Name: At_Drought_Reproduction_P Parameter: Treatment Value: Drought vs. No Drought
  misc_feature: MA Experiment ID: 20001911 Result: Down-regulated in Transcription
  misc_feature: MA Experiment 20001911 PARAMETER Experiment Name: At_Drought_Reproduction_P Parameter: Age (day) Value: 40
  misc_feature: MA Experiment 20001911 PARAMETER Experiment Name: At_Drought_Reproduction_P Parameter: Organism Value: A. thaliana
  misc_feature: MA Experiment 20001911 PARAMETER Experiment Name: At_Drought_Reproduction_P Parameter: Plant Line Value: WS
  misc_feature: MA Experiment 20001911 PARAMETER Experiment Name: At_Drought_Reproduction_P Parameter: Timepoint (day) Value: 10
  misc_feature: MA Experiment 20001911 PARAMETER Experiment Name: At_Drought_Reproduction_P Parameter: Tissue Value: Flowers
  misc_feature: MA Experiment 20001911 PARAMETER Experiment Name: At_Drought_Reproduction_P Parameter: Treatment Value: Drought vs. No Drought
attttttatcaatcgtgctccgtaatcattacctttcttcttcatcttcatcttcacgcagcgacttctttgattctctctttttattctcagctccaatttcaacctgcatttctctcttctcaattttgggtttctttttttgatatctcatttgatcagatcgacgaagagaggaagaaggtttgagctgagagatctttggaggtagaaagaagatctcaaaaacgatgtcgtttacaggaactcagcagaaatgcagggcgtgcgagaagacagtgtaccctgtggagcttctctcagctgatggaatctcttatcacaaggcttgcttcaaatgctctcactgcaaaagcagacttcaactgagcaattattcatcaatggaaggagtggtgtattgtaggcctcattttgagcagcttttcaaggagtctggtagtttcagcaagaactttcagtcacctgcaaagccattgactgataagccaaccccggagctgaataggacacctagtcgacttgctggtatgttctctggaacgcaagacaaatgcgctacttgcactaaaaccgtgtatcctatcgaaaaggtaactgtggaaagccagtgttaccataaatcttgcttcaagtgttctcatggaggctgtccgatatctccatcgaactatgcagctctagagggaatattgtactgcaagcaccatttcgctcagcttttcaaggagaaaggaagttacaatcatctcatcaaatctgcttccatcaaacgcgctactgctgctgctaccgcagctgctgcagctgtagcagccgttcccgaatcttgaattcaaattctctttatttttgtgtatgtgctgtgttgtttacatgtattcgatatgattcatgttctttgtcttccataattgaaccaggcataaaattctcccagttttctctgagtttcttgtttgtgatactactacatctataataaccgaggacttttggcttt

SEQ ID NO: 36896 - protein, 200 aa, Arabidopsis thaliana
  peptide (1)..(200): Ceres Seq. ID no. 13576664
  misc_feature (109)..(166): Pfam Name: LIM domain Pfam Description: LIM domain
  misc_feature (1)..(188): Homolog of NCBI NO: 25354704 NR Description: T1N6.19 protein - Arabidopsis thaliana
  misc_feature (52)..(200): Homolog of NCBI NO: 13926203 NR Description: transcription factor L2 [Arabidopsis thaliana]
  misc_feature (1)..(191): Homolog of NCBI NO: 15225897 NR Description: LIM-domain protein -related [Arabidopsis
  misc_feature (1)..(188): Homolog of NCBI NO: 8515104 NR Description: LIM domain protein PLIM-2 [Nicotiana tabacum]
  misc_feature (1)..(190): Homolog of NCBI NO: 17227092 NR Description: LIM domain protein [Gossypium hirsutum]
  misc_feature (1)..(168): Homolog of NCBI NO: 11282608 NR Description: transcription factor L2 [imported] - Arabidopsis
  misc_feature (3)..(193): Homolog of NCBI NO: 34902012 NR Description: putative LIM-domain protein
  misc_feature (1)..(185): Homolog of NCBI NO: 7489184 NR Description: probable transcription factor SF3 - common
  misc_feature (1)..(200): Homolog of NCBI NO: 15228188 NR Description: transcription factor L2 [Arabidopsis thaliana]
  misc_feature (1)..(200): Homolog of NCBI NO: 15225592 NR Description: LIM-domain protein -related [Arabidopsis
MSFTGTQQKCRACEKTVYPVELLSADGISYHKACFKCSHCKSRLQLSNYSSMEGVVYCRPHFEQLFKESGSFSKNFQSPAKPLTDKPTPELNRTPSRLAGMFSGTQDKCATCTKTVYPIEKVTVESQCYHKSCFKCSHGGCPISPSNYAALEGILYCKHHFAQLFKEKGSYNHLIKSASIKRATAAATAAAAAVAAVPES

SEQ ID NO: 36897 - protein, 149 aa, Arabidopsis thaliana
  peptide (1)..(149): Ceres Seq. ID no. 13576665
  misc_feature (58)..(115): Pfam Name: LIM domain Pfam Description: LIM domain
  misc_feature (1)..(137): Homolog of NCBI NO: 25354704 NR Description: T1N6.19 protein - Arabidopsis thaliana
  misc_feature (1)..(149): Homolog of NCBI NO: 13926203 NR Description: transcription factor L2 [Arabidopsis thaliana]
  misc_feature (1)..(140): Homolog of NCBI NO: 15225897 NR Description: LIM-domain protein -related [Arabidopsis
  misc_feature (1)..(137): Homolog of NCBI NO: 8515104 NR Description: LIM domain protein PLIM-2 [Nicotiana tabacum]
  misc_feature (1)..(139): Homolog of NCBI NO: 17227092 NR Description: LIM domain protein [Gossypium hirsutum]
  misc_feature (1)..(117): Homolog of NCBI NO: 11282608 NR Description: transcription factor L2 [imported] - Arabidopsis
  misc_feature (1)..(142): Homolog of NCBI NO: 34902012 NR Description: putative LIM-domain protein
  misc_feature (1)..(134): Homolog of NCBI NO: 7489184 NR Description: probable transcription factor SF3 - common
  misc_feature (1)..(149): Homolog of NCBI NO: 15228188 NR Description: transcription factor L2 [Arabidopsis thaliana]
  misc_feature (1)..(149): Homolog of NCBI NO: 15225592 NR Description: LIM-domain protein -related [Arabidopsis
MEGVVYCRPHFEQLFKESGSFSKNFQSPAKPLTDKPTPELNRTPSRLAGMFSGTQDKCATCTKTVYPIEKVTVESQCYHKSCFKCSHGGCPISPSNYAALEGILYCKHHFAQLFKEKGSYNHLIKSASIKRATAAATAAAAAVAAVPES

SEQ ID NO: 36898 - protein, 100 aa, Arabidopsis thaliana
  peptide (1)..(100): Ceres Seq. ID no. 13576666
  misc_feature (9)..(66): Pfam Name: LIM domain Pfam Description: LIM domain
  misc_feature (1)..(88): Homolog of NCBI NO: 25354704 NR Description: T1N6.19 protein - Arabidopsis thaliana
  misc_feature (1)..(100): Homolog of NCBI NO: 13926203 NR Description: transcription factor L2 [Arabidopsis thaliana]
  misc_feature (1)..(91): Homolog of NCBI NO: 15225897 NR Description: LIM-domain protein -related [Arabidopsis
  misc_feature (1)..(88): Homolog of NCBI NO: 8515104 NR Description: LIM domain protein PLIM-2 [Nicotiana tabacum]
  misc_feature (1)..(90): Homolog of NCBI NO: 17227092 NR Description: LIM domain protein [Gossypium hirsutum]
  misc_feature (1)..(68): Homolog of NCBI NO: 11282608 NR Description: transcription factor L2 [imported] - Arabidopsis
  misc_feature (1)..(93): Homolog of NCBI NO: 34902012 NR Description: putative LIM-domain protein
  misc_feature (1)..(85): Homolog of NCBI NO: 7489184 NR Description: probable transcription factor SF3 - common
  misc_feature (1)..(100): Homolog of NCBI NO: 15228188 NR Description: transcription factor L2 [Arabidopsis thaliana]
  misc_feature (1)..(100): Homolog of NCBI NO: 15225592 NR Description: LIM-domain protein -related [Arabidopsis
MFSGTQDKCATCTKTVYPIEKVTVESQCYHKSCFKCSHGGCPISPSNYAALEGILYCKHHFAQLFKEKGSYNHLIKSASIKRATAAATAAAAAVAAVPES

SEQ ID NO: 36899 - DNA, 957 bp, Arabidopsis thaliana
  misc_feature (1)..(957): Ceres Seq. ID no. 13580523
  misc_feature: MA Experiment ID: 20000265 Result: Up-regulated in Transcription
  misc_feature: MA Experiment 20000265 PARAMETER Experiment Name: At_Open_Flower_P Parameter: Age (day) Value: 21
  misc_feature: MA Experiment 20000265 PARAMETER Experiment Name: At_Open_Flower_P Parameter: Plant Line Value: WS
  misc_feature: MA Experiment 20000265 PARAMETER Experiment Name: At_Open_Flower_P Parameter: Tissue Value: Closed Flower vs. Whole Plant
aattttgaaaattggttaactctgaatcaagctttttgtctaagatacctcaaagcataacatatacaagcttatatcgtcattttctctttctttcatcaggtaattattgtttggactaaattttcaagagaaatgagtgtatttcgaagatttgttggctggatcaaccagaacctacaacaacagcctcttaaggatgagtccaagagatctgagaatgttgactctaattcagcgacagagaatgatactaataaacgggcattttattatgacaaagctgaggctaagaagcaaggaaaactttggagagctgcagagaagaagaaaccatggtatgatgctcctcctaaggtcaaggtgacaacaaaaaagggtctttgccacatgcacatagagttgacagtaggattgcctccggaaggggtctatgatttgttcgctaatccgaacgactttccattcttcaggatcgacaacgagactgggcgcgaacttttggaaaacaaatcaagaaaggttttgatgaaagatggaccgaggcagagcgcgcggttggagaaagctctgacctgggacgttctttggtggtgtggagcttttccatttactctaattgttgatgaaaaccaaaaaaactttagaggaagatatatgaaagagaaaatgaagtttatgaaatattttgagggtaaatggaaaatagagccactatacgtagattcagaacgcttgtgcaaggacagaaagccgaagagtcgagaagaatacaaaagatgtagcggcggagaaggaaaggttgcatcgaaagtgacaatggaccaatacttccaaccttattttcttcttaatctaccaccactttcttggtacattcgtgggatcaccatcaaaaccaccaaaaatctgctcatattgattcaaaatgcaagtatcatgttccgagacgcttga

SEQ ID NO: 36900 - protein, 273 aa, Arabidopsis thaliana
  peptide (1)..(273): Ceres Seq. ID no. 13580524
  misc_feature (153)..(254): Pfam Name: Domain of unknown function DUF220 Pfam Description: Domain of unknown function DUF220
  misc_feature (1)..(271): Homolog of NCBI NO: 15220821 NR Description: hypothetical protein [Arabidopsis thaliana]
  misc_feature (1)..(113): Homolog of NCBI NO: 8778583 NR Description: F28C11.19 [Arabidopsis thaliana]
  misc_feature (1)..(272): Homolog of NCBI NO: 8778583 NR Description: F28C11.19 [Arabidopsis thaliana]
  misc_feature (1)..(272): Homolog of NCBI NO: 15220799 NR Description: OBP32pep protein -related [Arabidopsis thaliana]
  misc_feature (1)..(236): Homolog of NCBI NO: 25373392 NR Description: 32.3K hypothetical protein F5O8.18 - Arabidopsis
  misc_feature (1)..(258): Homolog of NCBI NO: 8778583 NR Description: F28C11.19 [Arabidopsis thaliana]
  misc_feature (1)..(123): Homolog of NCBI NO: 8778583 NR Description: F28C11.19 [Arabidopsis thaliana]
  misc_feature (126)..(272): Homolog of NCBI NO: 8778583 NR Description: F28C11.19 [Arabidopsis thaliana]
  misc_feature (1)..(272): Homolog of NCBI NO: 15220802 NR Description: OBP32pep protein -related [Arabidopsis thaliana]
  misc_feature (1)..(273): Homolog of NCBI NO: 15220845 NR Description: OBP32pep protein -related [Arabidopsis thaliana]
MSVFRRFVGWINQNLQQQPLKDESKRSENVDSNSATENDTNKRAFYYDKAEAKKQGKLWRAAEKKKPWYDAPPKVKVTTKKGLCHMHIELTVGLPPEGVYDLFANPNDFPFFRIDNETGRELLENKSRKVLMKDGPRQSARLEKALTWDVLWWCGAFPFTLIVDENQKNFRGRYMKEKMKFMKYFEGKWKIEPLYVDSERLCKDRKPKSREEYKRCSGGEGKVASKVTMDQYFQPYFLLNLPPLSWYIRGITIKTTKNLLILIQNASIMFRDA

SEQ ID NO: 36901 - protein, 188 aa, Arabidopsis thaliana
  peptide (1)..(188): Ceres Seq. ID no. 13580525
  misc_feature (68)..(169): Pfam Name: Domain of unknown function DUF220 Pfam Description: Domain of unknown function DUF220
  misc_feature (1)..(186): Homolog of NCBI NO: 15220821 NR Description: hypothetical protein [Arabidopsis thaliana]
  misc_feature (1)..(28): Homolog of NCBI NO: 8778583 NR Description: F28C11.19 [Arabidopsis thaliana]
  misc_feature (1)..(187): Homolog of NCBI NO: 8778583 NR Description: F28C11.19 [Arabidopsis thaliana]
  misc_feature (1)..(187): Homolog of NCBI NO: 15220799 NR Description: OBP32pep protein -related [Arabidopsis thaliana]
  misc_feature (1)..(151): Homolog of NCBI NO: 25373392 NR Description: 32.3K hypothetical protein F5O8.18 - Arabidopsis
  misc_feature (1)..(173): Homolog of NCBI NO: 8778583 NR Description: F28C11.19 [Arabidopsis thaliana]
  misc_feature (1)..(38): Homolog of NCBI NO: 8778583 NR Description: F28C11.19 [Arabidopsis thaliana]
  misc_feature (41)..(187): Homolog of NCBI NO: 8778583 NR Description: F28C11.19 [Arabidopsis thaliana]
  misc_feature (1)..(187): Homolog of NCBI NO: 15220802 NR Description: OBP32pep protein -related [Arabidopsis thaliana]
  misc_feature (1)..(188): Homolog of NCBI NO: 15220845 NR Description: OBP32pep protein -related [Arabidopsis thaliana]
MHIELTVGLPPEGVYDLFANPNDFPFFRIDNETGRELLENKSRKVLMKDGPRQSARLEKALTWDVLWWCGAFPFTLIVDENQKNFRGRYMKEKMKFMKYFEGKWKIEPLYVDSERLCKDRKPKSREEYKRCSGGEGKVASKVTMDQYFQPYFLLNLPPLSWYIRGITIKTTKNLLILIQNASIMFRDA

SEQ ID NO: 36902 - protein, 142 aa, Arabidopsis thaliana
  peptide (1)..(142): Ceres Seq. ID no. 13580526
  misc_feature (22)..(123): Pfam Name: Domain of unknown function DUF220 Pfam Description: Domain of unknown function DUF220
  misc_feature (1)..(140): Homolog of NCBI NO: 25373398 NR Description: hypothetical protein F5O8.21 - Arabidopsis
  misc_feature (1)..(141): Homolog of NCBI NO: 15220815 NR Description: OBP32pep protein -related [Arabidopsis thaliana]
  misc_feature (1)..(140): Homolog of NCBI NO: 15220821 NR Description: hypothetical protein [Arabidopsis thaliana]
  misc_feature (1)..(141): Homolog of NCBI NO: 8778583 NR Description: F28C11.19 [Arabidopsis thaliana]
  misc_feature (1)..(141): Homolog of NCBI NO: 15220799 NR Description: OBP32pep protein -related [Arabidopsis thaliana]
  misc_feature (1)..(105): Homolog of NCBI NO: 25373392 NR Description: 32.3K hypothetical protein F5O8.18 - Arabidopsis
  misc_feature (1)..(127): Homolog of NCBI NO: 8778583 NR Description: F28C11.19 [Arabidopsis thaliana]
  misc_feature (1)..(141): Homolog of NCBI NO: 8778583 NR Description: F28C11.19 [Arabidopsis thaliana]
  misc_feature (1)..(141): Homolog of NCBI NO: 15220802 NR Description: OBP32pep protein -related [Arabidopsis thaliana]
  misc_feature (1)..(142): Homolog of NCBI NO: 15220845 NR Description: OBP32pep protein -related [Arabidopsis thaliana]
MKDGPRQSARLEKALTWDVLWWCGAFPFTLIVDENQKNFRGRYMKEKMKFMKYFEGKWKIEPLYVDSERLCKDRKPKSREEYKRCSGGEGKVASKVTMDQYFQPYFLLNLPPLSWYIRGITIKTTKNLLILIQNASIMFRDA

SEQ ID NO: 36903 - DNA, 794 bp, Arabidopsis thaliana
  misc_feature (1)..(794): Ceres Seq. ID no. 12329461
  misc_feature: MA Experiment ID: 108434 Result: Down-regulated in Transcription
  misc_feature: MA Experiment 108434 PARAMETER Experiment Name: At_Root_Tips_cDNA_P Parameter: Tissue Value: Root Tips
  misc_feature: MA Experiment ID: 108474 Result: Down-regulated in Transcription
  misc_feature: MA Experiment 108474 PARAMETER Experiment Name: At_Drought_Flowers_cDNA_P Parameter: Timepoint (hr) Value: null
  misc_feature: MA Experiment 108474 PARAMETER Experiment Name: At_Drought_Flowers_cDNA_P Parameter: Treatment Value: Drought vs. No Drought
  misc_feature: MA Experiment ID: 108489 Result: Down-regulated in Transcription
  misc_feature: MA Experiment ID: 108607 Result: Down-regulated in Transcription
  misc_feature: MA Experiment 108607 PARAMETER Experiment Name: At_100uM_ABA_cDNA_P Parameter: Timepoint (hr) Value: 4
  misc_feature: MA Experiment 108607 PARAMETER Experiment Name: At_100uM_ABA_cDNA_P Parameter: Tissue Value: Aerial
  misc_feature: MA Experiment 108607 PARAMETER Experiment Name: At_100uM_ABA_cDNA_P Parameter: Treatment Value: 100uM ABA vs. No Treatment
  misc_feature: MA Experiment ID: 20000224 Result: Down-regulated in Transcription
  misc_feature: MA Experiment ID: 20000265 Result: Down-regulated in Transcription
  misc_feature: MA Experiment 20000265 PARAMETER Experiment Name: At_Open_Flower_P Parameter: Age (day) Value: 21
  misc_feature: MA Experiment 20000265 PARAMETER Experiment Name: At_Open_Flower_P Parameter: Plant Line Value: WS
  misc_feature: MA Experiment 20000265 PARAMETER Experiment Name: At_Open_Flower_P Parameter: Tissue Value: Closed Flower vs. Whole Plant
  misc_feature: MA Experiment ID: 20000438 Result: Down-regulated in Transcription
  misc_feature: MA Experiment 20000438 PARAMETER Experiment Name: At_Shoots__P Parameter: Age (day) Value: 14
  misc_feature: MA Experiment 20000438 PARAMETER Experiment Name: At_Shoots__P Parameter: Tissue Value: Shoots vs. Whole Plant
  misc_feature: MA Experiment ID: 20000794 Result: Up-regulated in Transcription
  misc_feature: MA Experiment 20000794 PARAMETER Experiment Name: At_Petals_P Parameter: Age (day) Value: 23-25 days
  misc_feature: MA Experiment 20000794 PARAMETER Experiment Name: At_Petals_P Parameter: Plant Line Value: WS
  misc_feature: MA Experiment 20000794 PARAMETER Experiment Name: At_Petals_P Parameter: Tissue Value: Petals vs. Whole plant
  misc_feature: MA Experiment ID: 20001555 Result: Down-regulated in Transcription
  misc_feature: MA Experiment 20001555 PARAMETER Experiment Name: At_Drought_Soil_Dry_P Parameter: Age (day) Value: 24
  misc_feature: MA Experiment 20001555 PARAMETER Experiment Name: At_Drought_Soil_Dry_P Parameter: Organism Value: A. thaliana
  misc_feature: MA Experiment 20001555 PARAMETER Experiment Name: At_Drought_Soil_Dry_P Parameter: Plant Line Value: WS
  misc_feature: MA Experiment 20001555 PARAMETER Experiment Name: At_Drought_Soil_Dry_P Parameter: Post Timepoint (hr) Value: None
  misc_feature: MA Experiment 20001555 PARAMETER Experiment Name: At_Drought_Soil_Dry_P Parameter: Post-Treatment Value: None
  misc_feature: MA Experiment 20001555 PARAMETER Experiment Name: At_Drought_Soil_Dry_P Parameter: Timepoint (day) Value: 10
  misc_feature: MA Experiment 20001555 PARAMETER Experiment Name: At_Drought_Soil_Dry_P Parameter: Treatment Value: Drought vs. No Drought
  misc_feature: MA Experiment ID: 20001556 Result: Down-regulated in Transcription
  misc_feature: MA Experiment 20001556 PARAMETER Experiment Name: At_Drought_Soil_Dry_P Parameter: Age (day) Value: 26
  misc_feature: MA Experiment 20001556 PARAMETER Experiment Name: At_Drought_Soil_Dry_P Parameter: Organism Value: A. thaliana
  misc_feature: MA Experiment 20001556 PARAMETER Experiment Name: At_Drought_Soil_Dry_P Parameter: Plant Line Value: WS
  misc_feature: MA Experiment 20001556 PARAMETER Experiment Name: At_Drought_Soil_Dry_P Parameter: Post Timepoint (hr) Value: None
  misc_feature: MA Experiment 20001556 PARAMETER Experiment Name: At_Drought_Soil_Dry_P Parameter: Post-Treatment Value: None
  misc_feature: MA Experiment 20001556 PARAMETER Experiment Name: At_Drought_Soil_Dry_P Parameter: Timepoint (day) Value: 12
  misc_feature: MA Experiment 20001556 PARAMETER Experiment Name: At_Drought_Soil_Dry_P Parameter: Treatment Value: Drought vs. No Drought
  misc_feature: MA Experiment ID: 20001558 Result: Down-regulated in Transcription
  misc_feature: MA Experiment 20001558 PARAMETER Experiment Name: At_Drought_Soil_Dry_P Parameter: Age (day) Value: 27
  misc_feature: MA Experiment 20001558 PARAMETER Experiment Name: At_Drought_Soil_Dry_P Parameter: Organism Value: A. thaliana
  misc_feature: MA Experiment 20001558 PARAMETER Experiment Name: At_Drought_Soil_Dry_P Parameter: Plant Line Value: WS
  misc_feature: MA Experiment 20001558 PARAMETER Experiment Name: At_Drought_Soil_Dry_P Parameter: Post Timepoint (hr) Value: 6
  misc_feature: MA Experiment 20001558 PARAMETER Experiment Name: At_Drought_Soil_Dry_P Parameter: Post-Treatment Value: Re-Water vs. No Drought
  misc_feature: MA Experiment 20001558 PARAMETER Experiment Name: At_Drought_Soil_Dry_P Parameter: Timepoint (day) Value: 13
  misc_feature: MA Experiment 20001558 PARAMETER Experiment Name: At_Drought_Soil_Dry_P Parameter: Treatment Value: Drought vs. No Drought
  misc_feature: MA Experiment ID: 20001559 Result: Down-regulated in Transcription
  misc_feature: MA Experiment 20001559 PARAMETER Experiment Name: At_Drought_Soil_Dry_P Parameter: Age (day) Value: 28
  misc_feature: MA Experiment 20001559 PARAMETER Experiment Name: At_Drought_Soil_Dry_P Parameter: Organism Value: A. thaliana
  misc_feature: MA Experiment 20001559 PARAMETER Experiment Name: At_Drought_Soil_Dry_P Parameter: Plant Line Value: WS
  misc_feature: MA Experiment 20001559 PARAMETER Experiment Name: At_Drought_Soil_Dry_P Parameter: Post Timepoint (hr) Value: 29
  misc_feature: MA Experiment 20001559 PARAMETER Experiment Name: At_Drought_Soil_Dry_P Parameter: Post-Treatment Value: Re-Water vs. No Drought
  misc_feature: MA Experiment 20001559 PARAMETER Experiment Name: At_Drought_Soil_Dry_P Parameter: Timepoint (day) Value: 14
  misc_feature: MA Experiment 20001559 PARAMETER Experiment Name: At_Drought_Soil_Dry_P Parameter: Treatment Value: Drought vs. No Drought
  misc_feature: MA Experiment ID: 20001757 Result: Down-regulated in Transcription
  misc_feature: MA Experiment 20001757 PARAMETER Experiment Name: At_50mM_NH4NO3_L-to-H_P Parameter: Timepoint (hr) Value: 6
  misc_feature: MA Experiment 20001757 PARAMETER Experiment Name: At_50mM_NH4NO3_L-to-H_P Parameter: Tissue Value: Leaf
  misc_feature: MA Experiment 20001757 PARAMETER Experiment Name: At_50mM_NH4NO3_L-to-H_P Parameter: Treatment Value: 50mM NH4NO3 vs 100mM Mannitol
  misc_feature: MA Experiment ID: 20001773 Result: Up-regulated in Transcription
  misc_feature: MA Experiment 20001773 PARAMETER Experiment Name: At_Far-red-enriched-adult_P Parameter: Age (day) Value: 30
  misc_feature: MA Experiment 20001773 PARAMETER Experiment Name: At_Far-red-enriched-adult_P Parameter: Light Value: Far-red enriched vs. White
  misc_feature: MA Experiment 20001773 PARAMETER Experiment Name: At_Far-red-enriched-adult_P Parameter: Organism Value: A. thaliana
  misc_feature: MA Experiment 20001773 PARAMETER Experiment Name: At_Far-red-enriched-adult_P Parameter: Plant Line Value: Columbia
  misc_feature: MA Experiment 20001773 PARAMETER Experiment Name: At_Far-red-enriched-adult_P Parameter: Timepoint (hr) Value: 48
  misc_feature: MA Experiment 20001773 PARAMETER Experiment Name: At_Far-red-enriched-adult_P Parameter: Tissue Value: Aerial
  misc_feature: MA Experiment ID: 20001905 Result: Down-regulated in Transcription
  misc_feature: MA Experiment 20001905 PARAMETER Experiment Name: At_Drought_Reproduction_P Parameter: Age (day) Value: 40
  misc_feature: MA Experiment 20001905 PARAMETER Experiment Name: At_Drought_Reproduction_P Parameter: Organism Value: A. thaliana
  misc_feature: MA Experiment 20001905 PARAMETER Experiment Name: At_Drought_Reproduction_P Parameter: Plant Line Value: WS
  misc_feature: MA Experiment 20001905 PARAMETER Experiment Name: At_Drought_Reproduction_P Parameter: Timepoint (day) Value: 10
  misc_feature: MA Experiment 20001905 PARAMETER Experiment Name: At_Drought_Reproduction_P Parameter: Tissue Value: Rosettes
  misc_feature: MA Experiment 20001905 PARAMETER Experiment Name: At_Drought_Reproduction_P Parameter: Treatment Value: Drought vs. No Drought
aatcgaaaaatacttctttggtaggctcttaagaatcttaggtgtatctctttagtttgaaggttagattcagaatctctgtagattcattagtagctttttctgtgtgatctttgtgttgtatatatatagatcgaattgattttagctggtgaaaggtgaagttgtggtatgaatatgaagaaacagattatggatgagtctgtaaagtcattgatgctgcctcctcctccaccgcttcttcctccatctcagggatatggatcaagaaagatcgatggagacagcataaccaataaacagatcaagaagttctggagacagaagcagatcattgaagaggatcatctctattctgctattaaggctgcagctcgtgtcagagctcgtaatctctctgatgaggattataaacggtttgaagaaagcttggacatggaggacctggaaaccgaagatcatcagggattgaaagactggtggacaaagagcaaatacgcgtacttgaaccagcctgctcttggatctgcagattcactgaagagaaagaggttttcgacttatacaccaaactgtttctcgttcaagccttgcaatcctctctacgcaacttcgctcaatgtcttttgaaccatgagcagcaaactctgcaagatcaatcgtcttgcatatatgtatatatttgttcgtgtgtgtctctgtacatgtcatgtgttattgcttctatattaatggatgtggattttggtgtggttgttgatttgtaactgttgaataaaatctttctatggaac

SEQ ID NO: 36904 - protein, 152 aa, Arabidopsis thaliana; identical to SEQ ID NO: 25888
  peptide (1)..(152): Ceres Seq. ID no. 12329462
  misc_feature (94)..(138): Homolog of NCBI NO: 38345846 NR Description: OSJNBa0084K11.10 [Oryza sativa (japonica
  misc_feature (39)..(93): Homolog of NCBI NO: 38345846 NR Description: OSJNBa0084K11.10 [Oryza sativa (japonica
  misc_feature (8)..(152): Homolog of NCBI NO: 25371275 NR Description: hypothetical protein At2g17710 [imported] -
  misc_feature (3)..(152): Homolog of NCBI NO: 21618216 NR Description: unknown [Arabidopsis thaliana]
  misc_feature (1)..(152): Homolog of NCBI NO: 18398508 NR Description: expressed protein

SEQ ID NO: 36905 - protein, 150 aa, Arabidopsis thaliana; identical to SEQ ID NO: 25889
  peptide (1)..(150): Ceres Seq. ID no. 12329463
  misc_feature (92)..(136): Homolog of NCBI NO: 38345846 NR Description: OSJNBa0084K11.10 [Oryza sativa (japonica
  misc_feature (37)..(91): Homolog of NCBI NO: 38345846 NR Description: OSJNBa0084K11.10 [Oryza sativa (japonica
  misc_feature (6)..(150): Homolog of NCBI NO: 25371275 NR Description: hypothetical protein At2g17710 [imported] -
  misc_feature (1)..(150): Homolog of NCBI NO: 21618216 NR Description: unknown [Arabidopsis thaliana]
  misc_feature (1)..(150): Homolog of NCBI NO: 18398508 NR Description: expressed protein

SEQ ID NO: 36906 - protein, 145 aa, Arabidopsis thaliana; identical to SEQ ID NO: 25890
  peptide (1)..(145): Ceres Seq. ID no. 12329464
  misc_feature (87)..(131): Homolog of NCBI NO: 38345846 NR Description: OSJNBa0084K11.10 [Oryza sativa (japonica
  misc_feature (32)..(86): Homolog of NCBI NO: 38345846 NR Description: OSJNBa0084K11.10 [Oryza sativa (japonica
  misc_feature (1)..(145): Homolog of NCBI NO: 25371275 NR Description: hypothetical protein At2g17710 [imported] -
  misc_feature (1)..(145): Homolog of NCBI NO: 21618216 NR Description: unknown [Arabidopsis thaliana]
  misc_feature (1)..(145): Homolog of NCBI NO: 18398508 NR Description: expressed protein

SEQ ID NO: 36907 - DNA, 5147 bp, Arabidopsis thaliana
  misc_feature (1)..(5147): Ceres Seq. ID no. 13489117
  misc_feature: MA Experiment ID: 20000234 Result: Up-regulated in Transcription
  misc_feature: MA Experiment 20000234 PARAMETER Experiment Name: At_Siliques_P Parameter: Age (day) Value: 21
  misc_feature: MA Experiment 20000234 PARAMETER Experiment Name: At_Siliques_P Parameter: Organism Value: A. thaliana
  misc_feature: MA Experiment 20000234 PARAMETER Experiment Name: At_Siliques_P Parameter: Plant Line Value: WS
  misc_feature: MA Experiment 20000234 PARAMETER Experiment Name: At_Siliques_P Parameter: Tissue Value: Less Than 5mm Siliques vs. Whole Plant
  misc_feature: MA Experiment ID: 20001451 Result: Down-regulated in Transcription
  misc_feature: MA Experiment 20001451 PARAMETER Experiment Name: At_Far-red-induction_P Parameter: Age (day) Value: 7
  misc_feature: MA Experiment 20001451 PARAMETER Experiment Name: At_Far-red-induction_P Parameter: Light Value: Far-red vs. White
  misc_feature: MA Experiment 20001451 PARAMETER Experiment Name: At_Far-red-induction_P Parameter: Organism Value: A. thaliana
  misc_feature: MA Experiment 20001451 PARAMETER Experiment Name: At_Far-red-induction_P Parameter: Plant Line Value: Columbia
  misc_feature: MA Experiment 20001451 PARAMETER Experiment Name: At_Far-red-induction_P Parameter: Timepoint (hr) Value: 24
  misc_feature: MA Experiment 20001451 PARAMETER Experiment Name: At_Far-red-induction_P Parameter: Tissue Value: Whole Plant
atggcaacttcttctcgttcggagcgatttccgataacgccgagtacggcggctactaatagattgacgattacgcctaattctagggttttgaaaagccctctcactgaagaaatcatgtggaagcggctcaaagatgctgggtttgatgaacaatcgatcaagaatagggataaagctgccttaatcgcttacatcgccaagctagaatctgaggtttatgattaccaacacaacatgggtcttctccttttggagaaaaacgaattgtcttcgcagtatgaagagattaaggcctctgtggatgagtctgacctaacacatatgcgagagaaatcagcatatgtctcggctctagctgaagcaaagaaacgagaagagagtttgaagaaggatgtagggattgcgaaggagtgcatttctagtttggagaagactctgcatgagatgcgcgcagaatgtgccgaaacaaaagtttctgctgggagtactatgtcggaagcacatgttatgatcgaggatgcgctgaagaaacttgcagatgctgaagcaaaaatgcgcgcagcagaggctttacaagcagaagctaaccggtatcaccgaattgcagagagaaagttgaaagaagttgaaagtcgtgaagatgatcttactcggcgtcttgcatctttcaagtctgagtgtgaaacgaaagagaacgaaatggttattgagcgacagactttaaatgagaggcggaagagcttgcagcaagagcatgaaagattattggatgcacaagtttcactaaatcaaagagaagatcacatttttgctagatcccaagaattagctgaacttgaaaaggggttagatactgcaaagaccacatttgaggaggaacgcaaagccttcgaagacaaaaaatccaacttggagattgcgttagccttgtgtgctaaaagagaagaggtcatcaaaaaaatttctgggagacaagatagtaatgttttcatgttttttttttttttttgcaaaaaacaggctgtctctgaaagggaatcttcgctacttaagaaggagcaagaactgcttgttgctgaagaaaaaattgccagcaaggaatctgaactaattcagaacgtcttagcgaatcaagaagttatcctgaggaaaagaaaatctgatgtggaagctgaattggaatgtaagagcaaatcggtggaagttgaaattgagagcaagagacgggcttgggaattaagggaggttgatatcaagcagagggaagacctagttggtgaaaaagaacatgacttggaagttcaatcaagagcattggcagagaaagaaaaagatataacagagaagtcttttaaccttgatgagaaagagaagaatttggttgctacagaggaagatattaaccgtaagactactatgctggaggatgagaaggaacggcttagaaaattggacctggagctgcagcagtctttgacgtcattagaagacaagagaaaacgggttgattctgcaacacaaaaacttgaagccttgaagagtgagacaagcgaattatctactctggagatgaaacttaaggaggaattagatgatttgagggcccaaaagcttgaaatgctggctgaagctgatagattgaaggtggagaaagctaaatttgaggctgagtgggaacacattgatgtgaaaagggaagagttaagaaaagaagcagagtatataactcggcaaagagaggctttttcaatgtatctcaaggacgagcgtgataacatcaaagaggaaagagatgcattgagaaatcagcacaaaaacgatgtggagtcgctaaaccgagagcgtgaagaattcatgaataagatggtggaggaacattctgaatggcttagcaagatacagcgtgagcgtgctgacttcttgttgggcattgagatgcagaaacgagagttggagtattgcatcgaaaacaaacgagaagaattggaaaattcttcaagggatagagaaaaggcttttgagcaagagaagaagttagaagaggagcgtatacagtcgcttaaggaaatggcagagaaagagttagaacatgtccaagtggaactaaagaggttggatgctgagaggttggagatcaaattggatcgtgaaagaagagagagggagtgggcagagttaaaggattcggttgaggagctaaaggtgcaacgagaaaaactagagacgcaaaggcatatgcttcgtgctgaaagagatgaaatccgacatgagattgaagaactgaagaaattagagaatctgaaagttgcattagatgatatgtccatggctaaaatgcagctgtccaatttagagcgtagctgggaaaaggtttctgctttgaagcagaaggttgtgtctcgggatgatgaacttgacctgcaaaatggagtcagcactgtgagtaatagcgaagatggctacaactcttcaatggaaagacagaacggcttaaccccttcatctgccactccattttcatggataaaacgatgtactaatctgattttcaagacttctccagagaaatccaccctaatgcatcattatgaagaagaaggaggagtgccttcagaaaagttgaagctagaatcgtcgagaagagaagaaaaggcttacactgagggactgtctattgcggttgaaagacttgaagcaggaaggaaaagaagaggtaacacatctggagatgagactagcgaaccaagcaataacaaaaagaggaaacatgatgttacccaaaaatattctgatgaagctgatacccagagtgtcatatcaagcccgcaaaatgtgcctgaggacaaacatgaactaccatcaagccaaacccagacgccaagtggtatggtagtcatcagtgaaaccgttaagatcacaagagtaacgtgtgagacagaggtgaccaacaaagtcacaacccttgactgctcagaaagtccttcggaagcagggagaaagatgggagaggagacagaagatggtgattgcaatcagactgggataaacgcgtctgaaacagtgattcataatgaagctgcaacagaagatatatgcacataagaaactctatgaatccttttgggcttggtttctagagaagataaggatttcgagtgagtagtgttggttagttaaggtagggtagggaaaaatcgttggcttctagtgtgttgcagtgtgtgtatttgagaatatatgatttgtgagactaaaaagccgaaatcattatcggggtttattgtttcttctacttgtaatgatgttgatgattgatgtcttttagctcatcggttagtaagtgtcaacagcaagagtgttcggctggactaccgtggcccattctgtagatttctttctagcccggcccacaacttccattgggctagatatgtttttctcacgtaaaagatatctgactgtcgatattgaagtaacttcttaaaacatttagatttaattgataatttaaatgtcacttttggttttttagatgacgattaaaatccttttcataacccaaaatattagttttgccgatattagaaatccgaagaaaatgacagaaaataggattaatcaatttagggtttaataaaaaatagtgagtgagagagaggctacagtgctccacattgacatcaacaaggttgaagaagaacaacatcattcaacatcagcatcacgaatattttcgagtcatggagagaagcgccgttgcctcaggttttcatagaaattacatcctctgtgcttcacgcgccgccacttccacgacgcgcctccactctttgtcctccctcagaaactttccctcttcctctctcaggattcgtcactgtccttctcccatctcttccaatttcatcgttagtgaagtttcccgaaaccgacgatgcgacgccgtttcttccagcaccaccgatgtgactgaattagccgaaattgattgggacaagattgattttgggcttaaaccaacggattacatgtacgccatgaaatgtagccgtgatggtgaattctctcaaggtcaattgcaaccttttggtaacattgacattaacccagcagctggtgttctcaactatggacaaggtttgtttgaaggtctaaaagcttacagaaaacaagatgggaatattctactcttccgtcctgaggagaatgcgatccgaatgagaaatggcgctgaaagaatgtgtatgccttctccaaccgttgaacagtttgttgaggctgtgaaaactactgtattagctaacaaacgctggattccacctccaggtaaaggatcattatacataaggccattgctaatgggaactggagctgttcttggtcttgctcctgctcctgaatacactttccttatctttgtttcacctgtcgggaactacttcaaggaaggtgttgcgccgatcaacttaattgttgaaactgaattccatcgtgcaactcccggcggtactggaggtgttaaaaccatcggtaattatgctgcagtcttgaaggctcagtcgattgcgaaagctaaagggtattctgatgttttataccttgattgccttcacaaaagatatcttgaggaggtttcatcgtgcaatattttcattgtgaaggataatgtgatatctactcctgaaattaaaggaaccatcttgcctggaattacccggaagagtatcatcgaagtagctcgtagccaaggtttcaaggtggaggaacgaaatgtgacagttgatgaattggtagaagcagacgaggttttctgcacaggaaccgccgttgttttatctccggttggaagcatcacttacaaaagccaaaggttttcttatggagaagatggctttggaacagtctcgaaacaactctacacttccttgacgagcctgcaaatgggtctgagcgaagataacatgaactggactgttcaattgagttaaaaccagtcacgaacatatcaatattatacatatggatgtgttagtagatacagaagatatattagaattccatgcttctgatgcttcaagattctgatacttgaaactataaacaataatctgtctttaaaataactaaaacggggaataaaaagc

SEQ ID NO: 36908 - protein, 1034 aa, Arabidopsis thaliana
  peptide (1)..(1034): Ceres Seq. ID no. 13489118
  misc_feature (96)..(941): Pfam Name: Myosin tail Pfam Description: Myosin tail
  misc_feature (41)..(358): Homolog of NCBI NO: 15010714 NR Description: At1g13220/F3F19_25 [Arabidopsis thaliana]
  misc_feature (83)..(938): Homolog of NCBI NO: 15221524 NR Description: nuclear matrix constituent protein 1 (NMCP1)
  misc_feature (1)..(719): Homolog of NCBI NO: 15221524 NR Description: nuclear matrix constituent protein 1 (NMCP1)
  misc_feature (66)..(808): Homolog of NCBI NO: 15220369 NR Description: nuclear matrix constituent protein 1 -related
  misc_feature (84)..(875): Homolog of NCBI NO: 18391490 NR Description: nuclear matrix constituent protein -related
  misc_feature (62)..(963): Homolog of NCBI NO: 7488926 NR Description: nuclear matrix constituent protein 1 - carrot
  misc_feature (58)..(768): Homolog of NCBI NO: 15220369 NR Description: nuclear matrix constituent protein 1 -related
  misc_feature (41)..(719): Homolog of NCBI NO: 18391490 NR Description: nuclear matrix constituent protein -related
  misc_feature (73)..(1008): Homolog of NCBI NO: 7488926 NR Description: nuclear matrix constituent protein 1 - carrot
  misc_feature (58)..(808): Homolog of NCBI NO: 9828634 NR Description: F1N21.5 [Arabidopsis thaliana]
MATSSRSERFPITPSTAATNRLTITPNSRVLKSPLTEEIMWKRLKDAGFDEQSIKNRDKAALIAYIAKLESEVYDYQHNMGLLLLEKNELSSQYEEIKASVDESDLTHMREKSAYVSALAEAKKREESLKKDVGIAKECISSLEKTLHEMRAECAETKVSAGSTMSEAHVMIEDALKKLADAEAKMRAAEALQAEANRYHRIAERKLKEVESREDDLTRRLASFKSECETKENEMVIERQTLNERRKSLQQEHERLLDAQVSLNQREDHIFARSQELAELEKGLDTAKTTFEEERKAFEDKKSNLEIALALCAKREEVIKKISGRQDSNVFMFFFFFCKKQAVSERESSLLKKEQELLVAEEKIASKESELIQNVLANQEVILRKRKSDVEAELECKSKSVEVEIESKRRAWELREVDIKQREDLVGEKEHDLEVQSRALAEKEKDITEKSFNLDEKEKNLVATEEDINRKTTMLEDEKERLRKLDLELQQSLTSLEDKRKRVDSATQKLEALKSETSELSTLEMKLKEELDDLRAQKLEMLAEADRLKVEKAKFEAEWEHIDVKREELRKEAEYITRQREAFSMYLKDERDNIKEERDALRNQHKNDVESLNREREEFMNKMVEEHSEWLSKIQRERADFLLGIEMQKRELEYCIENKREELENSSRDREKAFEQEKKLEEERIQSLKEMAEKELEHVQVELKRLDAERLEIKLDRERREREWAELKDSVEELKVQREKLETQRHMLRAERDEIRHEIEELKKLENLKVALDDMSMAKMQLSNLERSWEKVSALKQKVVSRDDELDLQNGVSTVSNSEDGYNSSMERQNGLTPSSATPFSWIKRCTNLIFKTSPEKSTLMHHYEEEGGVPSEKLKLESSRREEKAYTEGLSIAVERLEAGRKRRGNTSGDETSEPSNNKKRKHDVTQKYSDEADTQSVISSPQNVPEDKHELPSSQTQTPSGMVVISETVKITRVTCETEVTNKVTTLDCSESPSEAGRKMGEETEDGDCNQTGINASETVIHNEAATEDICT

SEQ ID NO: 36909 - protein, 995 aa, Arabidopsis thaliana
  peptide (1)..(995): Ceres Seq. ID no. 13489119
  misc_feature (57)..(902): Pfam Name: Myosin tail Pfam Description: Myosin tail
  misc_feature (2)..(319): Homolog of NCBI NO: 15010714 NR Description: At1g13220/F3F19_25 [Arabidopsis thaliana]
  misc_feature (44)..(899): Homolog of NCBI NO: 15221524 NR Description: nuclear matrix constituent protein 1 (NMCP1)
  misc_feature (1)..(680): Homolog of NCBI NO: 15221524 NR Description: nuclear matrix constituent protein 1 (NMCP1)
  misc_feature (27)..(769): Homolog of NCBI NO: 15220369 NR Description: nuclear matrix constituent protein 1 -related
  misc_feature (45)..(836): Homolog of NCBI NO: 18391490 NR Description: nuclear matrix constituent protein -related
  misc_feature (23)..(924): Homolog of NCBI NO: 7488926 NR Description: nuclear matrix constituent protein 1 - carrot
  misc_feature (19)..(729): Homolog of NCBI NO: 15220369 NR Description: nuclear matrix constituent protein 1 -related
  misc_feature (2)..(680): Homolog of NCBI NO: 18391490 NR Description: nuclear matrix constituent protein -related
  misc_feature (34)..(969): Homolog of NCBI NO: 7488926 NR Description: nuclear matrix constituent protein 1 - carrot
  misc_feature (19)..(769): Homolog of NCBI NO: 9828634 NR Description: F1N21.5 [Arabidopsis thaliana]
MWKRLKDAGFDEQSIKNRDKAALIAYIAKLESEVYDYQHNMGLLLLEKNELSSQYEEIKASVDESDLTHMREKSAYVSALAEAKKREESLKKDVGIAKECISSLEKTLHEMRAECAETKVSAGSTMSEAHVMIEDALKKLADAEAKMRAAEALQAEANRYHRIAERKLKEVESREDDLTRRLASFKSECETKENEMVIERQTLNERRKSLQQEHERLLDAQVSLNQREDHIFARSQELAELEKGLDTAKTTFEEERKAFEDKKSNLEIALALCAKREEVIKKISGRQDSNVFMFFFFFCKKQAVSERESSLLKKEQELLVAEEKIASKESELIQNVLANQEVILRKRKSDVEAELECKSKSVEVEIESKRRAWELREVDIKQREDLVGEKEHDLEVQSRALAEKEKDITEKSFNLDEKEKNLVATEEDINRKTTMLEDEKERLRKLDLELQQSLTSLEDKRKRVDSATQKLEALKSETSELSTLEMKLKEELDDLRAQKLEMLAEADRLKVEKAKFEAEWEHIDVKREELRKEAEYITRQREAFSMYLKDERDNIKEERDALRNQHKNDVESLNREREEFMNKMVEEHSEWLSKIQRERADFLLGIEMQKRELEYCIENKREELENSSRDREKAFEQEKKLEEERIQSLKEMAEKELEHVQVELKRLDAERLEIKLDRERREREWAELKDSVEELKVQREKLETQRHMLRAERDEIRHEIEELKKLENLKVALDDMSMAKMQLSNLERSWEKVSALKQKVVSRDDELDLQNGVSTVSNSEDGYNSSMERQNGLTPSSATPFSWIKRCTNLIFKTSPEKSTLMHHYEEEGGVPSEKLKLESSRREEKAYTEGLSIAVERLEAGRKRRGNTSGDETSEPSNNKKRKHDVTQKYSDEADTQSVISSPQNVPEDKHELPSSQTQTPSGMVVISETVKITRVTCETEVTNKVTTLDCSESPSEAGRKMGEETEDGDCNQTGINASETVIHNEAATEDICT

SEQ ID NO: 36910 - protein, 955 aa, Arabidopsis thaliana
  peptide (1)..(955): Ceres Seq. ID no. 13489120
  misc_feature (17)..(862): Pfam Name: Myosin tail Pfam Description: Myosin tail
  misc_feature (1)..(279): Homolog of NCBI NO: 15010714 NR Description: At1g13220/F3F19_25 [Arabidopsis thaliana]
  misc_feature (4)..(859): Homolog of NCBI NO: 15221524 NR Description: nuclear matrix constituent protein 1 (NMCP1)
  misc_feature (1)..(640): Homolog of NCBI NO: 15221524 NR Description: nuclear matrix constituent protein 1 (NMCP1)
  misc_feature (1)..(729): Homolog of NCBI NO: 15220369 NR Description: nuclear matrix constituent protein 1 -related
  misc_feature (5)..(796): Homolog of NCBI NO: 18391490 NR Description: nuclear matrix constituent protein -related
  misc_feature (1)..(884): Homolog of NCBI NO: 7488926 NR Description: nuclear matrix constituent protein 1 - carrot
  misc_feature (1)..(689): Homolog of NCBI NO: 15220369 NR Description: nuclear matrix constituent protein 1 -related
  misc_feature (1)..(640): Homolog of NCBI NO: 18391490 NR Description: nuclear matrix constituent protein -related
  misc_feature (1)..(929): Homolog of NCBI NO: 7488926 NR Description: nuclear matrix constituent protein 1 - carrot
  misc_feature (1)..(729): Homolog of NCBI NO: 9828634 NR Description: F1N21.5 [Arabidopsis thaliana]
MGLLLLEKNELSSQYEEIKASVDESDLTHMREKSAYVSALAEAKKREESLKKDVGIAKECISSLEKTLHEMRAECAETKVSAGSTMSEAHVMIEDALKKLADAEAKMRAAEALQAEANRYHRIAERKLKEVESREDDLTRRLASFKSECETKENEMVIERQTLNERRKSLQQEHERLLDAQVSLNQREDHIFARSQELAELEKGLDTAKTTFEEERKAFEDKKSNLEIALALCAKREEVIKKISGRQDSNVFMFFFFFCKKQAVSERESSLLKKEQELLVAEEKIASKESELIQNVLANQEVILRKRKSDVEAELECKSKSVEVEIESKRRAWELREVDIKQREDLVGEKEHDLEVQSRALAEKEKDITEKSFNLDEKEKNLVATEEDINRKTTMLEDEKERLRKLDLELQQSLTSLEDKRKRVDSATQKLEALKSETSELSTLEMKLKEELDDLRAQKLEMLAEADRLKVEKAKFEAEWEHIDVKREELRKEAEYITRQREAFSMYLKDERDNIKEERDALRNQHKNDVESLNREREEFMNKMVEEHSEWLSKIQRERADFLLGIEMQKRELEYCIENKREELENSSRDREKAFEQEKKLEEERIQSLKEMAEKELEHVQVELKRLDAERLEIKLDRERREREWAELKDSVEELKVQREKLETQRHMLRAERDEIRHEIEELKKLENLKVALDDMSMAKMQLSNLERSWEKVSALKQKVVSRDDELDLQNGVSTVSNSEDGYNSSMERQNGLTPSSATPFSWIKRCTNLIFKTSPEKSTLMHHYEEEGGVPSEKLKLESSRREEKAYTEGLSIAVERLEAGRKRRGNTSGDETSEPSNNKKRKHDVTQKYSDEADTQSVISSPQNVPEDKHELPSSQTQTPSGMVVISETVKITRVTCETEVTNKVTTLDCSESPSEAGRKMGEETEDGDCNQTGINASETVIHNEAATEDICT

SEQ ID NO: 36911 - DNA, 2078 bp, Arabidopsis thaliana
  misc_feature (1)..(2078): Ceres Seq. ID no. 12558671
  misc_feature: MA Experiment ID: 20000185 Result: Down-regulated in Transcription
  misc_feature: MA Experiment 20000185 PARAMETER Experiment Name: At_Roots__P Parameter: Age (day) Value: 7 vs. 21
  misc_feature: MA Experiment 20000185 PARAMETER Experiment Name: At_Roots__P Parameter: Organism Value: A. thaliana
  misc_feature: MA Experiment 20000185 PARAMETER Experiment Name: At_Roots__P Parameter: Tissue Value: Roots vs. Whole Plant
  misc_feature: MA Experiment ID: 20000211 Result: Up-regulated in Transcription
  misc_feature: MA Experiment 20000211 PARAMETER Experiment Name: At_0.001percent_MeJA__P Parameter: Age (day) Value: 14
  misc_feature: MA Experiment 20000211 PARAMETER Experiment Name: At_0.001percent_MeJA__P Parameter: Organism Value: A. thaliana
  misc_feature: MA Experiment 20000211 PARAMETER Experiment Name: At_0.001percent_MeJA__P Parameter: Plant Line Value: WS
  misc_feature: MA Experiment 20000211 PARAMETER Experiment Name: At_0.001percent_MeJA__P Parameter: Timepoint (hr) Value: 1
  misc_feature: MA Experiment 20000211 PARAMETER Experiment Name: At_0.001percent_MeJA__P Parameter: Tissue Value: Aerial
  misc_feature: MA Experiment 20000211 PARAMETER Experiment Name: At_0.001percent_MeJA__P Parameter: Treatment Value: 0.001percent MeJA vs. No Treatment
  misc_feature: MA Experiment ID: 20000438 Result: Down-regulated in Transcription
  misc_feature: MA Experiment 20000438 PARAMETER Experiment Name: At_Shoots__P Parameter: Age (day) Value: 14
  misc_feature: MA Experiment 20000438 PARAMETER Experiment Name: At_Shoots__P Parameter: Tissue Value: Shoots vs. Whole Plant
  misc_feature: MA Experiment ID: 20000439 Result: Down-regulated in Transcription
  misc_feature: MA Experiment 20000439 PARAMETER Experiment Name: At_Roots__P Parameter: Age (day) Value: 14 vs. 21
  misc_feature: MA Experiment 20000439 PARAMETER Experiment Name: At_Roots__P Parameter: Organism Value: A. thaliana
  misc_feature: MA Experiment 20000439 PARAMETER Experiment Name: At_Roots__P Parameter: Tissue Value: Roots vs. Whole Plant
  misc_feature: MA Experiment ID: 20000495 Result: Down-regulated in Transcription
  misc_feature: MA Experiment 20000495 PARAMETER Experiment Name: At_Guard_Cells_P Parameter: Harvest Date Value: 8/2/2002
  misc_feature: MA Experiment 20000495 PARAMETER Experiment Name: At_Guard_Cells_P Parameter: Organism Value: A. thaliana
  misc_feature: MA Experiment 20000495 PARAMETER Experiment Name: At_Guard_Cells_P Parameter: Tissue Value: Guard Cells vs. Leaves
  misc_feature: MA Experiment ID: 20000573 Result: Down-regulated in Transcription
  misc_feature: MA Experiment 20000573 PARAMETER Experiment Name: At_100uM_ABA_Mutants__P Parameter: Organism Value: A. thaliana
  misc_feature: MA Experiment 20000573 PARAMETER Experiment Name: At_100uM_ABA_Mutants__P Parameter: Plant Line Value: CS22 vs. Ler wt
  misc_feature: MA Experiment 20000573 PARAMETER Experiment Name: At_100uM_ABA_Mutants__P Parameter: Timepoint (hr) Value: N/A
  misc_feature: MA Experiment 20000573 PARAMETER Experiment Name: At_100uM_ABA_Mutants__P Parameter: Tissue Value: Whole Plant
  misc_feature: MA Experiment 20000573 PARAMETER Experiment Name: At_100uM_ABA_Mutants__P Parameter: Treatment Value: None
  misc_feature: MA Experiment ID: 20000574 Result: Down-regulated in Transcription
  misc_feature: MA Experiment 20000574 PARAMETER Experiment Name: At_100uM_ABA_Mutants__P Parameter: Organism Value: A. thaliana
  misc_feature: MA Experiment 20000574 PARAMETER Experiment Name: At_100uM_ABA_Mutants__P Parameter: Plant Line Value: CS23 vs. Ler wt
  misc_feature: MA Experiment 20000574 PARAMETER Experiment Name: At_100uM_ABA_Mutants__P Parameter: Timepoint (hr) Value: N/A
  misc_feature: MA Experiment 20000574 PARAMETER Experiment Name: At_100uM_ABA_Mutants__P Parameter: Tissue Value: Whole Plant
  misc_feature: MA Experiment 20000574 PARAMETER Experiment Name: At_100uM_ABA_Mutants__P Parameter: Treatment Value: None
  misc_feature: MA Experiment ID: 20000794 Result: Up-regulated in Transcription
  misc_feature: MA Experiment 20000794 PARAMETER Experiment Name: At_Petals_P Parameter: Age (day) Value: 23-25 days
  misc_feature: MA Experiment 20000794 PARAMETER Experiment Name: At_Petals_P Parameter: Plant Line Value: WS
  misc_feature: MA Experiment 20000794 PARAMETER Experiment Name: At_Petals_P Parameter: Tissue Value: Petals vs. Whole plant
  misc_feature: MA Experiment ID: 20001248 Result: Down-regulated in Transcription
  misc_feature: MA Experiment 20001248 PARAMETER Experiment Name: At_Far-red-induction_P Parameter: Age (day) Value: 7
  misc_feature: MA Experiment 20001248 PARAMETER Experiment Name: At_Far-red-induction_P Parameter: Light Value: Far-red vs. White
  misc_feature: MA Experiment 20001248 PARAMETER Experiment Name: At_Far-red-induction_P Parameter: Organism Value: A. thaliana
  misc_feature: MA Experiment 20001248 PARAMETER Experiment Name: At_Far-red-induction_P Parameter: Plant Line Value: Columbia
  misc_feature: MA Experiment 20001248 PARAMETER Experiment Name: At_Far-red-induction_P Parameter: Timepoint (hr) Value: 4
  misc_feature: MA Experiment 20001248 PARAMETER Experiment Name: At_Far-red-induction_P Parameter: Tissue Value: Whole Plant
  misc_feature: MA Experiment ID: 20001450 Result: Down-regulated in Transcription
  misc_feature: MA Experiment 20001450 PARAMETER Experiment Name: At_Far-red-induction_P Parameter: Age (day) Value: 7
  misc_feature: MA Experiment 20001450 PARAMETER Experiment Name: At_Far-red-induction_P Parameter: Light Value: Far-red vs. White
  misc_feature: MA Experiment 20001450 PARAMETER Experiment Name: At_Far-red-induction_P Parameter: Organism Value: A. thaliana
  misc_feature: MA Experiment 20001450 PARAMETER Experiment Name: At_Far-red-induction_P Parameter: Plant Line Value: Columbia
  misc_feature: MA Experiment 20001450 PARAMETER Experiment Name: At_Far-red-induction_P Parameter: Timepoint (hr) Value: 8
  misc_feature: MA Experiment 20001450 PARAMETER Experiment Name: At_Far-red-induction_P Parameter: Tissue Value: Whole Plant
  misc_feature: MA Experiment ID: 20001451 Result: Down-regulated in Transcription
  misc_feature: MA Experiment 20001451 PARAMETER Experiment Name: At_Far-red-induction_P Parameter: Age (day) Value: 7
  misc_feature: MA Experiment 20001451 PARAMETER Experiment Name: At_Far-red-induction_P Parameter: Light Value: Far-red vs. White
  misc_feature: MA Experiment 20001451 PARAMETER Experiment Name: At_Far-red-induction_P Parameter: Organism Value: A. thaliana
  misc_feature: MA Experiment 20001451 PARAMETER Experiment Name: At_Far-red-induction_P Parameter: Plant Line Value: Columbia
  misc_feature: MA Experiment 20001451 PARAMETER Experiment Name: At_Far-red-induction_P Parameter: Timepoint (hr) Value: 24
  misc_feature: MA Experiment 20001451 PARAMETER Experiment Name: At_Far-red-induction_P Parameter: Tissue Value: Whole Plant
gaagagcagagtcattcttaaccatagagacagaagagataagaatcataacaacaacaacaccaatcattacacacaggttgatactatggagagaaagcctcttgaggttgagccatctactacgacgactaacaccgatgtggtcgattctttcgaggaagagcagagaaaaatcgtttatagaggatggaaagtcatgccttttatcattggtaatgagacatttgagaagcttgggatcatagggacattatcaaaccttcttgtgtacctaacttctgtattcaaccttaagagctacacagctgcaactatcatcaatgcctttagtggtacaatcaatttcgggacttttattgctgcctttctttgcgacacttactttggtcgctacaagactctcagtgtcgctgtcatcgcttgttttctgggatcgtttgtgatactacttactgctgcaattccgtcgttgcaccccgttgcttgcggaaacaaaatctcgtgcgaagggccaagtgtgggacagatactgtttctgctcatgggtttaggctttcttgtggtaggcgctggtggtatcagaccgtgtaatttagcgtttggtgctgatcagttcaaccccaaatccgaatcaggaaagaaagggatcaacagtttcttcaactggtatttcttcactttcacgttcgcgcagatcatctcgctcacagcagttgtgtatatccagtcaaatgtgagttggacaatcggtttgatcattccggtggctcttatgttcttggcgtgtgtgattttctttgctggcgatagattgtatgtaaaagtgaaagcctcgggtagtccattggctggtattgctcgtgttatagcagccgcgatcaagaaacgaggtttgaagccggttaagcagccttgggtcaatctttacaaccatatcccgtctaactatgcaaatactactctaaaatacaccgaccagttcagatttctagacaaagcagcaattatgacccccgaggagaagttgaactccgatggaacggcttccgatccatggaaactatgcacgttgcagcaagtggaagaagtgaaatgcattgtaagagtgattccaatctggtttgcatccacgatatactaccttgcaataactatacaaatgacttatccggtcttccaagcgctccagagcgaccgacgattaggttctggtggcttcaggattcctgcggccacctatgtagtgttcttgatgactggcatgacagttttcatcatattctacgaccgtgtacttgtcccgtcgctcagaagagtgaccgggttagaaaccggtatatcactcttacaaagaatcggagctgggtttacatttgcgataatgagtttattagtttccgggtttatagaggaaaggagaagaaactttgcattgaccaaaccgacactcgggatggcgcctcggacaggagaaatctcatcaatgtcagcgttgtggctgattccgcagcttacacttgcaggcatagcagaagcttttgctgccattggacaaatggagttttactacaagcagtttcctgaaaacatgaagagcttcgcgggttctatcttttatgtcggtgcaggggtttcgagctacctcgctagcttcttgatatcaactgttcatcgaacaaccgcgcattcaccttcagggaattggttagctgaggatctgaacaaagcgaaattggattacttctacttcatgctcacaggactcatggttgttaacatggcttacttcttgttgatggctagatggtatagatacaaaggaggtaatgatgaagacatcactgagattgagaccaatgaagaagaaaccaagcaacagcagctacaagacaagaactctgtctgatctggaaacttatatatttttggtattctacttcaatctccgtagtttttcttcacccgaaatcaaccttgttgtacttttatagattaattgaagaagaaaatcacttcatctttgtagacatgtattgtaaaataagttttttgttgctaatttcaacctccgtacg

SEQ ID NO: 36912 - protein, 635 aa, Arabidopsis thaliana
  peptide (1)..(635): Ceres Seq. ID no. 12558672
  misc_feature (132)..(543): Pfam Name: POT family Pfam Description: POT family
  misc_feature (53)..(614): Homolog of NCBI NO: 15221883 NR Description: peptide transporter, putative
  misc_feature (30)..(633): Homolog of NCBI NO: 15241927 NR Description: peptide transporter; protein id: At5g62680.1
  misc_feature (30)..(370): Homolog of NCBI NO: 24417388 NR Description: unknown [Arabidopsis thaliana]
KSRVILNHRDRRDKNHNNNNTNHYTQVDTMERKPLEVEPSTTTTNTDVVDSFEEEQRKIVYRGWKVMPFIIGNETFEKLGIIGTLSNLLVYLTSVFNLKSYTAATIINAFSGTINFGTFIAAFLCDTYFGRYKTLSVAVIACFLGSFVILLTAAIPSLHPVACGNKISCEGPSVGQILFLLMGLGFLVVGAGGIRPCNLAFGADQFNPKSESGKKGINSFFNWYFFTFTFAQIISLTAVVYIQSNVSWTIGLIIPVALMFLACVIFFAGDRLYVKVKASGSPLAGIARVIAAAIKKRGLKPVKQPWVNLYNHIPSNYANTTLKYTDQFRFLDKAAIMTPEEKLNSDGTASDPWKLCTLQQVEEVKCIVRVIPIWFASTIYYLAITIQMTYPVFQALQSDRRLGSGGFRIPAATYVVFLMTGMTVFIIFYDRVLVPSLRRVTGLETGISLLQRIGAGFTFAIMSLLVSGFIEERRRNFALTKPTLGMAPRTGEISSMSALWLIPQLTLAGIAEAFAAIGQMEFYYKQFPENMKSFAGSIFYVGAGVSSYLASFLISTVHRTTAHSPSGNWLAEDLNKAKLDYFYFMLTGLMVVNMAYFLLMARWYRYKGGNDEDITEIETNEEETKQQQLQDKNSV

SEQ ID NO: 36913 - protein, 606 aa, Arabidopsis thaliana
  peptide (1)..(606): Ceres Seq. ID no. 12558673
  misc_feature (103)..(514): Pfam Name: POT family Pfam Description: POT family
  misc_feature (24)..(585): Homolog of NCBI NO: 15221883 NR Description: peptide transporter, putative
  misc_feature (1)..(604): Homolog of NCBI NO: 15241927 NR Description: peptide transporter; protein id: At5g62680.1
  misc_feature (1)..(341): Homolog of NCBI NO: 24417388 NR Description: unknown [Arabidopsis thaliana]
MERKPLEVEPSTTTTNTDVVDSFEEEQRKIVYRGWKVMPFIIGNETFEKLGIIGTLSNLLVYLTSVFNLKSYTAATIINAFSGTINFGTFIAAFLCDTYFGRYKTLSVAVIACFLGSFVILLTAAIPSLHPVACGNKISCEGPSVGQILFLLMGLGFLVVGAGGIRPCNLAFGADQFNPKSESGKKGINSFFNWYFFTFTFAQIISLTAVVYIQSNVSWTIGLIIPVALMFLACVIFFAGDRLYVKVKASGSPLAGIARVIAAAIKKRGLKPVKQPWVNLYNHIPSNYANTTLKYTDQFRFLDKAAIMTPEEKLNSDGTASDPWKLCTLQQVEEVKCIVRVIPIWFASTIYYLAITIQMTYPVFQALQSDRRLGSGGFRIPAATYVVFLMTGMTVFIIFYDRVLVPSLRRVTGLETGISLLQRIGAGFTFAIMSLLVSGFIEERRRNFALTKPTLGMAPRTGEISSMSALWLIPQLTLAGIAEAFAAIGQMEFYYKQFPENMKSFAGSIFYVGAGVSSYLASFLISTVHRTTAHSPSGNWLAEDLNKAKLDYFYFMLTGLMVVNMAYFLLMARWYRYKGGNDEDITEIETNEEETKQQQLQDKNSV

SEQ ID NO: 36914 - protein, 569 aa, Arabidopsis thaliana
  peptide (1)..(569): Ceres Seq. ID no. 12558674
  misc_feature (66)..(477): Pfam Name: POT family Pfam Description: POT family
  misc_feature (1)..(548): Homolog of NCBI NO: 15221883 NR Description: peptide transporter, putative
  misc_feature (1)..(567): Homolog of NCBI NO: 15241927 NR Description: peptide transporter; protein id: At5g62680.1
  misc_feature (1)..(304): Homolog of NCBI NO: 24417388 NR Description: unknown [Arabidopsis thaliana]
MPFIIGNETFEKLGIIGTLSNLLVYLTSVFNLKSYTAATIINAFSGTINFGTFIAAFLCDTYFGRYKTLSVAVIACFLGSFVILLTAAIPSLHPVACGNKISCEGPSVGQILFLLMGLGFLVVGAGGIRPCNLAFGADQFNPKSESGKKGINSFFNWYFFTFTFAQIISLTAVVYIQSNVSWTIGLIIPVALMFLACVIFFAGDRLYVKVKASGSPLAGIARVIAAAIKKRGLKPVKQPWVNLYNHIPSNYANTTLKYTDQFRFLDKAAIMTPEEKLNSDGTASDPWKLCTLQQVEEVKCIVRVIPIWFASTIYYLAITIQMTYPVFQALQSDRRLGSGGFRIPAATYVVFLMTGMTVFIIFYDRVLVPSLRRVTGLETGISLLQRIGAGFTFAIMSLLVSGFIEERRRNFALTKPTLGMAPRTGEISSMSALWLIPQLTLAGIAEAFAAIGQMEFYYKQFPENMKSFAGSIFYVGAGVSSYLASFLISTVHRTTAHSPSGNWLAEDLNKAKLDYFYFMLTGLMVVNMAYFLLMARWYRYKGGNDEDITEIETNEEETKQQQLQDKNSV

SEQ ID NO: 36915 - DNA, 4723 bp, Arabidopsis thaliana
  misc_feature (1)..(4723): Ceres Seq. ID no. 13491071
  misc_feature: MA Experiment ID: 108462 Result: Down-regulated in Transcription
  misc_feature: MA Experiment 108462 PARAMETER Experiment Name: At_Germinating_Seeds_cDNA_P Parameter: Age (day) Value: 2 vs. 0
  misc_feature: MA Experiment 108462 PARAMETER Experiment Name: At_Germinating_Seeds_cDNA_P Parameter: Tissue Value: Germinating Seeds
  misc_feature: MA Experiment ID: 20000264 Result: Up-regulated in Transcription
  misc_feature: MA Experiment 20000264 PARAMETER Experiment Name: At_Open_Flower_P Parameter: Age (day) Value: 21
  misc_feature: MA Experiment 20000264 PARAMETER Experiment Name: At_Open_Flower_P Parameter: Plant Line Value: WS
  misc_feature: MA Experiment 20000264 PARAMETER Experiment Name: At_Open_Flower_P Parameter: Tissue Value: Open Flower vs. Whole Plant
  misc_feature: MA Experiment ID: 20000495 Result: Up-regulated in Transcription
  misc_feature: MA Experiment 20000495 PARAMETER Experiment Name: At_Guard_Cells_P Parameter: Harvest Date Value: 8/2/2002
  misc_feature: MA Experiment 20000495 PARAMETER Experiment Name: At_Guard_Cells_P Parameter: Organism Value: A. thaliana
  misc_feature: MA Experiment 20000495 PARAMETER Experiment Name: At_Guard_Cells_P Parameter: Tissue Value: Guard Cells vs. Leaves
  misc_feature: MA Experiment ID: 20000794 Result: Up-regulated in Transcription
  misc_feature: MA Experiment 20000794 PARAMETER Experiment Name: At_Petals_P Parameter: Age (day) Value: 23-25 days
  misc_feature: MA Experiment 20000794 PARAMETER Experiment Name: At_Petals_P Parameter: Plant Line Value: WS
  misc_feature: MA Experiment 20000794 PARAMETER Experiment Name: At_Petals_P Parameter: Tissue Value: Petals vs. Whole plant
  misc_feature: MA Experiment ID: 20001757 Result: Down-regulated in Transcription
  misc_feature: MA Experiment 20001757 PARAMETER Experiment Name: At_50mM_NH4NO3_L-to-H_P Parameter: Timepoint (hr) Value: 6
  misc_feature: MA Experiment 20001757 PARAMETER Experiment Name: At_50mM_NH4NO3_L-to-H_P Parameter: Tissue Value: Leaf
  misc_feature: MA Experiment 20001757 PARAMETER Experiment Name: At_50mM_NH4NO3_L-to-H_P Parameter: Treatment Value: 50mM NH4NO3 vs 100mM Mannitol
  misc_feature: MA Experiment ID: 20001905 Result: Up-regulated in Transcription
  misc_feature: MA Experiment 20001905 PARAMETER Experiment Name: At_Drought_Reproduction_P Parameter: Age (day) Value: 40
  misc_feature: MA Experiment 20001905 PARAMETER Experiment Name: At_Drought_Reproduction_P Parameter: Organism Value: A. thaliana
  misc_feature: MA Experiment 20001905 PARAMETER Experiment Name: At_Drought_Reproduction_P Parameter: Plant Line Value: WS
  misc_feature: MA Experiment 20001905 PARAMETER Experiment Name: At_Drought_Reproduction_P Parameter: Timepoint (day) Value: 10
  misc_feature: MA Experiment 20001905 PARAMETER Experiment Name: At_Drought_Reproduction_P Parameter: Tissue Value: Rosettes
  misc_feature: MA Experiment 20001905 PARAMETER Experiment Name: At_Drought_Reproduction_P Parameter: Treatment Value: Drought vs. No Drought
ctctctctctctctatctctatctctcgatttgggggagttccgtcacggtggactagtacgtctcgttgccgttggtggcgtagtcggaattaatttcctcggcgttgagattcacatggtctagaattctagctaagtggttgttgttgttgttacgatttccgatttctcgagtttttttttttatatttagcttctgtttcgtttatccctcccggagacactccttggtcgaatctctcatgctgaggtgttttggacacttgttgtcaagaagaaaccagttttggttctgattaatcgttggttggaaaatatactcaattccaggccatgccttcacttcaactattgcagttaactgagcggggtcggggtcttgtagcgtcaagacggaaatctatactgcttgcggctgggattgtagctgctggtggaactgctgtttacctgaaatcaagggtcgcttcccggaggcctgattcttcgcgtctttgcaatggtcagagtgatgatgatgagactttggaaaagctgactgcaactgatcaaaatgcaaagataaccacgaaaaagaagaaaggaggaggattgaagtctcttcaggttctgactgctattcttctctctcagatgggaaaaatgggtgccagggatcttttggcactagtcgccaccgtggttttcagaacagctttgagcaatagattggcaaaagtgcaaggtttccttttccgtgctgctttcttaaggcgtgcgccactgtttctacggctcatctccgagaatattatgttgtgtttcatgctatcaacattgcactctacttcaaagtacataactggggcattgagtttgcgattcagaaagatattgaccaagattatccattcacactattttgagaatatggtatattacaaaatatcacacgtggatggtcggattacgcaccctgaacaaagaattgccagcgatgtaccaagattctcctcagagttgagcgatcttatactggatgatttgacggcggttactgatggaattttgtatgcatggcgcctgtgttcatatgctagtccaaaatacatcttctggatactggcctatgtactgggggctgggacggcgataagaaacttttctccttcttttgggaaattgatgtccaaggaacagcagttagaaggagagtaccggcaacttcattcacgcttaaggactcattcggaaagcatagcattctatggtggggaaaccagggaagaatctcatatacaacaaaagttcaagaatcttgttagccatatgagtcacgtgcttcatgatcactggtggtttggtatgatccaagattttctgctgaagtatcttggggccacagttgcagttattctgattatcgaaccattcttctctgggcatctaagacctgacgactcgaccttaggaagagctgagatgcttagcaatataagatatcacactagtgtcattatatctctctttcaggcgttgggaacactttctataagttccaggcggctcaaccgactcagtggttatgctgaccgaatccatgagttgatggctgtctcaagagaactcagtggtgatgataaatcgtctttccagagaaatagaagcagaaattatctaagtgaagctaattatgtagagttttccgatgtcaaggttgttactccaaccggaaatgttttggtggaggatctcacccttcgagttgagcaagggtctaatcttctgattacaggtcctaatggaagtggcaagagttcccttttccgagtattaggaggtctatggcccctggtgtctggacatattgtgaagccaggagttggttctgatcttaacaaggagatcttctatgtgccgcaacggccttatatggcagtaggaacacttcgtgaccagttaatatatcctcttacttctggccaagagagtgaactgctcactgagattggaatggtggagctattgaaaaatgttgatctagaatatttattggatcgctaccaacctgaaaaagaggttaattggggtgatgaattatctcttggagagcaacagagattgggtatggccagactattctaccacaaacccaaatttgcaattctagatgaatgcacaagtgctgtcacaactgatatggaagaacgctttgccgctaaggttcgagctatgggaacttcttgcataacaatctcccatcgtccagcgcttgttgcattccatgatgttgttctgtcattagacggtgaaggaggatggagtgttcattacaagagggatgactctgcccttctgacggatgctgaaattgattcagtgaaaagttcagatacagatcggcaaaatgatgcgatggttgttcaacgagcgtttgctgcagctagaaaggaatctgctactaattcaaaggctcagtcgtaccagacacagttaattgcaagatcacctgttgtagataaaagtgtagtgttgcctcgttttcctcaacctcaaacatcccaaagggctttaccatcaagagtagctgcaatgttaaacgtgttgatacccactatatttgacaagcaaggagctcaactgcttgctgttgcttgccttgtcgtctcaagaacgctgatctctgaccgaatagcctctttgaatgggaccactgtgaagtatgtcttggagcaagataaggcagcctttgttcgtttgattggtttgagtgttctccaaagtggtgcatcttctataattgctccttcactaaggcatttaacgcaaaggctagcgttagggtggaggattcgtttgactcaacatctgctaaggaactatttgagaaataatgcgttttacaaggttttccacatgtcaggcaatagtattgatgcggaccagagactcactcgtgacctggaaaagttaaccgctgacttgtctggacttcttactggaatggtaaagccatcggttgacattctctggttcacctggaggatgaagttactgactggtcagaggggagttgccatactttacacatatatgttacttggtcttggttttctgagacgtgttgctcccgatttcggtgatctagccggtgaagaacagcagcttgaagggaagtttcggtttatgcacgagaggctgaacactcatgctgaatctattgcattctttggaggtggagctcgagaaaaggctatggttgacaaaaaattcagggccctactggatcattctctcatgctcttgaggaagaaatggttgtatggcatacttgatgattttgtgacaaagcaacttcccaataatgtgacgtggggattgagtttattgtatgccctagaacacaagggagacagagcacttgtctccactcaaggtgaattggcacatgcattgcggtatctagcttctgttgtctcccaaagctttatggcttttggcgatattcttgaactacacaagaagttcctggagctctctggtggtattaacagaatttttgagctcgatgagtttttggatgcttctcagtcaggtgttacctcagaaaatcaaacaagtcgtttggattctcaagatctactttccttttcggaggtggatatcattacccctgctcagaaattgatggctagcaagttgtcgtgtgaaatagtttcagggaaaagcctgctcgtcacaggtccaaatggtagtggaaagacttcagtatttagagtccttagagatatctggcccactgtatgtggaagacttaccaaaccatcattggatatcaaagaacttgggtcagggaatggcatgttttttgtcccgcagcgaccttatacatgtttagggacactgagagatcaaattatataccctctatctaaagaagaagcagagaaaagggcagcaaagttgtacaccagtggagagagctcaacagaagctggaagcattctggattctcatttgaaaaccattctggagaatgttcggttagtttatctcttggaaagagacgtaggtggttgggatgctactaccaattgggaagacatattatctcttggagagcaacagagattaggcatggcacgtttattctttcacaggccgaagtttggagtccttgatgaatgcacaaatgcgacgagtgttgatgttgaggaacagctctatagagttgcacgagacatgggagtcactttcataacctcatcacaacggccggctctgatcccattccattccttggagctaaggctgattgatggagaaggaaactgggagctccgttcgatcgaacagacaacagagtgaactcagcaaaacatttttagaaaggtctatatagttgttaaagaaaaaagtaataaagttaaagccattagacgatgcaagctatatggtatgtagtatatggattcttcctcgatcgcaaggagtggaagagaatgcgtcgatgctagtgcttttgttagaattggaggatttgatttgattctagatatatataaatgtaggcgattgaattggtggagcattttgagttctcctatggagtatggtcttagctttgaacaaacaaagaatatagtgatcactcaaataatgtacagttcgtttcaatttcctttgttgggattagtttttctatcttataattaaaagaatgaaattgaagtggttgaatc

SEQ ID NO: 36916 - protein, 1337 aa, Arabidopsis thaliana
  peptide (1)..(1337): Ceres Seq. ID no. 13491072
  misc_feature (1123)..(1311): Pfam Name: ABC transporter Pfam Description: ABC transporter
  misc_feature (687)..(1198): Homolog of NCBI NO: 7487703 NR Description: hypothetical protein T5J17.20 - Arabidopsis
  misc_feature (110)..(665): Homolog of NCBI NO: 4506341 NR Description: ATP-binding cassette, sub-family D, member 3
  misc_feature (109)..(665): Homolog of NCBI NO: 12835990 NR Description: unnamed protein product [Mus musculus]
  misc_feature (109)..(665): Homolog of NCBI NO: 14318642 NR Description: ATP-binding cassette, sub-family D (ALD), member
  misc_feature (116)..(656): Homolog of NCBI NO: 19577352 NR Description: probable adrenoleukodystrophy protein
  misc_feature (109)..(665): Homolog of NCBI NO: 6981450 NR Description: ATP-binding cassette, sub-family D (ALD), member 3
  misc_feature (66)..(656): Homolog of NCBI NO: 27882317 NR Description: Similar to ATP-binding cassette, sub-family D
  misc_feature (1225)..(1330): Homolog of NCBI NO: 28195114 NR Description: putative ABC transporter [Oryza sativa (indica
  misc_feature (103)..(313): Homolog of NCBI NO: 7487703 NR Description: hypothetical protein T5J17.20 - Arabidopsis
  misc_feature (639)..(785): Homolog of NCBI NO: 27368893 NR Description: peroxisomal membrane protein ABC transporter
MPSLQLLQLTERGRGLVASRRKSILLAAGIVAAGGTAVYLKSRVASRRPDSSRLCNGQSDDDETLEKLTATDQNAKITTKKKKGGGLKSLQVLTAILLSQMGKMGARDLLALVATVVFRTALSNRLAKVQGFLFRAAFLRRAPLFLRLISENIMLCFMLSTLHSTSKYITGALSLRFRKILTKIIHSHYFENMVYYKISHVDGRITHPEQRIASDVPRFSSELSDLILDDLTAVTDGILYAWRLCSYASPKYIFWILAYVLGAGTAIRNFSPSFGKLMSKEQQLEGEYRQLHSRLRTHSESIAFYGGETREESHIQQKFKNLVSHMSHVLHDHWWFGMIQDFLLKYLGATVAVILIIEPFFSGHLRPDDSTLGRAEMLSNIRYHTSVIISLFQALGTLSISSRRLNRLSGYADRIHELMAVSRELSGDDKSSFQRNRSRNYLSEANYVEFSDVKVVTPTGNVLVEDLTLRVEQGSNLLITGPNGSGKSSLFRVLGGLWPLVSGHIVKPGVGSDLNKEIFYVPQRPYMAVGTLRDQLIYPLTSGQESELLTEIGMVELLKNVDLEYLLDRYQPEKEVNWGDELSLGEQQRLGMARLFYHKPKFAILDECTSAVTTDMEERFAAKVRAMGTSCITISHRPALVAFHDVVLSLDGEGGWSVHYKRDDSALLTDAEIDSVKSSDTDRQNDAMVVQRAFAAARKESATNSKAQSYQTQLIARSPVVDKSVVLPRFPQPQTSQRALPSRVAAMLNVLIPTIFDKQGAQLLAVACLVVSRTLISDRIASLNGTTVKYVLEQDKAAFVRLIGLSVLQSGASSIIAPSLRHLTQRLALGWRIRLTQHLLRNYLRNNAFYKVFHMSGNSIDADQRLTRDLEKLTADLSGLLTGMVKPSVDILWFTWRMKLLTGQRGVAILYTYMLLGLGFLRRVAPDFGDLAGEEQQLEGKFRFMHERLNTHAESIAFFGGGAREKAMVDKKFRALLDHSLMLLRKKWLYGILDDFVTKQLPNNVTWGLSLLYALEHKGDRALVSTQGELAHALRYLASVVSQSFMAFGDILELHKKFLELSGGINRIFELDEFLDASQSGVTSENQTSRLDSQDLLSFSEVDIITPAQKLMASKLSCEIVSGKSLLVTGPNGSGKTSVFRVLRDIWPTVCGRLTKPSLDIKELGSGNGMFFVPQRPYTCLGTLRDQIIYPLSKEEAEKRAAKLYTSGESSTEAGSILDSHLKTILENVRLVYLLERDVGGWDATTNWEDILSLGEQQRLGMARLFFHRPKFGVLDECTNATSVDVEEQLYRVARDMGVTFITSSQRPALIPFHSLELRLIDGEGNWELRSIEQTTE

SEQ ID NO: 36917 - protein, 1237 aa, Arabidopsis thaliana
  peptide (1)..(1237): Ceres Seq. ID no. 13491073
  misc_feature (1023)..(1211): Pfam Name: ABC transporter Pfam Description: ABC transporter
  misc_feature (587)..(1098): Homolog of NCBI NO: 7487703 NR Description: hypothetical protein T5J17.20 - Arabidopsis
  misc_feature (10)..(565): Homolog of NCBI NO: 4506341 NR Description: ATP-binding cassette, sub-family D, member 3
  misc_feature (9)..(565): Homolog of NCBI NO: 12835990 NR Description: unnamed protein product [Mus musculus]
  misc_feature (9)..(565): Homolog of NCBI NO: 14318642 NR Description: ATP-binding cassette, sub-family D (ALD), member
  misc_feature (16)..(556): Homolog of NCBI NO: 19577352 NR Description: probable adrenoleukodystrophy protein
  misc_feature (9)..(565): Homolog of NCBI NO: 6981450 NR Description: ATP-binding cassette, sub-family D (ALD), member 3
  misc_feature (1)..(556): Homolog of NCBI NO: 27882317 NR Description: Similar to ATP-binding cassette, sub-family D
  misc_feature (1125)..(1230): Homolog of NCBI NO: 28195114 NR Description: putative ABC transporter [Oryza sativa (indica
  misc_feature (3)..(213): Homolog of NCBI NO: 7487703 NR Description: hypothetical protein T5J17.20 - Arabidopsis
  misc_feature (539)..(685): Homolog of NCBI NO: 27368893 NR Description: peroxisomal membrane protein ABC transporter
MGKMGARDLLALVATVVFRTALSNRLAKVQGFLFRAAFLRRAPLFLRLISENIMLCFMLSTLHSTSKYITGALSLRFRKILTKIIHSHYFENMVYYKISHVDGRITHPEQRIASDVPRFSSELSDLILDDLTAVTDGILYAWRLCSYASPKYIFWILAYVLGAGTAIRNFSPSFGKLMSKEQQLEGEYRQLHSRLRTHSESIAFYGGETREESHIQQKFKNLVSHMSHVLHDHWWFGMIQDFLLKYLGATVAVILIIEPFFSGHLRPDDSTLGRAEMLSNIRYHTSVIISLFQALGTLSISSRRLNRLSGYADRIHELMAVSRELSGDDKSSFQRNRSRNYLSEANYVEFSDVKVVTPTGNVLVEDLTLRVEQGSNLLITGPNGSGKSSLFRVLGGLWPLVSGHIVKPGVGSDLNKEIFYVPQRPYMAVGTLRDQLIYPLTSGQESELLTEIGMVELLKNVDLEYLLDRYQPEKEVNWGDELSLGEQQRLGMARLFYHKPKFAILDECTSAVTTDMEERFAAKVRAMGTSCITISHRPALVAFHDVVLSLDGEGGWSVHYKRDDSALLTDAEIDSVKSSDTDRQNDAMVVQRAFAAARKESATNSKAQSYQTQLIARSPVVDKSVVLPRFPQPQTSQRALPSRVAAMLNVLIPTIFDKQGAQLLAVACLVVSRTLISDRIASLNGTTVKYVLEQDKAAFVRLIGLSVLQSGASSIIAPSLRHLTQRLALGWRIRLTQHLLRNYLRNNAFYKVFHMSGNSIDADQRLTRDLEKLTADLSGLLTGMVKPSVDILWFTWRMKLLTGQRGVAILYTYMLLGLGFLRRVAPDFGDLAGEEQQLEGKFRFMHERLNTHAESIAFFGGGAREKAMVDKKFRALLDHSLMLLRKKWLYGILDDFVTKQLPNNVTWGLSLLYALEHKGDRALVSTQGELAHALRYLASVVSQSFMAFGDILELHKKFLELSGGINRIFELDEFLDASQSGVTSENQTSRLDSQDLLSFSEVDIITPAQKLMASKLSCEIVSGKSLLVTGPNGSGKTSVFRVLRDIWPTVCGRLTKPSLDIKELGSGNGMFFVPQRPYTCLGTLRDQIIYPLSKEEAEKRAAKLYTSGESSTEAGSILDSHLKTILENVRLVYLLERDVGGWDATTNWEDILSLGEQQRLGMARLFFHRPKFGVLDECTNATSVDVEEQLYRVARDMGVTFITSSQRPALIPFHSLELRLIDGEGNWELRSIEQTTE

SEQ ID NO: 36918 - protein, 1234 aa, Arabidopsis thaliana
  peptide (1)..(1234): Ceres Seq. ID no. 13491074
  misc_feature (1020)..(1208): Pfam Name: ABC transporter Pfam Description: ABC transporter
  misc_feature (584)..(1095): Homolog of NCBI NO: 7487703 NR Description: hypothetical protein T5J17.20 - Arabidopsis
  misc_feature (7)..(562): Homolog of NCBI NO: 4506341 NR Description: ATP-binding cassette, sub-family D, member 3
  misc_feature (6)..(562): Homolog of NCBI NO: 12835990 NR Description: unnamed protein product [Mus musculus]
  misc_feature (6)..(562): Homolog of NCBI NO: 14318642 NR Description: ATP-binding cassette, sub-family D (ALD), member
  misc_feature (13)..(553): Homolog of NCBI NO: 19577352 NR Description: probable adrenoleukodystrophy protein
  misc_feature (6)..(562): Homolog of NCBI NO: 6981450 NR Description: ATP-binding cassette, sub-family D (ALD), member 3
  misc_feature (1)..(553): Homolog of NCBI NO: 27882317 NR Description: Similar to ATP-binding cassette, sub-family D
  misc_feature (1122)..(1227): Homolog of NCBI NO: 28195114 NR Description: putative ABC transporter [Oryza sativa (indica
  misc_feature (1)..(210): Homolog of NCBI NO: 7487703 NR Description: hypothetical protein T5J17.20 - Arabidopsis
  misc_feature (536)..(682): Homolog of NCBI NO: 27368893 NR Description: peroxisomal membrane protein ABC transporter
MGARDLLALVATVVFRTALSNRLAKVQGFLFRAAFLRRAPLFLRLISENIMLCFMLSTLHSTSKYITGALSLRFRKILTKIIHSHYFENMVYYKISHVDGRITHPEQRIASDVPRFSSELSDLILDDLTAVTDGILYAWRLCSYASPKYIFWILAYVLGAGTAIRNFSPSFGKLMSKEQQLEGEYRQLHSRLRTHSESIAFYGGETREESHIQQKFKNLVSHMSHVLHDHWWFGMIQDFLLKYLGATVAVILIIEPFFSGHLRPDDSTLGRAEMLSNIRYHTSVIISLFQALGTLSISSRRLNRLSGYADRIHELMAVSRELSGDDKSSFQRNRSRNYLSEANYVEFSDVKVVTPTGNVLVEDLTLRVEQGSNLLITGPNGSGKSSLFRVLGGLWPLVSGHIVKPGVGSDLNKEIFYVPQRPYMAVGTLRDQLIYPLTSGQESELLTEIGMVELLKNVDLEYLLDRYQPEKEVNWGDELSLGEQQRLGMARLFYHKPKFAILDECTSAVTTDMEERFAAKVRAMGTSCITISHRPALVAFHDVVLSLDGEGGWSVHYKRDDSALLTDAEIDSVKSSDTDRQNDAMVVQRAFAAARKESATNSKAQSYQTQLIARSPVVDKSVVLPRFPQPQTSQRALPSRVAAMLNVLIPTIFDKQGAQLLAVACLVVSRTLISDRIASLNGTTVKYVLEQDKAAFVRLIGLSVLQSGASSIIAPSLRHLTQRLALGWRIRLTQHLLRNYLRNNAFYKVFHMSGNSIDADQRLTRDLEKLTADLSGLLTGMVKPSVDILWFTWRMKLLTGQRGVAILYTYMLLGLGFLRRVAPDFGDLAGEEQQLEGKFRFMHERLNTHAESIAFFGGGAREKAMVDKKFRALLDHSLMLLRKKWLYGILDDFVTKQLPNNVTWGLSLLYALEHKGDRALVSTQGELAHALRYLASVVSQSFMAFGDILELHKKFLELSGGINRIFELDEFLDASQSGVTSENQTSRLDSQDLLSFSEVDIITPAQKLMASKLSCEIVSGKSLLVTGPNGSGKTSVFRVLRDIWPTVCGRLTKPSLDIKELGSGNGMFFVPQRPYTCLGTLRDQIIYPLSKEEAEKRAAKLYTSGESSTEAGSILDSHLKTILENVRLVYLLERDVGGWDATTNWEDILSLGEQQRLGMARLFFHRPKFGVLDECTNATSVDVEEQLYRVARDMGVTFITSSQRPALIPFHSLELRLIDGEGNWELRSIEQTTE

SEQ ID NO: 36919 - DNA, 1250 bp, Arabidopsis thaliana
  misc_feature (1)..(1250): Ceres Seq. ID no. 13491036
ctctctctctctctctcttctcgcttctcttctcctctccgatcttctctgtgaccctcttcttcttcgatttcctttgggtttcttctccgaatcgccggagaaaaaaacccttctttgaatctaaagagactgtttttttgaagctattgactgattgattgataaggaagaataagcattgatcgatctgaattttgggtacaagatgtcgagattcagagacaggacggaggatttcaaggattctgttcggaattccgctgtttcgataggttataatgagtctaaagtggcatcaacaatggcgtcttttattatacataagccaaaggagagatcgcctttcacgaaagctgctttcaaaacgcttgatagcatcaaggagttggaactgtttatgttgaagcatcgaaaggattatgttgatctgcaccggactacagaacaggaaaaggatagtattgaacaagaagttgctgcttttattaaagcttgcaaagaacagatcgatattctcataaacagtattagaaatgaagaagcaaactccaaaggatggcttggcctccccgcagataacttcaatgctgattctatagcacacaaacatggagtggttttgattctgagtgagaaacttcattcagtcactgcccagtttgatcagcttagagctactcgtttccaagatattataaacagagctatgccgagaagaaaacctaagagggtcataaaggaagctaccccaattaatacaactctgggaaattcggagtccatagaaccggatgaaatccaggcccaacctcgtagattacaacaacaacaacttctagacgatgaaacacaagcccttcaggtagagctaagtaatcttttagatggtgctaggcagacagaaactaagatggtggagatgtctgcattaaaccacttgatggcaactcatgttctgcagcaagcccaacagatagagtttctttatgaccaggcagttgaggcaacaaagaacgtggagcttggaaacaaagagctttctcaagcaatccaacgaaacagcagcagcagaacctttctcttactgtttttcttcgtccttactttctccgtcttgttcttggattggtacagttaaaaaaccattctccaacaacaacttcacacagtttttgtagattttgattgttaactataaattatgaaaatttggaaatgggtttaaatgttaaaacaaaaataatgag

SEQ ID NO: 36920 - protein, 310 aa, Arabidopsis thaliana
  peptide (1)..(310): Ceres Seq. ID no. 13491037
  misc_feature (256)..(309): Homolog of NCBI NO: 34878414 NR Description: similar to Syntaxin 18 [Rattus norvegicus]
  misc_feature (161)..(254): Homolog of NCBI NO: 34878414 NR Description: similar to Syntaxin 18 [Rattus norvegicus]
  misc_feature (28)..(307): Homolog of NCBI NO: 19075545 NR Description: putative snare complex protein; syntaxin like
  misc_feature (172)..(309): Homolog of NCBI NO: 30585223 NR Description: Homo sapiens syntaxin 18 [synthetic construct]
  misc_feature (172)..(309): Homolog of NCBI NO: 8394376 NR Description: syntaxin 18 [Homo sapiens]
  misc_feature (4)..(309): Homolog of NCBI NO: 18203931 NR Description: Stx18 protein [Mus musculus]
  misc_feature (1)..(310): Homolog of NCBI NO: 38346626 NR Description: OSJNBa0074L08.20 [Oryza sativa (japonica
  misc_feature (1)..(287): Homolog of NCBI NO: 25405495 NR Description: hypothetical protein F19C24.5 [imported] -
  misc_feature (1)..(310): Homolog of NCBI NO: 28380152 NR Description: Syntaxin 81 (AtSYP81)
  misc_feature (1)..(310): Homolog of NCBI NO: 18403653 NR Description: expressed protein [Arabidopsis thaliana]
MSRFRDRTEDFKDSVRNSAVSIGYNESKVASTMASFIIHKPKERSPFTKAAFKTLDSIKELELFMLKHRKDYVDLHRTTEQEKDSIEQEVAAFIKACKEQIDILINSIRNEEANSKGWLGLPADNFNADSIAHKHGVVLILSEKLHSVTAQFDQLRATRFQDIINRAMPRRKPKRVIKEATPINTTLGNSESIEPDEIQAQPRRLQQQQLLDDETQALQVELSNLLDGARQTETKMVEMSALNHLMATHVLQQAQQIEFLYDQAVEATKNVELGNKELSQAIQRNSSSRTFLLLFFFVLTFSVLFLDWYS

SEQ ID NO: 36921 - protein, 278 aa, Arabidopsis thaliana
  peptide (1)..(278): Ceres Seq. ID no. 13491038
  misc_feature (224)..(277): Homolog of NCBI NO: 34878414 NR Description: similar to Syntaxin 18 [Rattus norvegicus]
  misc_feature (129)..(222): Homolog of NCBI NO: 34878414 NR Description: similar to Syntaxin 18 [Rattus norvegicus]
  misc_feature (1)..(275): Homolog of NCBI NO: 19075545 NR Description: putative snare complex protein; syntaxin like
  misc_feature (140)..(277): Homolog of NCBI NO: 30585223 NR Description: Homo sapiens syntaxin 18 [synthetic construct]
  misc_feature (140)..(277): Homolog of NCBI NO: 8394376 NR Description: syntaxin 18 [Homo sapiens]
  misc_feature (1)..(277): Homolog of NCBI NO: 18203931 NR Description: Stx18 protein [Mus musculus]
  misc_feature (1)..(278): Homolog of NCBI NO: 38346626 NR Description: OSJNBa0074L08.20 [Oryza sativa (japonica
  misc_feature (1)..(255): Homolog of NCBI NO: 25405495 NR Description: hypothetical protein F19C24.5 [imported] -
  misc_feature (1)..(278): Homolog of NCBI NO: 28380152 NR Description: Syntaxin 81 (AtSYP81)
  misc_feature (1)..(278): Homolog of NCBI NO: 18403653 NR Description: expressed protein [Arabidopsis thaliana]
MASFIIHKPKERSPFTKAAFKTLDSIKELELFMLKHRKDYVDLHRTTEQEKDSIEQEVAAFIKACKEQIDILINSIRNEEANSKGWLGLPADNFNADSIAHKHGVVLILSEKLHSVTAQFDQLRATRFQDIINRAMPRRKPKRVIKEATPINTTLGNSESIEPDEIQAQPRRLQQQQLLDDETQALQVELSNLLDGARQTETKMVEMSALNHLMATHVLQQAQQIEFLYDQAVEATKNVELGNKELSQAIQRNSSSRTFLLLFFFVLTFSVLFLDWYS

SEQ ID NO: 36922 - protein, 246 aa, Arabidopsis thaliana
  peptide (1)..(246): Ceres Seq. ID no. 13491039
  misc_feature (192)..(245): Homolog of NCBI NO: 34878414 NR Description: similar to Syntaxin 18 [Rattus norvegicus]
  misc_feature (97)..(190): Homolog of NCBI NO: 34878414 NR Description: similar to Syntaxin 18 [Rattus norvegicus]
  misc_feature (1)..(243): Homolog of NCBI NO: 19075545 NR Description: putative snare complex protein; syntaxin like
  misc_feature (108)..(245): Homolog of NCBI NO: 30585223 NR Description: Homo sapiens syntaxin 18 [synthetic construct]
  misc_feature (108)..(245): Homolog of NCBI NO: 8394376 NR Description: syntaxin 18 [Homo sapiens]
  misc_feature (1)..(245): Homolog of NCBI NO: 18203931 NR Description: Stx18 protein [Mus musculus]
  misc_feature (1)..(246): Homolog of NCBI NO: 38346626 NR Description: OSJNBa0074L08.20 [Oryza sativa (japonica
  misc_feature (1)..(223): Homolog of NCBI NO: 25405495 NR Description: hypothetical protein F19C24.5 [imported] -
  misc_feature (1)..(246): Homolog of NCBI NO: 28380152 NR Description: Syntaxin 81 (AtSYP81)
  misc_feature (1)..(246): Homolog of NCBI NO: 18403653 NR Description: expressed protein [Arabidopsis thaliana]
MLKHRKDYVDLHRTTEQEKDSIEQEVAAFIKACKEQIDILINSIRNEEANSKGWLGLPADNFNADSIAHKHGVVLILSEKLHSVTAQFDQLRATRFQDIINRAMPRRKPKRVIKEATPINTTLGNSESIEPDEIQAQPRRLQQQQLLDDETQALQVELSNLLDGARQTETKMVEMSALNHLMATHVLQQAQQIEFLYDQAVEATKNVELGNKELSQAIQRNSSSRTFLLLFFFVLTFSVLFLDWYS

SEQ ID NO: 36923 - DNA, 915 bp, Arabidopsis thaliana
  misc_feature (1)..(915): Ceres Seq. ID no. 13592911
  misc_feature: MA Experiment ID: 20000184 Result: Down-regulated in Transcription
  misc_feature: MA Experiment 20000184 PARAMETER Experiment Name: At_Shoots__P Parameter: Age (day) Value: 7
  misc_feature: MA Experiment 20000184 PARAMETER Experiment Name: At_Shoots__P Parameter: Tissue Value: Shoots vs. Whole Plant
aacctctctttatttttgtttcttatattatagagaaaaagagctttttcccggaaagttgttctcatcttggaaaatcaaatctcggaaacgcagtcttcagctaaatcatgagcaacgagtacgattatctgttcaagcttttgttgatcggtgactcctctgttggaaaatcgtgtcttcttctccgattcgctgatgatgcttacattgacagctacataagcaccattggtgttgacttcaaaattaggacgattgagcaggatgggaagacgattaagctgcaaatttgggatactgctggacaggagcgtttcaggaccatcactagcagctattacagaggagctcatggaatcattattgtttatgactgtactgagatggaaagcttcaacaatgtgaagcagtggttgagtgagatcgatagatatgccaatgagagtgtttgcaagcttttaatcggtaacaagaatgatatggttgaaagcaaagttgtttccaccgaaactggaagggccttagcagatgagcttggaattccctttcttgagaccagtgccaaggattctattaacgttgaacaggcattcttaactattgctggcgagatcaaaaagaaaatgggaagccaaacgaatgcaaacaagacatctggtcctggaactgtccaaatgaaaggtcagccaatccaacagaacaatggcggttgctgcggtcagtagtttaaaaaatgttttaatcaaaactatctgagactctttttttacttcctttttaactaagtgttgtgaaaaccaatggctgtttaaaacaactaagaaatgtaatattccatgtcgctgtgtcttgaataagctatggtgttagttgcaagatacttcactttaatatagttcagtcttgactttg

SEQ ID NO: 36924 - protein, 205 aa, Arabidopsis thaliana
  peptide (1)..(205): Ceres Seq. ID no. 13592912
  misc_feature (10)..(171): Pfam Name: Ras family Pfam Description: Ras family
  misc_feature (1)..(203): Homolog of NCBI NO: 303750 NR Description: GTP-binding protein [Pisum sativum]
  misc_feature (1)..(203): Homolog of NCBI NO: 730510 NR Description: RAS-RELATED PROTEIN RIC1
  misc_feature (1)..(203): Homolog of NCBI NO: 34914060 NR Description: putative RIC1_ORYSA RAS-RELATED PROTEIN RIC1
  misc_feature (1)..(204): Homolog of NCBI NO: 541948 NR Description: GTP-binding protein rab1 - soybean
  misc_feature (1)..(204): Homolog of NCBI NO: 303748 NR Description: GTP-binding protein [Pisum sativum]
  misc_feature (1)..(204): Homolog of NCBI NO: 1370162 NR Description: RAB1A [Lotus japonicus]
  misc_feature (1)..(204): Homolog of NCBI NO: 7438373 NR Description: GTP-binding protein RAB1 - garden petunia
  misc_feature (1)..(204): Homolog of NCBI NO: 1053065 NR Description: small GTP-binding protein
  misc_feature (1)..(205): Homolog of NCBI NO: 7438392 NR Description: GTP-binding protein homolog - turnip
  misc_feature (1)..(205): Homolog of NCBI NO: 15229836 NR Description: GTP-binding protein, putative [Arabidopsis
MSNEYDYLFKLLLIGDSSVGKSCLLLRFADDAYIDSYISTIGVDFKIRTIEQDGKTIKLQIWDTAGQERFRTITSSYYRGAHGIIIVYDCTEMESFNNVKQWLSEIDRYANESVCKLLIGNKNDMVESKVVSTETGRALADELGIPFLETSAKDSINVEQAFLTIAGEIKKKMGSQTNANKTSGPGTVQMKGQPIQQNNGGCCGQ

SEQ ID NO: 36925 - protein, 113 aa, Arabidopsis thaliana
  peptide (1)..(113): Ceres Seq. ID no. 13592913
  misc_feature (1)..(79): Pfam Name: Ras family Pfam Description: Ras family
  misc_feature (1)..(111): Homolog of NCBI NO: 303750 NR Description: GTP-binding protein [Pisum sativum]
  misc_feature (1)..(111): Homolog of NCBI NO: 730510 NR Description: RAS-RELATED PROTEIN RIC1
  misc_feature (1)..(111): Homolog of NCBI NO: 34914060 NR Description: putative RIC1_ORYSA RAS-RELATED PROTEIN RIC1
  misc_feature (1)..(112): Homolog of NCBI NO: 541948 NR Description: GTP-binding protein rab1 - soybean
  misc_feature (1)..(112): Homolog of NCBI NO: 303748 NR Description: GTP-binding protein [Pisum sativum]
  misc_feature (1)..(112): Homolog of NCBI NO: 1370162 NR Description: RAB1A [Lotus japonicus]
  misc_feature (1)..(112): Homolog of NCBI NO: 7438373 NR Description: GTP-binding protein RAB1 - garden petunia
  misc_feature (1)..(112): Homolog of NCBI NO: 1053065 NR Description: small GTP-binding protein
  misc_feature (1)..(113): Homolog of NCBI NO: 7438392 NR Description: GTP-binding protein homolog - turnip
  misc_feature (1)..(113): Homolog of NCBI NO: 15229836 NR Description: GTP-binding protein, putative [Arabidopsis
MESFNNVKQWLSEIDRYANESVCKLLIGNKNDMVESKVVSTETGRALADELGIPFLETSAKDSINVEQAFLTIAGEIKKKMGSQTNANKTSGPGTVQMKGQPIQQNNGGCCGQ

SEQ ID NO: 36926 - DNA, 986 bp, Arabidopsis thaliana
  misc_feature (1)..(986): Ceres Seq. ID no. 12393802
  misc_feature: MA Experiment ID: 108595 Result: Down-regulated in Transcription
  misc_feature: MA Experiment 108595 PARAMETER Experiment Name: At_Ler-pi_Ovule_cDNA_P Parameter: Plant Line Value: null
  misc_feature: MA Experiment ID: 20000090 Result: Down-regulated in Transcription
  misc_feature: MA Experiment ID: 20000438 Result: Up-regulated in Transcription
  misc_feature: MA Experiment 20000438 PARAMETER Experiment Name: At_Shoots__P Parameter: Age (day) Value: 14
  misc_feature: MA Experiment 20000438 PARAMETER Experiment Name: At_Shoots__P Parameter: Tissue Value: Shoots vs. Whole Plant
aatcggcaaaattttctgctcctgagaaacaagtagagatactaaagatggaatctttgaactaaattcgaaaccttttaatgggtaccgagtcgggttcggatccagaatcgagctcaaacgggtggagccgtgctcgtggtctagttgtcaagactctggttttaattggcggtgctcttctcatcaagcgtctcactaaatccaccactcgtagagatcacgcccgtgtcgtctctcgttctctcaccggagagaagtttacgagggagcaagcgtcaagagatcctgataattacttcaacataagaatgctgagttgtccagctgctgaaatggtggatggttcagaggttttgtatctcgaacaggcattttggaggactcctcagaaaccgtttcgacaaagattatatatggtgaaaccgtgtccaaaagagctaaaatgtgatgttgaggtaagttcatatgcgatcagagatgctgaggaatacaaaaatttctgtgaccggcctaaggaccaacgcccacttcctgaagaagttattggtgacattggagagcatttgacgactatacacctgaattgttgtgaccgtgggaaacgttgcttgtacgaaggctcaacttcacctggtggatttccaaattcatggaacggggctagctattgtacttcagatcttgcagttctgaaaaacaatgagatacacctctgggatcgcggctttgatgagaatcgaaaccaggtttggggaccaaaggaaggtccgtacgagttcaagccagcgacatcatcgagcatcaacgaaaacttgtctgctttgaacatcctttatcaatcttctatcgataaaccaatccaagggtccctcatcttgcaagactagccaatttgcacccccttttctattgtctgatcttctctgtatcacacttagcctctttattcatctcatctcagccactttcaatatagttttggt

SEQ ID NO: 36927 - protein, 269 aa, Arabidopsis thaliana
  peptide (1)..(269): Ceres Seq. ID no. 12393803
  misc_feature (44)..(238): Homolog of NCBI NO: 37520007 NR Description: hypothetical protein glr0438 [Gloeobacter
  misc_feature (1)..(269): Homolog of NCBI NO: 21554618 NR Description: unknown [Arabidopsis thaliana]
  misc_feature (1)..(269): Homolog of NCBI NO: 15241343 NR Description: putative protein
MGTESGSDPESSSNGWSRARGLVVKTLVLIGGALLIKRLTKSTTRRDHARVVSRSLTGEKFTREQASRDPDNYFNIRMLSCPAAEMVDGSEVLYLEQAFWRTPQKPFRQRLYMVKPCPKELKCDVEVSSYAIRDAEEYKNFCDRPKDQRPLPEEVIGDIGEHLTTIHLNCCDRGKRCLYEGSTSPGGFPNSWNGASYCTSDLAVLKNNEIHLWDRGFDENRNQVWGPKEGPYEFKPATSSSINENLSALNILYQSSIDKPIQGSLILQD

SEQ ID NO: 36928 - protein, 192 aa, Arabidopsis thaliana
  peptide (1)..(192): Ceres Seq. ID no. 12393804
  misc_feature (1)..(161): Homolog of NCBI NO: 37520007 NR Description: hypothetical protein glr0438 [Gloeobacter
  misc_feature (1)..(192): Homolog of NCBI NO: 21554618 NR Description: unknown [Arabidopsis thaliana]
  misc_feature (1)..(192): Homolog of NCBI NO: 15241343 NR Description: putative protein
MLSCPAAEMVDGSEVLYLEQAFWRTPQKPFRQRLYMVKPCPKELKCDVEVSSYAIRDAEEYKNFCDRPKDQRPLPEEVIGDIGEHLTTIHLNCCDRGKRCLYEGSTSPGGFPNSWNGASYCTSDLAVLKNNEIHLWDRGFDENRNQVWGPKEGPYEFKPATSSSINENLSALNILYQSSIDKPIQGSLILQD

SEQ ID NO: 36929 - protein, 184 aa, Arabidopsis thaliana
  peptide (1)..(184): Ceres Seq. ID no. 12393805
  misc_feature (1)..(153): Homolog of NCBI NO: 37520007 NR Description: hypothetical protein glr0438 [Gloeobacter
  misc_feature (1)..(184): Homolog of NCBI NO: 21554618 NR Description: unknown [Arabidopsis thaliana]
  misc_feature (1)..(184): Homolog of NCBI NO: 15241343 NR Description: putative protein
MVDGSEVLYLEQAFWRTPQKPFRQRLYMVKPCPKELKCDVEVSSYAIRDAEEYKNFCDRPKDQRPLPEEVIGDIGEHLTTIHLNCCDRGKRCLYEGSTSPGGFPNSWNGASYCTSDLAVLKNNEIHLWDRGFDENRNQVWGPKEGPYEFKPATSSSINENLSALNILYQSSIDKPIQGSLILQD

SEQ ID NO: 36930 - DNA, 717 bp, Arabidopsis thaliana
  misc_feature (1)..(717): Ceres Seq. ID no. 12420495
  misc_feature: MA Experiment ID: 108462 Result: Down-regulated in Transcription
  misc_feature: MA Experiment 108462 PARAMETER Experiment Name: At_Germinating_Seeds_cDNA_P Parameter: Age (day) Value: 2 vs. 0
  misc_feature: MA Experiment 108462 PARAMETER Experiment Name: At_Germinating_Seeds_cDNA_P Parameter: Tissue Value: Germinating Seeds
  misc_feature: MA Experiment ID: 108572 Result: Down-regulated in Transcription
  misc_feature: MA Experiment 108572 PARAMETER Experiment Name: At_Drought_cDNA_P Parameter: Timepoint (hr) Value: 1
  misc_feature: MA Experiment 108572 PARAMETER Experiment Name: At_Drought_cDNA_P Parameter: Tissue Value: Aerial
  misc_feature: MA Experiment 108572 PARAMETER Experiment Name: At_Drought_cDNA_P Parameter: Treatment Value: Drought vs. No Drought
  misc_feature: MA Experiment ID: 108573 Result: Down-regulated in Transcription
  misc_feature: MA Experiment 108573 PARAMETER Experiment Name: At_Drought_cDNA_P Parameter: Timepoint (hr) Value: 6
  misc_feature: MA Experiment 108573 PARAMETER Experiment Name: At_Drought_cDNA_P Parameter: Tissue Value: Aerial
  misc_feature: MA Experiment 108573 PARAMETER Experiment Name: At_Drought_cDNA_P Parameter: Treatment Value: Drought vs. No Drought
  misc_feature: MA Experiment ID: 108577 Result: Down-regulated in Transcription
  misc_feature: MA Experiment 108577 PARAMETER Experiment Name: At_42deg_Heat_cDNA_P Parameter: Temperature (deg C) Value: 42 vs. 22
  misc_feature: MA Experiment 108577 PARAMETER Experiment Name: At_42deg_Heat_cDNA_P Parameter: Timepoint (hr) Value: 6
  misc_feature: MA Experiment 108577 PARAMETER Experiment Name: At_42deg_Heat_cDNA_P Parameter: Tissue Value: Aerial
  misc_feature: MA Experiment ID: 108605 Result: Down-regulated in Transcription
  misc_feature: MA Experiment 108605 PARAMETER Experiment Name: At_100uM_ABA_cDNA_P Parameter: Timepoint (hr) Value: 6
  misc_feature: MA Experiment 108605 PARAMETER Experiment Name: At_100uM_ABA_cDNA_P Parameter: Tissue Value: Aerial
  misc_feature: MA Experiment 108605 PARAMETER Experiment Name: At_100uM_ABA_cDNA_P Parameter: Treatment Value: 100uM ABA vs. No Treatment
  misc_feature: MA Experiment ID: 108607 Result: Down-regulated in Transcription
  misc_feature: MA Experiment 108607 PARAMETER Experiment Name: At_100uM_ABA_cDNA_P Parameter: Timepoint (hr) Value: 4
  misc_feature: MA Experiment 108607 PARAMETER Experiment Name: At_100uM_ABA_cDNA_P Parameter: Tissue Value: Aerial
  misc_feature: MA Experiment 108607 PARAMETER Experiment Name: At_100uM_ABA_cDNA_P Parameter: Treatment Value: 100uM ABA vs. No Treatment
  misc_feature: MA Experiment ID: 20000069 Result: Up-regulated in Transcription
  misc_feature: MA Experiment 20000069 PARAMETER Experiment Name: At_100uM_ABA_Mutants_cDNA_P Parameter: Plant Line Value: CS23
  misc_feature: MA Experiment 20000069 PARAMETER Experiment Name: At_100uM_ABA_Mutants_cDNA_P Parameter: Timepoint (hr) Value: 6
  misc_feature: MA Experiment 20000069 PARAMETER Experiment Name: At_100uM_ABA_Mutants_cDNA_P Parameter: Tissue Value: Aerial
  misc_feature: MA Experiment 20000069 PARAMETER Experiment Name: At_100uM_ABA_Mutants_cDNA_P Parameter: Treatment Value: 100uM ABA vs. No Treatment
  misc_feature: MA Experiment ID: 20000070 Result: Up-regulated in Transcription
  misc_feature: MA Experiment 20000070 PARAMETER Experiment Name: At_100uM_ABA_Mutants_cDNA_P Parameter: Plant Line Value: CS24
  misc_feature: MA Experiment 20000070 PARAMETER Experiment Name: At_100uM_ABA_Mutants_cDNA_P Parameter: Timepoint (hr) Value: 6
  misc_feature: MA Experiment 20000070 PARAMETER Experiment Name: At_100uM_ABA_Mutants_cDNA_P Parameter: Tissue Value: Aerial
  misc_feature: MA Experiment 20000070 PARAMETER Experiment Name: At_100uM_ABA_Mutants_cDNA_P Parameter: Treatment Value: 100uM ABA vs. No Treatment
  misc_feature: MA Experiment ID: 20000071 Result: Up-regulated in Transcription
  misc_feature: MA Experiment 20000071 PARAMETER Experiment Name: At_100uM_ABA_Mutants_cDNA_P Parameter: Plant Line Value: CS8104
  misc_feature: MA Experiment 20000071 PARAMETER Experiment Name: At_100uM_ABA_Mutants_cDNA_P Parameter: Timepoint (hr) Value: 6
  misc_feature: MA Experiment 20000071 PARAMETER Experiment Name: At_100uM_ABA_Mutants_cDNA_P Parameter: Tissue Value: Aerial
  misc_feature: MA Experiment 20000071 PARAMETER Experiment Name: At_100uM_ABA_Mutants_cDNA_P Parameter: Treatment Value: 100uM ABA vs. No Treatment
  misc_feature: MA Experiment ID: 20000086 Result: Up-regulated in Transcription
  misc_feature: MA Experiment 20000086 PARAMETER Experiment Name: At_100uM_ABA_Mutants_cDNA_P Parameter: Plant Line Value: CS22
  misc_feature: MA Experiment 20000086 PARAMETER Experiment Name: At_100uM_ABA_Mutants_cDNA_P Parameter: Timepoint (hr) Value: 6
  misc_feature: MA Experiment 20000086 PARAMETER Experiment Name: At_100uM_ABA_Mutants_cDNA_P Parameter: Tissue Value: Aerial
  misc_feature: MA Experiment 20000086 PARAMETER Experiment Name: At_100uM_ABA_Mutants_cDNA_P Parameter: Treatment Value: 100uM ABA vs. No Treatment
  misc_feature: MA Experiment ID: 20000087 Result: Up-regulated in Transcription
  misc_feature: MA Experiment 20000087 PARAMETER Experiment Name: At_100uM_ABA_Mutants_cDNA_P Parameter: Plant Line Value: WS
  misc_feature: MA Experiment 20000087 PARAMETER Experiment Name: At_100uM_ABA_Mutants_cDNA_P Parameter: Timepoint (hr) Value: 6
  misc_feature: MA Experiment 20000087 PARAMETER Experiment Name: At_100uM_ABA_Mutants_cDNA_P Parameter: Tissue Value: Aerial
  misc_feature: MA Experiment 20000087 PARAMETER Experiment Name: At_100uM_ABA_Mutants_cDNA_P Parameter: Treatment Value: 100uM ABA vs. No Treatment
  misc_feature: MA Experiment ID: 20000088 Result: Up-regulated in Transcription
  misc_feature: MA Experiment 20000088 PARAMETER Experiment Name: At_100uM_ABA_Mutants_cDNA_P Parameter: Plant Line Value: Landsberg
  misc_feature: MA Experiment 20000088 PARAMETER Experiment Name: At_100uM_ABA_Mutants_cDNA_P Parameter: Timepoint (hr) Value: 6
  misc_feature: MA Experiment 20000088 PARAMETER Experiment Name: At_100uM_ABA_Mutants_cDNA_P Parameter: Tissue Value: Aerial
  misc_feature: MA Experiment 20000088 PARAMETER Experiment Name: At_100uM_ABA_Mutants_cDNA_P Parameter: Treatment Value: 100uM ABA vs. No Treatment
  misc_feature: MA Experiment ID: 20000089 Result: Up-regulated in Transcription
  misc_feature: MA Experiment ID: 20000090 Result: Up-regulated in Transcription
  misc_feature: MA Experiment ID: 20000111 Result: Down-regulated in Transcription
  misc_feature: MA Experiment 20000111 PARAMETER Experiment Name: At_42deg_Heat_cDNA_P Parameter: Temperature (deg C) Value: 42 vs. 22
  misc_feature: MA Experiment 20000111 PARAMETER Experiment Name: At_42deg_Heat_cDNA_P Parameter: Timepoint (hr) Value: 6
  misc_feature: MA Experiment 20000111 PARAMETER Experiment Name: At_42deg_Heat_cDNA_P Parameter: Tissue Value: Aerial
  misc_feature: MA Experiment ID: 20000113 Result: Down-regulated in Transcription
  misc_feature: MA Experiment 20000113 PARAMETER Experiment Name: At_42deg_Heat_cDNA_P Parameter: Temperature (deg C) Value: 42 vs. 22
  misc_feature: MA Experiment 20000113 PARAMETER Experiment Name: At_42deg_Heat_cDNA_P Parameter: Timepoint (hr) Value: 8
  misc_feature: MA Experiment 20000113 PARAMETER Experiment Name: At_42deg_Heat_cDNA_P Parameter: Tissue Value: Aerial
  misc_feature: MA Experiment ID: 20000173 Result: Down-regulated in Transcription
  misc_feature: MA Experiment 20000173 PARAMETER Experiment Name: At_42deg_Heat_P Parameter: Age (day) Value: 14
  misc_feature: MA Experiment 20000173 PARAMETER Experiment Name: At_42deg_Heat_P Parameter: Organism Value: A. thaliana
  misc_feature: MA Experiment 20000173 PARAMETER Experiment Name: At_42deg_Heat_P Parameter: Plant Line Value: WS
  misc_feature: MA Experiment 20000173 PARAMETER Experiment Name: At_42deg_Heat_P Parameter: Temperature (deg C) Value: 42 vs. 22
  misc_feature: MA Experiment 20000173 PARAMETER Experiment Name: At_42deg_Heat_P Parameter: Timepoint (hr) Value: 6
  misc_feature: MA Experiment 20000173 PARAMETER Experiment Name: At_42deg_Heat_P Parameter: Tissue Value: Aerial
  misc_feature: MA Experiment ID: 20000213 Result: Up-regulated in Transcription
  misc_feature: MA Experiment 20000213 PARAMETER Experiment Name: At_4deg_Cold_P Parameter: Timepoint (hr) Value: 2
  misc_feature: MA Experiment ID: 20000453 Result: Down-regulated in Transcription
  misc_feature: MA Experiment 20000453 PARAMETER Experiment Name: At_100uM_ABA_P Parameter: Age (day) Value: 15
  misc_feature: MA Experiment 20000453 PARAMETER Experiment Name: At_100uM_ABA_P Parameter: Organism Value: A. thaliana
  misc_feature: MA Experiment 20000453 PARAMETER Experiment Name: At_100uM_ABA_P Parameter: Plant Line Value: WS
  misc_feature: MA Experiment 20000453 PARAMETER Experiment Name: At_100uM_ABA_P Parameter: Timepoint (hr) Value: 24
  misc_feature: MA Experiment 20000453 PARAMETER Experiment Name: At_100uM_ABA_P Parameter: Tissue Value: Aerial
  misc_feature: MA Experiment 20000453 PARAMETER Experiment Name: At_100uM_ABA_P Parameter: Treatment Value: 100uM ABA vs. No Treatment
  misc_feature: MA Experiment ID: 20001247 Result: Down-regulated in Transcription
  misc_feature: MA Experiment 20001247 PARAMETER Experiment Name: At_Far-red-induction_P Parameter: Age (day) Value: 7
  misc_feature: MA Experiment 20001247 PARAMETER Experiment Name: At_Far-red-induction_P Parameter: Light Value: Far-red vs. White
  misc_feature: MA Experiment 20001247 PARAMETER Experiment Name: At_Far-red-induction_P Parameter: Organism Value: A. thaliana
  misc_feature: MA Experiment 20001247 PARAMETER Experiment Name: At_Far-red-induction_P Parameter: Plant Line Value: Columbia
  misc_feature: MA Experiment 20001247 PARAMETER Experiment Name: At_Far-red-induction_P Parameter: Timepoint (hr) Value: 1
  misc_feature: MA Experiment 20001247 PARAMETER Experiment Name: At_Far-red-induction_P Parameter: Tissue Value: Whole Plant
  misc_feature: MA Experiment ID: 20001248 Result: Up-regulated in Transcription
  misc_feature: MA Experiment 20001248 PARAMETER Experiment Name: At_Far-red-induction_P Parameter: Age (day) Value: 7
  misc_feature: MA Experiment 20001248 PARAMETER Experiment Name: At_Far-red-induction_P Parameter: Light Value: Far-red vs. White
  misc_feature: MA Experiment 20001248 PARAMETER Experiment Name: At_Far-red-induction_P Parameter: Organism Value: A. thaliana
  misc_feature: MA Experiment 20001248 PARAMETER Experiment Name: At_Far-red-induction_P Parameter: Plant Line Value: Columbia
  misc_feature: MA Experiment 20001248 PARAMETER Experiment Name: At_Far-red-induction_P Parameter: Timepoint (hr) Value: 4
  misc_feature: MA Experiment 20001248 PARAMETER Experiment Name: At_Far-red-induction_P Parameter: Tissue Value: Whole Plant
  misc_feature: MA Experiment ID: 20001557 Result: Up-regulated in Transcription
  misc_feature: MA Experiment 20001557 PARAMETER Experiment Name: At_Drought_Soil_Dry_P Parameter: Age (day) Value: 27
  misc_feature: MA Experiment 20001557 PARAMETER Experiment Name: At_Drought_Soil_Dry_P Parameter: Organism Value: A. thaliana
  misc_feature: MA Experiment 20001557 PARAMETER Experiment Name: At_Drought_Soil_Dry_P Parameter: Plant Line Value: WS
  misc_feature: MA Experiment 20001557 PARAMETER Experiment Name: At_Drought_Soil_Dry_P Parameter: Post Timepoint (hr) Value: 3
  misc_feature: MA Experiment 20001557 PARAMETER Experiment Name: At_Drought_Soil_Dry_P Parameter: Post-Treatment Value: Re-Water vs. No Drought
  misc_feature: MA Experiment 20001557 PARAMETER Experiment Name: At_Drought_Soil_Dry_P Parameter: Timepoint (day) Value: 13
  misc_feature: MA Experiment 20001557 PARAMETER Experiment Name: At_Drought_Soil_Dry_P Parameter: Treatment Value: Drought vs. No Drought
ataagtctctctcttacattttgaaaccctaatttctcaaaaaaaatgtctgaagttgagtaccggtgctttgtcggcggccttgcctgggccaccaatgatgaagatcttcaaaggacgttctcacagttcggcgacgttgtcgattctaagatcattaacgaccgagagagtggaagatcaaggggattcggattcgtcaccttcaaggacgagaaagccatgagggatgcgattgaagagatgaacggtaaagagctcgatggacgtgtcatcaccgtgaacgaggctcagtcgagaggtagcggcggtggcggaggaggccgtggtggaagcggtggtggttaccgcagcggaggcggtggtggatactcaggaggcggtggtggttacgagagacgtagcggaggttacggatctggtggaggcggtggtggccgaggatacggtggtggtggacgccgtgagggaggtggctacggaggcggtgatggtggaagttacggcggcggtggtggcggctggtaatcaaagatagagttttttgcgtgctgctgctctgtttttggtttagatttggatttgtgtcaccacttctggtttggttatcgttcgtttggtttacttttttgatgaaacagtttcgtttaagtcttctttgtctggatcgaaatgttaattcgcgtgttgtttactaaatttataacgtttcctttt

SEQ ID NO: 36931 - protein, 160 aa, Arabidopsis thaliana
  peptide (1)..(160): Ceres Seq. ID no. 12420496
  misc_feature (8)..(79): Pfam Name: RNA recognition motif. (a.k.a. RRM, RBD, or RNP domain) Pfam Description: RNA recognition motif. (a.k.a. RRM, RBD, or RNP
  misc_feature (1)..(160): Homolog of NCBI NO: 2119042 NR Description: glycine-rich RNA-binding protein RGP-1a - wood
  misc_feature (1)..(159): Homolog of NCBI NO: 544426 NR Description: Glycine-rich RNA-binding protein
  misc_feature (3)..(160): Homolog of NCBI NO: 30681492 NR Description: glycine-rich RNA-binding protein (AtGRP7)
  misc_feature (1)..(131): Homolog of NCBI NO: 30692254 NR Description: glycine-rich RNA-binding protein 8 (GRP8) (CCR1)
  misc_feature (3)..(160): Homolog of NCBI NO: 1346180 NR Description: Glycine-rich RNA-binding protein GRP1A
  misc_feature (3)..(160): Homolog of NCBI NO: 21553354 NR Description: glycine-rich RNA binding protein 7 [Arabidopsis
  misc_feature (3)..(160): Homolog of NCBI NO: 1346181 NR Description: Glycine-rich RNA-binding protein GRP2A
  misc_feature (3)..(160): Homolog of NCBI NO: 15226605 NR Description: glycine-rich RNA binding protein AtGRP7
  misc_feature (1)..(160): Homolog of NCBI NO: 544416 NR Description: Glycine-rich RNA-binding protein 10
  misc_feature (1)..(160): Homolog of NCBI NO: 15235002 NR Description: glycine-rich RNA-binding protein 8 (GRP8)
MSEVEYRCFVGGLAWATNDEDLQRTFSQFGDVVDSKIINDRESGRSRGFGFVTFKDEKAMRDAIEEMNGKELDGRVITVNEAQSRGSGGGGGGRGGSGGGYRSGGGGGYSGGGGGYERRSGGYGSGGGGGGRGYGGGGRREGGGYGGGDGGSYGGGGGGW

SEQ ID NO: 36932 - protein, 101 aa, Arabidopsis thaliana
  peptide (1)..(101): Ceres Seq. ID no. 12420497
  misc_feature (15)..(100): Pfam Name: Herpesvirus large structural phosphoprotein UL32 Pfam Description: Herpesvirus large structural phosphoprotein UL32
  misc_feature (1)..(101): Homolog of NCBI NO: 2119042 NR Description: glycine-rich RNA-binding protein RGP-1a - wood
  misc_feature (1)..(100): Homolog of NCBI NO: 544426 NR Description: Glycine-rich RNA-binding protein
  misc_feature (1)..(101): Homolog of NCBI NO: 30681492 NR Description: glycine-rich RNA-binding protein (AtGRP7)
  misc_feature (1)..(72): Homolog of NCBI NO: 30692254 NR Description: glycine-rich RNA-binding protein 8 (GRP8) (CCR1)
  misc_feature (1)..(101): Homolog of NCBI NO: 1346180 NR Description: Glycine-rich RNA-binding protein GRP1A
  misc_feature (1)..(101): Homolog of NCBI NO: 21553354 NR Description: glycine-rich RNA binding protein 7 [Arabidopsis
  misc_feature (1)..(101): Homolog of NCBI NO: 1346181 NR Description: Glycine-rich RNA-binding protein GRP2A
  misc_feature (1)..(101): Homolog of NCBI NO: 15226605 NR Description: glycine-rich RNA binding protein AtGRP7
  misc_feature (1)..(101): Homolog of NCBI NO: 544416 NR Description: Glycine-rich RNA-binding protein 10
  misc_feature (1)..(101): Homolog of NCBI NO: 15235002 NR Description: glycine-rich RNA-binding protein 8 (GRP8)
MRDAIEEMNGKELDGRVITVNEAQSRGSGGGGGGRGGSGGGYRSGGGGGYSGGGGGYERRSGGYGSGGGGGGRGYGGGGRREGGGYGGGDGGSYGGGGGGW

SEQ ID NO: 36933 - protein, 94 aa, Arabidopsis thaliana
  peptide (1)..(94): Ceres Seq. ID no. 12420498
  misc_feature (8)..(93): Pfam Name: Herpesvirus large structural phosphoprotein UL32 Pfam Description: Herpesvirus large structural phosphoprotein UL32
  misc_feature (1)..(94): Homolog of NCBI NO: 2119042 NR Description: glycine-rich RNA-binding protein RGP-1a - wood
  misc_feature (1)..(93): Homolog of NCBI NO: 544426 NR Description: Glycine-rich RNA-binding protein
  misc_feature (1)..(94): Homolog of NCBI NO: 30681492 NR Description: glycine-rich RNA-binding protein (AtGRP7)
  misc_feature (1)..(65): Homolog of NCBI NO: 30692254 NR Description: glycine-rich RNA-binding protein 8 (GRP8) (CCR1)
  misc_feature (1)..(94): Homolog of NCBI NO: 1346180 NR Description: Glycine-rich RNA-binding protein GRP1A
  misc_feature (1)..(94): Homolog of NCBI NO: 21553354 NR Description: glycine-rich RNA binding protein 7 [Arabidopsis
  misc_feature (1)..(94): Homolog of NCBI NO: 1346181 NR Description: Glycine-rich RNA-binding protein GRP2A
  misc_feature (1)..(94): Homolog of NCBI NO: 15226605 NR Description: glycine-rich RNA binding protein AtGRP7
  misc_feature (1)..(94): Homolog of NCBI NO: 544416 NR Description: Glycine-rich RNA-binding protein 10
  misc_feature (1)..(94): Homolog of NCBI NO: 15235002 NR Description: glycine-rich RNA-binding protein 8 (GRP8)
MNGKELDGRVITVNEAQSRGSGGGGGGRGGSGGGYRSGGGGGYSGGGGGYERRSGGYGSGGGGGGRGYGGGGRREGGGYGGGDGGSYGGGGGGW

SEQ ID NO: 36934 - DNA, 955 bp, Arabidopsis thaliana
  misc_feature (1)..(955): Ceres Seq. ID no. 12688284
  misc_feature: MA Experiment ID: 20000069 Result: Down-regulated in Transcription
  misc_feature: MA Experiment 20000069 PARAMETER Experiment Name: At_100uM_ABA_Mutants_cDNA_P Parameter: Plant Line Value: CS23
  misc_feature: MA Experiment 20000069 PARAMETER Experiment Name: At_100uM_ABA_Mutants_cDNA_P Parameter: Timepoint (hr) Value: 6
  misc_feature: MA Experiment 20000069 PARAMETER Experiment Name: At_100uM_ABA_Mutants_cDNA_P Parameter: Tissue Value: Aerial
  misc_feature: MA Experiment 20000069 PARAMETER Experiment Name: At_100uM_ABA_Mutants_cDNA_P Parameter: Treatment Value: 100uM ABA vs. No Treatment
  misc_feature: MA Experiment ID: 20000070 Result: Down-regulated in Transcription
  misc_feature: MA Experiment 20000070 PARAMETER Experiment Name: At_100uM_ABA_Mutants_cDNA_P Parameter: Plant Line Value: CS24
  misc_feature: MA Experiment 20000070 PARAMETER Experiment Name: At_100uM_ABA_Mutants_cDNA_P Parameter: Timepoint (hr) Value: 6
  misc_feature: MA Experiment 20000070 PARAMETER Experiment Name: At_100uM_ABA_Mutants_cDNA_P Parameter: Tissue Value: Aerial
  misc_feature: MA Experiment 20000070 PARAMETER Experiment Name: At_100uM_ABA_Mutants_cDNA_P Parameter: Treatment Value: 100uM ABA vs. No Treatment
  misc_feature: MA Experiment ID: 20000071 Result: Down-regulated in Transcription
  misc_feature: MA Experiment 20000071 PARAMETER Experiment Name: At_100uM_ABA_Mutants_cDNA_P Parameter: Plant Line Value: CS8104
  misc_feature: MA Experiment 20000071 PARAMETER Experiment Name: At_100uM_ABA_Mutants_cDNA_P Parameter: Timepoint (hr) Value: 6
  misc_feature: MA Experiment 20000071 PARAMETER Experiment Name: At_100uM_ABA_Mutants_cDNA_P Parameter: Tissue Value: Aerial
  misc_feature: MA Experiment 20000071 PARAMETER Experiment Name: At_100uM_ABA_Mutants_cDNA_P Parameter: Treatment Value: 100uM ABA vs. No Treatment
  misc_feature: MA Experiment ID: 20000086 Result: Down-regulated in Transcription
  misc_feature: MA Experiment 20000086 PARAMETER Experiment Name: At_100uM_ABA_Mutants_cDNA_P Parameter: Plant Line Value: CS22
  misc_feature: MA Experiment 20000086 PARAMETER Experiment Name: At_100uM_ABA_Mutants_cDNA_P Parameter: Timepoint (hr) Value: 6
  misc_feature: MA Experiment 20000086 PARAMETER Experiment Name: At_100uM_ABA_Mutants_cDNA_P Parameter: Tissue Value: Aerial
  misc_feature: MA Experiment 20000086 PARAMETER Experiment Name: At_100uM_ABA_Mutants_cDNA_P Parameter: Treatment Value: 100uM ABA vs. No Treatment
  misc_feature: MA Experiment ID: 20000087 Result: Down-regulated in Transcription
  misc_feature: MA Experiment 20000087 PARAMETER Experiment Name: At_100uM_ABA_Mutants_cDNA_P Parameter: Plant Line Value: WS
  misc_feature: MA Experiment 20000087 PARAMETER Experiment Name: At_100uM_ABA_Mutants_cDNA_P Parameter: Timepoint (hr) Value: 6
  misc_feature: MA Experiment 20000087 PARAMETER Experiment Name: At_100uM_ABA_Mutants_cDNA_P Parameter: Tissue Value: Aerial
  misc_feature: MA Experiment 20000087 PARAMETER Experiment Name: At_100uM_ABA_Mutants_cDNA_P Parameter: Treatment Value: 100uM ABA vs. No Treatment
  misc_feature: MA Experiment ID: 20000117 Result: Down-regulated in Transcription
  misc_feature: MA Experiment 20000117 PARAMETER Experiment Name: At_100uM_ABA_Mutants_cDNA_P Parameter: Plant Line Value: Columbia
  misc_feature: MA Experiment 20000117 PARAMETER Experiment Name: At_100uM_ABA_Mutants_cDNA_P Parameter: Timepoint (hr) Value: 6
  misc_feature: MA Experiment 20000117 PARAMETER Experiment Name: At_100uM_ABA_Mutants_cDNA_P Parameter: Tissue Value: Aerial
  misc_feature: MA Experiment 20000117 PARAMETER Experiment Name: At_100uM_ABA_Mutants_cDNA_P Parameter: Treatment Value: 100uM ABA vs. No Treatment
  misc_feature: MA Experiment ID: 20000185 Result: Down-regulated in Transcription
  misc_feature: MA Experiment 20000185 PARAMETER Experiment Name: At_Roots__P Parameter: Age (day) Value: 7 vs. 21
  misc_feature: MA Experiment 20000185 PARAMETER Experiment Name: At_Roots__P Parameter: Organism Value: A. thaliana
  misc_feature: MA Experiment 20000185 PARAMETER Experiment Name: At_Roots__P Parameter: Tissue Value: Roots vs. Whole Plant
  misc_feature: MA Experiment ID: 20000227 Result: Down-regulated in Transcription
  misc_feature: MA Experiment 20000227 PARAMETER Experiment Name: At_Root-Tips-vs-Tops_P Parameter: Tissue Value: Root Tips vs. Root Tops
  misc_feature: MA Experiment ID: 20000439 Result: Down-regulated in Transcription
  misc_feature: MA Experiment 20000439 PARAMETER Experiment Name: At_Roots__P Parameter: Age (day) Value: 14 vs. 21
  misc_feature: MA Experiment 20000439 PARAMETER Experiment Name: At_Roots__P Parameter: Organism Value: A. thaliana
  misc_feature: MA Experiment 20000439 PARAMETER Experiment Name: At_Roots__P Parameter: Tissue Value: Roots vs. Whole Plant
  misc_feature: MA Experiment ID: 20001557 Result: Down-regulated in Transcription
  misc_feature: MA Experiment 20001557 PARAMETER Experiment Name: At_Drought_Soil_Dry_P Parameter: Age (day) Value: 27
  misc_feature: MA Experiment 20001557 PARAMETER Experiment Name: At_Drought_Soil_Dry_P Parameter: Organism Value: A. thaliana
  misc_feature: MA Experiment 20001557 PARAMETER Experiment Name: At_Drought_Soil_Dry_P Parameter: Plant Line Value: WS
  misc_feature: MA Experiment 20001557 PARAMETER Experiment Name: At_Drought_Soil_Dry_P Parameter: Post Timepoint (hr) Value: 3
  misc_feature: MA Experiment 20001557 PARAMETER Experiment Name: At_Drought_Soil_Dry_P Parameter: Post-Treatment Value: Re-Water vs. No Drought
  misc_feature: MA Experiment 20001557 PARAMETER Experiment Name: At_Drought_Soil_Dry_P Parameter: Timepoint (day) Value: 13
  misc_feature: MA Experiment 20001557 PARAMETER Experiment Name: At_Drought_Soil_Dry_P Parameter: Treatment Value: Drought vs. No Drought
  misc_feature: MA Experiment ID: 20001757 Result: Up-regulated in Transcription
  misc_feature: MA Experiment 20001757 PARAMETER Experiment Name: At_50mM_NH4NO3_L-to-H_P Parameter: Timepoint (hr) Value: 6
  misc_feature: MA Experiment 20001757 PARAMETER Experiment Name: At_50mM_NH4NO3_L-to-H_P Parameter: Tissue Value: Leaf
  misc_feature: MA Experiment 20001757 PARAMETER Experiment Name: At_50mM_NH4NO3_L-to-H_P Parameter: Treatment Value: 50mM NH4NO3 vs 100mM Mannitol
  misc_feature: MA Experiment ID: 20001908 Result: Down-regulated in Transcription
  misc_feature: MA Experiment 20001908 PARAMETER Experiment Name: At_Drought_Reproduction_P Parameter: Age (day) Value: 40
  misc_feature: MA Experiment 20001908 PARAMETER Experiment Name: At_Drought_Reproduction_P Parameter: Organism Value: A. thaliana
  misc_feature: MA Experiment 20001908 PARAMETER Experiment Name: At_Drought_Reproduction_P Parameter: Plant Line Value: WS
  misc_feature: MA Experiment 20001908 PARAMETER Experiment Name: At_Drought_Reproduction_P Parameter: Timepoint (day) Value: 10
  misc_feature: MA Experiment 20001908 PARAMETER Experiment Name: At_Drought_Reproduction_P Parameter: Tissue Value: Siliques
  misc_feature: MA Experiment 20001908 PARAMETER Experiment Name: At_Drought_Reproduction_P Parameter: Treatment Value: Drought vs. No Drought
  misc_feature: MA Experiment ID: 20001911 Result: Down-regulated in Transcription
  misc_feature: MA Experiment 20001911 PARAMETER Experiment Name: At_Drought_Reproduction_P Parameter: Age (day) Value: 40
  misc_feature: MA Experiment 20001911 PARAMETER Experiment Name: At_Drought_Reproduction_P Parameter: Organism Value: A. thaliana
  misc_feature: MA Experiment 20001911 PARAMETER Experiment Name: At_Drought_Reproduction_P Parameter: Plant Line Value: WS
  misc_feature: MA Experiment 20001911 PARAMETER Experiment Name: At_Drought_Reproduction_P Parameter: Timepoint (day) Value: 10
  misc_feature: MA Experiment 20001911 PARAMETER Experiment Name: At_Drought_Reproduction_P Parameter: Tissue Value: Flowers
  misc_feature: MA Experiment 20001911 PARAMETER Experiment Name: At_Drought_Reproduction_P Parameter: Treatment Value: Drought vs. No Drought
aacctcaaaaaatccaaacttgagctttgtattccgacaaaaaaatggcgactgcgtctctagttccgacatctaaaatcttctctgtctctccgaaatcctcagcttcgattaaagcaaggagcagagtagttgttgcatcgtcgcaacaacaacaacaaccaagaaggagagagcttctgctgaaatcggcggtggcgattccggcgattctgcaattgaaggaagctccgatatcagcggcgcgtgaggtggaagttggatcgtacttacctctgtctccgtctgatccttctttcgtcctgtttaaagccaaaccttcagatactcctgctctccgcgcaggaaatgttcagccctatcagtttgttctaccgccgaattggaaacagttgcgaatagccaatattttgtcaggtaattactgtcaaccgaaatgtgcagagccatggatcgaagtgaagtttgagaacgagaagcaaggcaaggttcaagtagttgcatctcctttaatccgcttaaccaacaaaccaaatgcaactattgaagatctcggtgagcctgagaaagtgattgcttctcttggtccttttgtcaccggaaactcttatgactctgatgaacttttgaagacttcaatcgaaaaaattggagatcaaacgtactataagtatgtgttggagacgccatttgcgctcacgggaagtcacaatcttgcaaaagcgacagcaaagggaagcacggttgttttgtttgttgtaagtgctactgaaaagcaatggcagagctcacagaagactcttgaagccattcttgattcttttcaactgtaaatcagagtttttgttatgactctggacttgagaaactaaagagcaaacagtttatgctaaggagtgtctgtgcgtagtaacattaactcattcttttctactgtaaattcgagctatgactc

SEQ ID NO: 36935 - protein, 262 aa, Arabidopsis thaliana
  peptide (1)..(262): Ceres Seq. ID no. 12688285
  misc_feature (105)..(262): Homolog of NCBI NO: 8928455 NR Description: Thylakoid lumenal 29.8 kDa protein, chloroplast
  misc_feature (42)..(262): Homolog of NCBI NO: 30699237 NR Description: thylakoid lumenal 29.8 kDa protein [Arabidopsis
  misc_feature (227)..(262): Homolog of NCBI NO: 34909044 NR Description: P0034E02.35 [Oryza sativa (japonica
  misc_feature (14)..(206): Homolog of NCBI NO: 34909044 NR Description: P0034E02.35 [Oryza sativa (japonica
  misc_feature (1)..(262): Homolog of NCBI NO: 15228983 NR Description: thylakoid lumenal 20 kDa protein; protein id:
MATASLVPTSKIFSVSPKSSASIKARSRVVVASSQQQQQPRRRELLLKSAVAIPAILQLKEAPISAAREVEVGSYLPLSPSDPSFVLFKAKPSDTPALRAGNVQPYQFVLPPNWKQLRIANILSGNYCQPKCAEPWIEVKFENEKQGKVQVVASPLIRLTNKPNATIEDLGEPEKVIASLGPFVTGNSYDSDELLKTSIEKIGDQTYYKYVLETPFALTGSHNLAKATAKGSTVVLFVVSATEKQWQSSQKTLEAILDSFQL

SEQ ID NO: 36936 - DNA, 1237 bp, Arabidopsis thaliana; identical to SEQ ID NO: 29928
  misc_feature (1)..(1237): Ceres Seq. ID no. 13580595
  misc_feature: MA Experiment ID: 108434 Result: Down-regulated in Transcription
  misc_feature: MA Experiment 108434 PARAMETER Experiment Name: At_Root_Tips_cDNA_P Parameter: Tissue Value: Root Tips
  misc_feature: MA Experiment ID: 108469 Result: Up-regulated in Transcription
  misc_feature: MA Experiment ID: 108572 Result: Down-regulated in Transcription
  misc_feature: MA Experiment 108572 PARAMETER Experiment Name: At_Drought_cDNA_P Parameter: Timepoint (hr) Value: 1
  misc_feature: MA Experiment 108572 PARAMETER Experiment Name: At_Drought_cDNA_P Parameter: Tissue Value: Aerial
  misc_feature: MA Experiment 108572 PARAMETER Experiment Name: At_Drought_cDNA_P Parameter: Treatment Value: Drought vs. No Drought
  misc_feature: MA Experiment ID: 108579 Result: Up-regulated in Transcription
  misc_feature: MA Experiment 108579 PARAMETER Experiment Name: At_4deg_Cold_cDNA_P Parameter: Temperature (deg C) Value: 4 vs. 22
  misc_feature: MA Experiment 108579 PARAMETER Experiment Name: At_4deg_Cold_cDNA_P Parameter: Timepoint (hr) Value: 6
  misc_feature: MA Experiment 108579 PARAMETER Experiment Name: At_4deg_Cold_cDNA_P Parameter: Tissue Value: Aerial
  misc_feature: MA Experiment ID: 108585 Result: Up-regulated in Transcription
  misc_feature: MA Experiment 108585 PARAMETER Experiment Name: At_5mM_NaNP_cDNA_P Parameter: Timepoint (hr) Value: 6
  misc_feature: MA Experiment 108585 PARAMETER Experiment Name: At_5mM_NaNP_cDNA_P Parameter: Tissue Value: Aerial
  misc_feature: MA Experiment 108585 PARAMETER Experiment Name: At_5mM_NaNP_cDNA_P Parameter: Treatment Value: null
  misc_feature: MA Experiment ID: 108594 Result: Up-regulated in Transcription
  misc_feature: MA Experiment 108594 PARAMETER Experiment Name: At_Ler-rhl_Root_cDNA_P Parameter: Plant Line Value: null
  misc_feature: MA Experiment ID: 108667 Result: Up-regulated in Transcription
  misc_feature: MA Experiment 108667 PARAMETER Experiment Name: At_2mM_SA_cDNA_P Parameter: Plant Line Value: WS
  misc_feature: MA Experiment 108667 PARAMETER Experiment Name: At_2mM_SA_cDNA_P Parameter: Timepoint (hr) Value: 1
  misc_feature: MA Experiment 108667 PARAMETER Experiment Name: At_2mM_SA_cDNA_P Parameter: Treatment Value: 2mM SA vs. No Treatment
  misc_feature: MA Experiment ID: 20000224 Result: Down-regulated in Transcription
  misc_feature: MA Experiment ID: 20000314 Result: Down-regulated in Transcription
  misc_feature: MA Experiment 20000314 PARAMETER Experiment Name: At_14day_Shoots-Roots_Sub_P Parameter: Age (day) Value: 14
  misc_feature: MA Experiment 20000314 PARAMETER Experiment Name: At_14day_Shoots-Roots_Sub_P Parameter: Organism Value: A. thaliana
  misc_feature: MA Experiment 20000314 PARAMETER Experiment Name: At_14day_Shoots-Roots_Sub_P Parameter: Plant Line Value: WS
  misc_feature: MA Experiment 20000314 PARAMETER Experiment Name: At_14day_Shoots-Roots_Sub_P Parameter: Tissue Value: Roots vs. Whole Plant
  misc_feature: MA Experiment ID: 20000315 Result: Down-regulated in Transcription
  misc_feature: MA Experiment 20000315 PARAMETER Experiment Name: At_14day_Shoots-Roots_Sub_P Parameter: Age (day) Value: 14
  misc_feature: MA Experiment 20000315 PARAMETER Experiment Name: At_14day_Shoots-Roots_Sub_P Parameter: Organism Value: A. thaliana
  misc_feature: MA Experiment 20000315 PARAMETER Experiment Name: At_14day_Shoots-Roots_Sub_P Parameter: Plant Line Value: WS
  misc_feature: MA Experiment 20000315 PARAMETER Experiment Name: At_14day_Shoots-Roots_Sub_P Parameter: Tissue Value: Shoots vs. Whole Plant
  misc_feature: MA Experiment ID: 20000347 Result: Up-regulated in Transcription
  misc_feature: MA Experiment 20000347 PARAMETER Experiment Name: At_2mM_SA_Sub_P Parameter: Age (day) Value: 14
  misc_feature: MA Experiment 20000347 PARAMETER Experiment Name: At_2mM_SA_Sub_P Parameter: Organism Value: A. thaliana
  misc_feature: MA Experiment 20000347 PARAMETER Experiment Name: At_2mM_SA_Sub_P Parameter: Plant Line Value: WS
  misc_feature: MA Experiment 20000347 PARAMETER Experiment Name: At_2mM_SA_Sub_P Parameter: Timepoint (hr) Value: 6
  misc_feature: MA Experiment 20000347 PARAMETER Experiment Name: At_2mM_SA_Sub_P Parameter: Tissue Value: Aerial
  misc_feature: MA Experiment 20000347 PARAMETER Experiment Name: At_2mM_SA_Sub_P Parameter: Treatment Value: 2mM SA vs. No Treatment
  misc_feature: MA Experiment ID: 20000355 Result: Down-regulated in Transcription
  misc_feature: MA Experiment 20000355 PARAMETER Experiment Name: At_Siliques_Sub_P Parameter: Age (day) Value: 21
  misc_feature: MA Experiment 20000355 PARAMETER Experiment Name: At_Siliques_Sub_P Parameter: Organism Value: A. thaliana
  misc_feature: MA Experiment 20000355 PARAMETER Experiment Name: At_Siliques_Sub_P Parameter: Plant Line Value: WS
  misc_feature: MA Experiment 20000355 PARAMETER Experiment Name: At_Siliques_Sub_P Parameter: Tissue Value: Less Than 5mm Siliques vs. Whole Plant
  misc_feature: MA Experiment ID: 20000440 Result: Down-regulated in Transcription
  misc_feature: MA Experiment 20000440 PARAMETER Experiment Name: At_Closed-Flower__Sub_P Parameter: Tissue Value: Closed Flower vs. Whole Plant

SEQ ID NO: 36937 - protein, 165 aa, Arabidopsis thaliana; identical to SEQ ID NO: 29929
  peptide (1)..(165): Ceres Seq. ID no. 13580596
  misc_feature (3)..(161): Homolog of NCBI NO: 7716468 NR Description: hypersensitive-induced response protein [Zea mays]
  misc_feature (12)..(159): Homolog of NCBI NO: 14150732 NR Description: hypersensitive-induced response protein [Oryza
  misc_feature (3)..(161): Homolog of NCBI NO: 7716466 NR Description: hypersensitive-induced response protein [Zea mays]
  misc_feature (3)..(163): Homolog of NCBI NO: 15241939 NR Description: hypersensitive-induced response protein
  misc_feature (3)..(162): Homolog of NCBI NO: 28476864 NR Description: hypersensitive-induced reaction protein 2
  misc_feature (13)..(164): Homolog of NCBI NO: 18395770 NR Description: expressed protein [Arabidopsis thaliana]
  misc_feature (12)..(165): Homolog of NCBI NO: 7716470 NR Description: hypersensitive-induced response protein [Zea mays]
  misc_feature (12)..(160): Homolog of NCBI NO: 23345042 NR Description: hypersensitive-induced reaction protein 1
  misc_feature (12)..(163): Homolog of NCBI NO: 3928150 NR Description: hypothetical protein [Cicer arietinum]
  misc_feature (3)..(165): Homolog of NCBI NO: 15222481 NR Description: expressed protein [Arabidopsis thaliana]
  misc_feature (3)..(161): Homolog of NCBI NO: 7716468 NR Description: hypersensitive-induced response protein [Zea mays]
  misc_feature (12)..(159): Homolog of NCBI NO: 14150732 NR Description: hypersensitive-induced response protein [Oryza
  misc_feature (3)..(161): Homolog of NCBI NO: 7716466 NR Description: hypersensitive-induced response protein [Zea mays]
  misc_feature (3)..(163): Homolog of NCBI NO: 15241939 NR Description: hypersensitive-induced response protein
  misc_feature (3)..(162): Homolog of NCBI NO: 28476864 NR Description: hypersensitive-induced reaction protein 2
  misc_feature (13)..(164): Homolog of NCBI NO: 18395770 NR Description: expressed protein [Arabidopsis thaliana]
  misc_feature (12)..(165): Homolog of NCBI NO: 7716470 NR Description: hypersensitive-induced response protein [Zea mays]
  misc_feature (12)..(160): Homolog of NCBI NO: 23345042 NR Description: hypersensitive-induced reaction protein 1
  misc_feature (12)..(163): Homolog of NCBI NO: 3928150 NR Description: hypothetical protein [Cicer arietinum]
  misc_feature (3)..(165): Homolog of NCBI NO: 15222481 NR Description: expressed protein [Arabidopsis thaliana]

SEQ ID NO: 36938 - protein, 151 aa, Arabidopsis thaliana; identical to SEQ ID NO: 23095
  peptide (1)..(151): Ceres Seq. ID no. 13580597
  misc_feature (1)..(147): Homolog of NCBI NO: 7716468 NR Description: hypersensitive-induced response protein [Zea mays]
  misc_feature (1)..(145): Homolog of NCBI NO: 14150732 NR Description: hypersensitive-induced response protein [Oryza
  misc_feature (1)..(147): Homolog of NCBI NO: 7716466 NR Description: hypersensitive-induced response protein [Zea mays]
  misc_feature (1)..(149): Homolog of NCBI NO: 15241939 NR Description: hypersensitive-induced response protein
  misc_feature (1)..(148): Homolog of NCBI NO: 28476864 NR Description: hypersensitive-induced reaction protein 2
  misc_feature (1)..(150): Homolog of NCBI NO: 18395770 NR Description: expressed protein [Arabidopsis thaliana]
  misc_feature (1)..(151): Homolog of NCBI NO: 7716470 NR Description: hypersensitive-induced response protein [Zea mays]
  misc_feature (1)..(146): Homolog of NCBI NO: 23345042 NR Description: hypersensitive-induced reaction protein 1
  misc_feature (1)..(149): Homolog of NCBI NO: 3928150 NR Description: hypothetical protein [Cicer arietinum]
  misc_feature (1)..(151): Homolog of NCBI NO: 15222481 NR Description: expressed protein [Arabidopsis thaliana]
  misc_feature (1)..(147): Homolog of NCBI NO: 7716468 NR Description: hypersensitive-induced response protein [Zea mays]
  misc_feature (1)..(145): Homolog of NCBI NO: 14150732 NR Description: hypersensitive-induced response protein [Oryza
  misc_feature (1)..(147): Homolog of NCBI NO: 7716466 NR Description: hypersensitive-induced response protein [Zea mays]
  misc_feature (1)..(149): Homolog of NCBI NO: 15241939 NR Description: hypersensitive-induced response protein
  misc_feature (1)..(148): Homolog of NCBI NO: 28476864 NR Description: hypersensitive-induced reaction protein 2
  misc_feature (1)..(150): Homolog of NCBI NO: 18395770 NR Description: expressed protein [Arabidopsis thaliana]
  misc_feature (1)..(151): Homolog of NCBI NO: 7716470 NR Description: hypersensitive-induced response protein [Zea mays]
  misc_feature (1)..(146): Homolog of NCBI NO: 23345042 NR Description: hypersensitive-induced reaction protein 1
  misc_feature (1)..(149): Homolog of NCBI NO: 3928150 NR Description: hypothetical protein [Cicer arietinum]
  misc_feature (1)..(151): Homolog of NCBI NO: 15222481 NR Description: expressed protein [Arabidopsis thaliana]

SEQ ID NO: 36939 - protein, 126 aa, Arabidopsis thaliana; identical to SEQ ID NO: 29931
  peptide (1)..(126): Ceres Seq. ID no. 13580598
  misc_feature (1)..(122): Homolog of NCBI NO: 7716468 NR Description: hypersensitive-induced response protein [Zea mays]
  misc_feature (1)..(120): Homolog of NCBI NO: 14150732 NR Description: hypersensitive-induced response protein [Oryza
  misc_feature (1)..(122): Homolog of NCBI NO: 7716466 NR Description: hypersensitive-induced response protein [Zea mays]
  misc_feature (1)..(124): Homolog of NCBI NO: 15241939 NR Description: hypersensitive-induced response protein
  misc_feature (1)..(123): Homolog of NCBI NO: 28476864 NR Description: hypersensitive-induced reaction protein 2
  misc_feature (1)..(125): Homolog of NCBI NO: 18395770 NR Description: expressed protein [Arabidopsis thaliana]
  misc_feature (1)..(126): Homolog of NCBI NO: 7716470 NR Description: hypersensitive-induced response protein [Zea mays]
  misc_feature (1)..(121): Homolog of NCBI NO: 23345042 NR Description: hypersensitive-induced reaction protein 1
  misc_feature (1)..(124): Homolog of NCBI NO: 3928150 NR Description: hypothetical protein [Cicer arietinum]
  misc_feature (1)..(126): Homolog of NCBI NO: 15222481 NR Description: expressed protein [Arabidopsis thaliana]
  misc_feature (1)..(122): Homolog of NCBI NO: 7716468 NR Description: hypersensitive-induced response protein [Zea mays]
  misc_feature (1)..(120): Homolog of NCBI NO: 14150732 NR Description: hypersensitive-induced response protein [Oryza
  misc_feature (1)..(122): Homolog of NCBI NO: 7716466 NR Description: hypersensitive-induced response protein [Zea mays]
  misc_feature (1)..(124): Homolog of NCBI NO: 15241939 NR Description: hypersensitive-induced response protein
  misc_feature (1)..(123): Homolog of NCBI NO: 28476864 NR Description: hypersensitive-induced reaction protein 2
  misc_feature (1)..(125): Homolog of NCBI NO: 18395770 NR Description: expressed protein [Arabidopsis thaliana]
  misc_feature (1)..(126): Homolog of NCBI NO: 7716470 NR Description: hypersensitive-induced response protein [Zea mays]
  misc_feature (1)..(121): Homolog of NCBI NO: 23345042 NR Description: hypersensitive-induced reaction protein 1
  misc_feature (1)..(124): Homolog of NCBI NO: 3928150 NR Description: hypothetical protein [Cicer arietinum]
  misc_feature (1)..(126): Homolog of NCBI NO: 15222481 NR Description: expressed protein [Arabidopsis thaliana]

SEQ ID NO: 36940 - DNA, 683 bp, Arabidopsis thaliana
  misc_feature (1)..(683): Ceres Seq. ID no. 12393828
  misc_feature: MA Experiment ID: 108434 Result: Up-regulated in Transcription
  misc_feature: MA Experiment 108434 PARAMETER Experiment Name: At_Root_Tips_cDNA_P Parameter: Tissue Value: Root Tips
  misc_feature: MA Experiment ID: 108594 Result: Down-regulated in Transcription
  misc_feature: MA Experiment 108594 PARAMETER Experiment Name: At_Ler-rhl_Root_cDNA_P Parameter: Plant Line Value: null
  misc_feature: MA Experiment ID: 20000180 Result: Up-regulated in Transcription
  misc_feature: MA Experiment 20000180 PARAMETER Experiment Name: At_Germinating_Seeds_P Parameter: Age (hr) Value: 24 vs. 0
  misc_feature: MA Experiment 20000180 PARAMETER Experiment Name: At_Germinating_Seeds_P Parameter: Tissue Value: Germinating Seeds
  misc_feature: MA Experiment ID: 20000185 Result: Up-regulated in Transcription
  misc_feature: MA Experiment 20000185 PARAMETER Experiment Name: At_Roots__P Parameter: Age (day) Value: 7 vs. 21
  misc_feature: MA Experiment 20000185 PARAMETER Experiment Name: At_Roots__P Parameter: Organism Value: A. thaliana
  misc_feature: MA Experiment 20000185 PARAMETER Experiment Name: At_Roots__P Parameter: Tissue Value: Roots vs. Whole Plant
  misc_feature: MA Experiment ID: 20000227 Result: Up-regulated in Transcription
  misc_feature: MA Experiment 20000227 PARAMETER Experiment Name: At_Root-Tips-vs-Tops_P Parameter: Tissue Value: Root Tips vs. Root Tops
  misc_feature: MA Experiment ID: 20000436 Result: Down-regulated in Transcription
  misc_feature: MA Experiment 20000436 PARAMETER Experiment Name: At_Drought_P Parameter: Age (day) Value: 7
  misc_feature: MA Experiment 20000436 PARAMETER Experiment Name: At_Drought_P Parameter: Organism Value: A. thaliana
  misc_feature: MA Experiment 20000436 PARAMETER Experiment Name: At_Drought_P Parameter: Plant Line Value: WS
  misc_feature: MA Experiment 20000436 PARAMETER Experiment Name: At_Drought_P Parameter: Timepoint (hr) Value: 12
  misc_feature: MA Experiment 20000436 PARAMETER Experiment Name: At_Drought_P Parameter: Tissue Value: Whole Plant
  misc_feature: MA Experiment 20000436 PARAMETER Experiment Name: At_Drought_P Parameter: Treatment Value: Drought vs. No Drought
  misc_feature: MA Experiment ID: 20000437 Result: Down-regulated in Transcription
  misc_feature: MA Experiment 20000437 PARAMETER Experiment Name: At_Drought_P Parameter: Age (day) Value: 8
  misc_feature: MA Experiment 20000437 PARAMETER Experiment Name: At_Drought_P Parameter: Organism Value: A. thaliana
  misc_feature: MA Experiment 20000437 PARAMETER Experiment Name: At_Drought_P Parameter: Plant Line Value: WS
  misc_feature: MA Experiment 20000437 PARAMETER Experiment Name: At_Drought_P Parameter: Timepoint (hr) Value: 24
  misc_feature: MA Experiment 20000437 PARAMETER Experiment Name: At_Drought_P Parameter: Tissue Value: Whole Plant
  misc_feature: MA Experiment 20000437 PARAMETER Experiment Name: At_Drought_P Parameter: Treatment Value: Drought vs. No Drought
  misc_feature: MA Experiment ID: 20000439 Result: Up-regulated in Transcription
  misc_feature: MA Experiment 20000439 PARAMETER Experiment Name: At_Roots__P Parameter: Age (day) Value: 14 vs. 21
  misc_feature: MA Experiment 20000439 PARAMETER Experiment Name: At_Roots__P Parameter: Organism Value: A. thaliana
  misc_feature: MA Experiment 20000439 PARAMETER Experiment Name: At_Roots__P Parameter: Tissue Value: Roots vs. Whole Plant
  misc_feature: MA Experiment ID: 20000527 Result: Down-regulated in Transcription
  misc_feature: MA Experiment 20000527 PARAMETER Experiment Name: At_10percent_PEG_P Parameter: Age (day) Value: 20
  misc_feature: MA Experiment 20000527 PARAMETER Experiment Name: At_10percent_PEG_P Parameter: Organism Value: A. thaliana
  misc_feature: MA Experiment 20000527 PARAMETER Experiment Name: At_10percent_PEG_P Parameter: Plant Line Value: WS
  misc_feature: MA Experiment 20000527 PARAMETER Experiment Name: At_10percent_PEG_P Parameter: Timepoint (day) Value: 20
  misc_feature: MA Experiment 20000527 PARAMETER Experiment Name: At_10percent_PEG_P Parameter: Tissue Value: Whole Plant
  misc_feature: MA Experiment 20000527 PARAMETER Experiment Name: At_10percent_PEG_P Parameter: Treatment Value: 10percent PEG vs. No Treatment
  misc_feature: MA Experiment ID: 20001450 Result: Down-regulated in Transcription
  misc_feature: MA Experiment 20001450 PARAMETER Experiment Name: At_Far-red-induction_P Parameter: Age (day) Value: 7
  misc_feature: MA Experiment 20001450 PARAMETER Experiment Name: At_Far-red-induction_P Parameter: Light Value: Far-red vs. White
  misc_feature: MA Experiment 20001450 PARAMETER Experiment Name: At_Far-red-induction_P Parameter: Organism Value: A. thaliana
  misc_feature: MA Experiment 20001450 PARAMETER Experiment Name: At_Far-red-induction_P Parameter: Plant Line Value: Columbia
  misc_feature: MA Experiment 20001450 PARAMETER Experiment Name: At_Far-red-induction_P Parameter: Timepoint (hr) Value: 8
  misc_feature: MA Experiment 20001450 PARAMETER Experiment Name: At_Far-red-induction_P Parameter: Tissue Value: Whole Plant
aatacacaaaaccctttcactaataacaatctccaaatggctaaatcatttgcacctctcatcgctgtgttatgcgttttggttctcccacttgcggccatggcggttggaacgccattccacattgaaggaagtgtttactgcgacacttgccgctttggattcgagacaatcgccacccaatatatccgcggggcaagagtgagaatagtatgcaaagacagagtgacactaaaatcggagttggttggggtggcggtgacgggacctgatgggaaatacaaagtcgccgtcagaggagaccgacaggaccagcaatgtctggcggagcttgttcacagtccactgtcccgctgccaagaggctgatcctggcagaagcaccgctaccgtgatcctcacgcgctccaacggagccgcctctactcgtcactacgccaacgccatgggtttcttcagggacgaaccgctccgtggctgcgccgctctccgcaaacgctacctcgcagacggcgataaccgggctatttgagtcatcttatgttcttgatgaaacagaacacaaaaatttatttagagtttttatttatttctattttattgtattgttgagtctctaaagatggtgagactatttagacatatctaagataaaccatataaaataaagtatttgcaacctcc

SEQ ID NO: 36941 - protein, 176 aa, Arabidopsis thaliana
  peptide (1)..(176): Ceres Seq. ID no. 12393829
  misc_feature (42)..(162): Pfam Name: Pollen proteins Ole e I family Pfam Description: Pollen proteins Ole e I family
  misc_feature (13)..(165): Homolog of NCBI NO: 22074346 NR Description: Che a 1 allergen precursor [Chenopodium album]
  misc_feature (43)..(161): Homolog of NCBI NO: 29836465 NR Description: putative SAH7 protein [Gossypium herbaceum]
  misc_feature (43)..(161): Homolog of NCBI NO: 29836467 NR Description: putative SAH7 protein [Gossypium raimondii]
  misc_feature (14)..(173): Homolog of NCBI NO: 416731 NR Description: Pollen specific protein C13 precursor
  misc_feature (18)..(172): Homolog of NCBI NO: 15218200 NR Description: allergen, putative
  misc_feature (19)..(173): Homolog of NCBI NO: 322854 NR Description: pollen-specific protein - rice
  misc_feature (19)..(173): Homolog of NCBI NO: 38347168 NR Description: OSJNBa0039C07.14 [Oryza sativa (japonica
  misc_feature (16)..(167): Homolog of NCBI NO: 18413144 NR Description: Expressed protein
  misc_feature (18)..(173): Homolog of NCBI NO: 6561156 NR Description: allergen-like protein BRSn20 [Sambucus nigra]
  misc_feature (13)..(176): Homolog of NCBI NO: 15238066 NR Description: pollen allergen -like protein; protein id:
NTQNPFTNNNLQMAKSFAPLIAVLCVLVLPLAAMAVGTPFHIEGSVYCDTCRFGFETIATQYIRGARVRIVCKDRVTLKSELVGVAVTGPDGKYKVAVRGDRQDQQCLAELVHSPLSRCQEADPGRSTATVILTRSNGAASTRHYANAMGFFRDEPLRGCAALRKRYLADGDNRAI

SEQ ID NO: 36942 - protein, 164 aa, Arabidopsis thaliana
  peptide (1)..(164): Ceres Seq. ID no. 12393830
  misc_feature (30)..(150): Pfam Name: Pollen proteins Ole e I family Pfam Description: Pollen proteins Ole e I family
  misc_feature (1)..(153): Homolog of NCBI NO: 22074346 NR Description: Che a 1 allergen precursor [Chenopodium album]
  misc_feature (31)..(149): Homolog of NCBI NO: 29836465 NR Description: putative SAH7 protein [Gossypium herbaceum]
  misc_feature (31)..(149): Homolog of NCBI NO: 29836467 NR Description: putative SAH7 protein [Gossypium raimondii]
  misc_feature (2)..(161): Homolog of NCBI NO: 416731 NR Description: Pollen specific protein C13 precursor
  misc_feature (6)..(160): Homolog of NCBI NO: 15218200 NR Description: allergen, putative
  misc_feature (7)..(161): Homolog of NCBI NO: 322854 NR Description: pollen-specific protein - rice
  misc_feature (7)..(161): Homolog of NCBI NO: 38347168 NR Description: OSJNBa0039C07.14 [Oryza sativa (japonica
  misc_feature (4)..(155): Homolog of NCBI NO: 18413144 NR Description: Expressed protein
  misc_feature (6)..(161): Homolog of NCBI NO: 6561156 NR Description: allergen-like protein BRSn20 [Sambucus nigra]
  misc_feature (1)..(164): Homolog of NCBI NO: 15238066 NR Description: pollen allergen -like protein; protein id:
MAKSFAPLIAVLCVLVLPLAAMAVGTPFHIEGSVYCDTCRFGFETIATQYIRGARVRIVCKDRVTLKSELVGVAVTGPDGKYKVAVRGDRQDQQCLAELVHSPLSRCQEADPGRSTATVILTRSNGAASTRHYANAMGFFRDEPLRGCAALRKRYLADGDNRAI

SEQ ID NO: 36943 - protein, 143 aa, Arabidopsis thaliana
  peptide (1)..(143): Ceres Seq. ID no. 12393831
  misc_feature (9)..(129): Pfam Name: Pollen proteins Ole e I family Pfam Description: Pollen proteins Ole e I family
  misc_feature (1)..(132): Homolog of NCBI NO: 22074346 NR Description: Che a 1 allergen precursor [Chenopodium album]
  misc_feature (10)..(128): Homolog of NCBI NO: 29836465 NR Description: putative SAH7 protein [Gossypium herbaceum]
  misc_feature (10)..(128): Homolog of NCBI NO: 29836467 NR Description: putative SAH7 protein [Gossypium raimondii]
  misc_feature (1)..(140): Homolog of NCBI NO: 416731 NR Description: Pollen specific protein C13 precursor
  misc_feature (1)..(139): Homolog of NCBI NO: 15218200 NR Description: allergen, putative
  misc_feature (1)..(140): Homolog of NCBI NO: 322854 NR Description: pollen-specific protein - rice
  misc_feature (1)..(140): Homolog of NCBI NO: 38347168 NR Description: OSJNBa0039C07.14 [Oryza sativa (japonica
  misc_feature (1)..(134): Homolog of NCBI NO: 18413144 NR Description: Expressed protein
  misc_feature (1)..(140): Homolog of NCBI NO: 6561156 NR Description: allergen-like protein BRSn20 [Sambucus nigra]
  misc_feature (1)..(143): Homolog of NCBI NO: 15238066 NR Description: pollen allergen -like protein; protein id:
MAVGTPFHIEGSVYCDTCRFGFETIATQYIRGARVRIVCKDRVTLKSELVGVAVTGPDGKYKVAVRGDRQDQQCLAELVHSPLSRCQEADPGRSTATVILTRSNGAASTRHYANAMGFFRDEPLRGCAALRKRYLADGDNRAI

SEQ ID NO: 36944 - DNA, 1565 bp, Arabidopsis thaliana
  misc_feature (1)..(1565): Ceres Seq. ID no. 13491778
  misc_feature: MA Experiment ID: 108434 Result: Down-regulated in Transcription
  misc_feature: MA Experiment 108434 PARAMETER Experiment Name: At_Root_Tips_cDNA_P Parameter: Tissue Value: Root Tips
  misc_feature: MA Experiment ID: 108462 Result: Up-regulated in Transcription
  misc_feature: MA Experiment 108462 PARAMETER Experiment Name: At_Germinating_Seeds_cDNA_P Parameter: Age (day) Value: 2 vs. 0
  misc_feature: MA Experiment 108462 PARAMETER Experiment Name: At_Germinating_Seeds_cDNA_P Parameter: Tissue Value: Germinating Seeds
  misc_feature: MA Experiment ID: 108463 Result: Up-regulated in Transcription
  misc_feature: MA Experiment 108463 PARAMETER Experiment Name: At_Germinating_Seeds_cDNA_P Parameter: Age (day) Value: 3 vs. 0
  misc_feature: MA Experiment 108463 PARAMETER Experiment Name: At_Germinating_Seeds_cDNA_P Parameter: Tissue Value: Germinating Seeds
  misc_feature: MA Experiment ID: 108464 Result: Up-regulated in Transcription
  misc_feature: MA Experiment 108464 PARAMETER Experiment Name: At_Germinating_Seeds_cDNA_P Parameter: Age (day) Value: 4 vs. 0
  misc_feature: MA Experiment 108464 PARAMETER Experiment Name: At_Germinating_Seeds_cDNA_P Parameter: Tissue Value: Germinating Seeds
  misc_feature: MA Experiment ID: 108488 Result: Down-regulated in Transcription
  misc_feature: MA Experiment ID: 108561 Result: Up-regulated in Transcription
  misc_feature: MA Experiment 108561 PARAMETER Experiment Name: At_100uM_ABA_cDNA_P Parameter: Timepoint (hr) Value: 6
  misc_feature: MA Experiment 108561 PARAMETER Experiment Name: At_100uM_ABA_cDNA_P Parameter: Tissue Value: Aerial
  misc_feature: MA Experiment 108561 PARAMETER Experiment Name: At_100uM_ABA_cDNA_P Parameter: Treatment Value: 100uM ABA vs. No Treatment
  misc_feature: MA Experiment ID: 108572 Result: Up-regulated in Transcription
  misc_feature: MA Experiment 108572 PARAMETER Experiment Name: At_Drought_cDNA_P Parameter: Timepoint (hr) Value: 1
  misc_feature: MA Experiment 108572 PARAMETER Experiment Name: At_Drought_cDNA_P Parameter: Tissue Value: Aerial
  misc_feature: MA Experiment 108572 PARAMETER Experiment Name: At_Drought_cDNA_P Parameter: Treatment Value: Drought vs. No Drought
  misc_feature: MA Experiment ID: 108573 Result: Up-regulated in Transcription
  misc_feature: MA Experiment 108573 PARAMETER Experiment Name: At_Drought_cDNA_P Parameter: Timepoint (hr) Value: 6
  misc_feature: MA Experiment 108573 PARAMETER Experiment Name: At_Drought_cDNA_P Parameter: Tissue Value: Aerial
  misc_feature: MA Experiment 108573 PARAMETER Experiment Name: At_Drought_cDNA_P Parameter: Treatment Value: Drought vs. No Drought
  misc_feature: MA Experiment ID: 108585 Result: Up-regulated in Transcription
  misc_feature: MA Experiment 108585 PARAMETER Experiment Name: At_5mM_NaNP_cDNA_P Parameter: Timepoint (hr) Value: 6
  misc_feature: MA Experiment 108585 PARAMETER Experiment Name: At_5mM_NaNP_cDNA_P Parameter: Tissue Value: Aerial
  misc_feature: MA Experiment 108585 PARAMETER Experiment Name: At_5mM_NaNP_cDNA_P Parameter: Treatment Value: null
  misc_feature: MA Experiment ID: 108595 Result: Up-regulated in Transcription
  misc_feature: MA Experiment 108595 PARAMETER Experiment Name: At_Ler-pi_Ovule_cDNA_P Parameter: Plant Line Value: null
  misc_feature: MA Experiment ID: 108605 Result: Up-regulated in Transcription
  misc_feature: MA Experiment 108605 PARAMETER Experiment Name: At_100uM_ABA_cDNA_P Parameter: Timepoint (hr) Value: 6
  misc_feature: MA Experiment 108605 PARAMETER Experiment Name: At_100uM_ABA_cDNA_P Parameter: Tissue Value: Aerial
  misc_feature: MA Experiment 108605 PARAMETER Experiment Name: At_100uM_ABA_cDNA_P Parameter: Treatment Value: 100uM ABA vs. No Treatment
  misc_feature: MA Experiment ID: 108607 Result: Up-regulated in Transcription
  misc_feature: MA Experiment 108607 PARAMETER Experiment Name: At_100uM_ABA_cDNA_P Parameter: Timepoint (hr) Value: 4
  misc_feature: MA Experiment 108607 PARAMETER Experiment Name: At_100uM_ABA_cDNA_P Parameter: Tissue Value: Aerial
  misc_feature: MA Experiment 108607 PARAMETER Experiment Name: At_100uM_ABA_cDNA_P Parameter: Treatment Value: 100uM ABA vs. No Treatment
  misc_feature: MA Experiment ID: 108668 Result: Up-regulated in Transcription
  misc_feature: MA Experiment 108668 PARAMETER Experiment Name: At_2mM_SA_cDNA_P Parameter: Plant Line Value: WS
  misc_feature: MA Experiment 108668 PARAMETER Experiment Name: At_2mM_SA_cDNA_P Parameter: Timepoint (hr) Value: 6
  misc_feature: MA Experiment 108668 PARAMETER Experiment Name: At_2mM_SA_cDNA_P Parameter: Treatment Value: 2mM SA vs. No Treatment
  misc_feature: MA Experiment ID: 20000072 Result: Up-regulated in Transcription
  misc_feature: MA Experiment 20000072 PARAMETER Experiment Name: At_100uM_ABA_Mutants_cDNA_P Parameter: Plant Line Value: CS8105
  misc_feature: MA Experiment 20000072 PARAMETER Experiment Name: At_100uM_ABA_Mutants_cDNA_P Parameter: Timepoint (hr) Value: 6
  misc_feature: MA Experiment 20000072 PARAMETER Experiment Name: At_100uM_ABA_Mutants_cDNA_P Parameter: Tissue Value: Aerial
  misc_feature: MA Experiment 20000072 PARAMETER Experiment Name: At_100uM_ABA_Mutants_cDNA_P Parameter: Treatment Value: 100uM ABA vs. No Treatment
  misc_feature: MA Experiment ID: 20000087 Result: Up-regulated in Transcription
  misc_feature: MA Experiment 20000087 PARAMETER Experiment Name: At_100uM_ABA_Mutants_cDNA_P Parameter: Plant Line Value: WS
  misc_feature: MA Experiment 20000087 PARAMETER Experiment Name: At_100uM_ABA_Mutants_cDNA_P Parameter: Timepoint (hr) Value: 6
  misc_feature: MA Experiment 20000087 PARAMETER Experiment Name: At_100uM_ABA_Mutants_cDNA_P Parameter: Tissue Value: Aerial
  misc_feature: MA Experiment 20000087 PARAMETER Experiment Name: At_100uM_ABA_Mutants_cDNA_P Parameter: Treatment Value: 100uM ABA vs. No Treatment
  misc_feature: MA Experiment ID: 20000169 Result: Up-regulated in Transcription
  misc_feature: MA Experiment 20000169 PARAMETER Experiment Name: At_100uM_ABA_P Parameter: Age (day) Value: 14
  misc_feature: MA Experiment 20000169 PARAMETER Experiment Name: At_100uM_ABA_P Parameter: Organism Value: A. thaliana
  misc_feature: MA Experiment 20000169 PARAMETER Experiment Name: At_100uM_ABA_P Parameter: Plant Line Value: WS
  misc_feature: MA Experiment 20000169 PARAMETER Experiment Name: At_100uM_ABA_P Parameter: Timepoint (hr) Value: 6
  misc_feature: MA Experiment 20000169 PARAMETER Experiment Name: At_100uM_ABA_P Parameter: Tissue Value: Aerial
  misc_feature: MA Experiment 20000169 PARAMETER Experiment Name: At_100uM_ABA_P Parameter: Treatment Value: 100uM ABA vs. No Treatment
  misc_feature: MA Experiment ID: 20000182 Result: Up-regulated in Transcription
  misc_feature: MA Experiment 20000182 PARAMETER Experiment Name: At_2mM_SA_P Parameter: Age (day) Value: 14
  misc_feature: MA Experiment 20000182 PARAMETER Experiment Name: At_2mM_SA_P Parameter: Organism Value: A. thaliana
  misc_feature: MA Experiment 20000182 PARAMETER Experiment Name: At_2mM_SA_P Parameter: Plant Line Value: WS
  misc_feature: MA Experiment 20000182 PARAMETER Experiment Name: At_2mM_SA_P Parameter: Timepoint (hr) Value: 6
  misc_feature: MA Experiment 20000182 PARAMETER Experiment Name: At_2mM_SA_P Parameter: Tissue Value: Aerial
  misc_feature: MA Experiment 20000182 PARAMETER Experiment Name: At_2mM_SA_P Parameter: Treatment Value: 2mM SA vs. No Treatment
  misc_feature: MA Experiment ID: 20000184 Result: Down-regulated in Transcription
  misc_feature: MA Experiment 20000184 PARAMETER Experiment Name: At_Shoots__P Parameter: Age (day) Value: 7
  misc_feature: MA Experiment 20000184 PARAMETER Experiment Name: At_Shoots__P Parameter: Tissue Value: Shoots vs. Whole Plant
  misc_feature: MA Experiment ID: 20000438 Result: Down-regulated in Transcription
  misc_feature: MA Experiment 20000438 PARAMETER Experiment Name: At_Shoots__P Parameter: Age (day) Value: 14
  misc_feature: MA Experiment 20000438 PARAMETER Experiment Name: At_Shoots__P Parameter: Tissue Value: Shoots vs. Whole Plant
  misc_feature: MA Experiment ID: 20000453 Result: Up-regulated in Transcription
  misc_feature: MA Experiment 20000453 PARAMETER Experiment Name: At_100uM_ABA_P Parameter: Age (day) Value: 15
  misc_feature: MA Experiment 20000453 PARAMETER Experiment Name: At_100uM_ABA_P Parameter: Organism Value: A. thaliana
  misc_feature: MA Experiment 20000453 PARAMETER Experiment Name: At_100uM_ABA_P Parameter: Plant Line Value: WS
  misc_feature: MA Experiment 20000453 PARAMETER Experiment Name: At_100uM_ABA_P Parameter: Timepoint (hr) Value: 24
  misc_feature: MA Experiment 20000453 PARAMETER Experiment Name: At_100uM_ABA_P Parameter: Tissue Value: Aerial
  misc_feature: MA Experiment 20000453 PARAMETER Experiment Name: At_100uM_ABA_P Parameter: Treatment Value: 100uM ABA vs. No Treatment
  misc_feature: MA Experiment ID: 20000495 Result: Up-regulated in Transcription
  misc_feature: MA Experiment 20000495 PARAMETER Experiment Name: At_Guard_Cells_P Parameter: Harvest Date Value: 8/2/2002
  misc_feature: MA Experiment 20000495 PARAMETER Experiment Name: At_Guard_Cells_P Parameter: Organism Value: A. thaliana
  misc_feature: MA Experiment 20000495 PARAMETER Experiment Name: At_Guard_Cells_P Parameter: Tissue Value: Guard Cells vs. Leaves
  misc_feature: MA Experiment ID: 20000527 Result: Down-regulated in Transcription
  misc_feature: MA Experiment 20000527 PARAMETER Experiment Name: At_10percent_PEG_P Parameter: Age (day) Value: 20
  misc_feature: MA Experiment 20000527 PARAMETER Experiment Name: At_10percent_PEG_P Parameter: Organism Value: A. thaliana
  misc_feature: MA Experiment 20000527 PARAMETER Experiment Name: At_10percent_PEG_P Parameter: Plant Line Value: WS
  misc_feature: MA Experiment 20000527 PARAMETER Experiment Name: At_10percent_PEG_P Parameter: Timepoint (day) Value: 20
  misc_feature: MA Experiment 20000527 PARAMETER Experiment Name: At_10percent_PEG_P Parameter: Tissue Value: Whole Plant
  misc_feature: MA Experiment 20000527 PARAMETER Experiment Name: At_10percent_PEG_P Parameter: Treatment Value: 10percent PEG vs. No Treatment
  misc_feature: MA Experiment ID: 20001904 Result: Up-regulated in Transcription
  misc_feature: MA Experiment 20001904 PARAMETER Experiment Name: At_Drought_Reproduction_P Parameter: Age (day) Value: 37
  misc_feature: MA Experiment 20001904 PARAMETER Experiment Name: At_Drought_Reproduction_P Parameter: Organism Value: A. thaliana
  misc_feature: MA Experiment 20001904 PARAMETER Experiment Name: At_Drought_Reproduction_P Parameter: Plant Line Value: WS
  misc_feature: MA Experiment 20001904 PARAMETER Experiment Name: At_Drought_Reproduction_P Parameter: Timepoint (day) Value: 7
  misc_feature: MA Experiment 20001904 PARAMETER Experiment Name: At_Drought_Reproduction_P Parameter: Tissue Value: Rosettes
  misc_feature: MA Experiment 20001904 PARAMETER Experiment Name: At_Drought_Reproduction_P Parameter: Treatment Value: Drought vs. No Drought
cttcatcatcatcgtattcaccgttgtcctttctttcattgacacttgccagtttacatcgacaaacaaaagaaatcagaatggatttctcagggagcttctttgtcatcttcgttaccttcttctttctccctcctctgtcttcagctgggagctacgattctggttcgggtctcgagtcactcgctcgcgggatgcttcattcagccaaggatcctgagttcttcgagtggatgagaggaattaggagaaagattcatgagaacccagagacagggtttcaggagttcaaaacgagtcaactcgttcgagacgagcttgactcgcttggagtgaagtataagtatcctgtggcgaagactggcgtcgtcgcttggatcggatcctgttcgaaacctgttttcggacttagagccgacatggacgcacttccgttacaggaattagtggaatgggaatcgaaaagtaaagtagatggaaagatgcatgcttgtggtcatgatactcatgttgctatgcttcttggtgctgctaagcttcttcaaaccacaaaacacctcatcaaggggacagtaaaacttgtgtttcaaccaggcgaggaaggttatgcaggtgcttatgaaatgctaaaagacgagattctagacgacttagatgggatactcagtgttcatgtctttccatcgatcccatcaggtggtattggttctaggcctgggaccgttcttgcaggtgcaggattgtttacagtcacggttcacggtcaaggtagccacgcagctacaccgcacttctctaaagacccggttcttgcagcttcttccgctgttgttgccttgcaacagattgtttcgcgggaactggatccactcgaagctggtgtggttacagttggatatattgaaggaggtcatgctcaaaacgtaataccgcagagtgcgaaatttggaggtactttcagaagcttaagcaacgatgggcttctatttatccaaagacggatcaaagagatttcagaggcacaagcatcggtataccgatgcaaagcagaagtaaacttcgaagagaaaaagccgtcgcttcacccggtaatgaataacgacgagggcttatacgagcacggtaaaaaagtagcggaagcgatgattggaaagaataacttccatgatttcccggtgacaatgggaggagaggatttcagcttcttcactcaaaagactaaggctgcgattttcgtgctgggggtaaagaatgagacgctaggcgctggtaagccgcttcactcgccttacttctttgttgatgaagaagctcttcctgttggggctgctcttcacgcagctatggccgtttcttatttggacgaacatggtcatagccatgaagaagaggttaagagtgaattatagaaggtgttgggagaaaatcagcttatattagtcatcatctatttgtatttgaacttgaaagttaggtgaggttaggtttcgggttgggaagaatgtttgttaatagtcacgagaaaccaaccacttctattaaaataaatttgatgtaagagtttt

SEQ ID NO: 36945 - protein, 468 aa, Arabidopsis thaliana
  peptide (1)..(468): Ceres Seq. ID no. 13491779
  misc_feature (75)..(452): Pfam Name: Peptidase family M20/M25/M40 Pfam Description: Peptidase family M20/M25/M40
  misc_feature (47)..(462): Homolog of NCBI NO: 34910396 NR Description: putative IAA-Ala hydrolase
  misc_feature (36)..(459): Homolog of NCBI NO: 34900784 NR Description: IAA amidohydrolase-like protein~contains ESTs
  misc_feature (60)..(456): Homolog of NCBI NO: 28376716 NR Description: putative  IAA amidohydrolase
  misc_feature (49)..(456): Homolog of NCBI NO: 34900780 NR Description: putative IAA amidohydrolase
  misc_feature (54)..(456): Homolog of NCBI NO: 28376718 NR Description: putative  IAA amidohydrolase
  misc_feature (38)..(456): Homolog of NCBI NO: 34900782 NR Description: putative IAA amidohydrolase
  misc_feature (27)..(468): Homolog of NCBI NO: 18129692 NR Description: IAA amidohydrolase [Arabidopsis suecica]
  misc_feature (27)..(468): Homolog of NCBI NO: 887785 NR Description: ILR1
  misc_feature (27)..(468): Homolog of NCBI NO: 21554648 NR Description: IAA-amino acid hydrolase (ILR1) [Arabidopsis
  misc_feature (27)..(468): Homolog of NCBI NO: 15233011 NR Description: IAA-amino acid hydrolase 1 (ILR1) [Arabidopsis
SSSSYSPLSFLSLTLASLHRQTKEIRMDFSGSFFVIFVTFFFLPPLSSAGSYDSGSGLESLARGMLHSAKDPEFFEWMRGIRRKIHENPETGFQEFKTSQLVRDELDSLGVKYKYPVAKTGVVAWIGSCSKPVFGLRADMDALPLQELVEWESKSKVDGKMHACGHDTHVAMLLGAAKLLQTTKHLIKGTVKLVFQPGEEGYAGAYEMLKDEILDDLDGILSVHVFPSIPSGGIGSRPGTVLAGAGLFTVTVHGQGSHAATPHFSKDPVLAASSAVVALQQIVSRELDPLEAGVVTVGYIEGGHAQNVIPQSAKFGGTFRSLSNDGLLFIQRRIKEISEAQASVYRCKAEVNFEEKKPSLHPVMNNDEGLYEHGKKVAEAMIGKNNFHDFPVTMGGEDFSFFTQKTKAAIFVLGVKNETLGAGKPLHSPYFFVDEEALPVGAALHAAMAVSYLDEHGHSHEEEVKSEL

SEQ ID NO: 36946 - protein, 442 aa, Arabidopsis thaliana
  peptide (1)..(442): Ceres Seq. ID no. 13491780
  misc_feature (49)..(426): Pfam Name: Peptidase family M20/M25/M40 Pfam Description: Peptidase family M20/M25/M40
  misc_feature (21)..(436): Homolog of NCBI NO: 34910396 NR Description: putative IAA-Ala hydrolase
  misc_feature (10)..(433): Homolog of NCBI NO: 34900784 NR Description: IAA amidohydrolase-like protein~contains ESTs
  misc_feature (34)..(430): Homolog of NCBI NO: 28376716 NR Description: putative  IAA amidohydrolase
  misc_feature (23)..(430): Homolog of NCBI NO: 34900780 NR Description: putative IAA amidohydrolase
  misc_feature (28)..(430): Homolog of NCBI NO: 28376718 NR Description: putative  IAA amidohydrolase
  misc_feature (12)..(430): Homolog of NCBI NO: 34900782 NR Description: putative IAA amidohydrolase
  misc_feature (1)..(442): Homolog of NCBI NO: 18129692 NR Description: IAA amidohydrolase [Arabidopsis suecica]
  misc_feature (1)..(442): Homolog of NCBI NO: 887785 NR Description: ILR1
  misc_feature (1)..(442): Homolog of NCBI NO: 21554648 NR Description: IAA-amino acid hydrolase (ILR1) [Arabidopsis
  misc_feature (1)..(442): Homolog of NCBI NO: 15233011 NR Description: IAA-amino acid hydrolase 1 (ILR1) [Arabidopsis
MDFSGSFFVIFVTFFFLPPLSSAGSYDSGSGLESLARGMLHSAKDPEFFEWMRGIRRKIHENPETGFQEFKTSQLVRDELDSLGVKYKYPVAKTGVVAWIGSCSKPVFGLRADMDALPLQELVEWESKSKVDGKMHACGHDTHVAMLLGAAKLLQTTKHLIKGTVKLVFQPGEEGYAGAYEMLKDEILDDLDGILSVHVFPSIPSGGIGSRPGTVLAGAGLFTVTVHGQGSHAATPHFSKDPVLAASSAVVALQQIVSRELDPLEAGVVTVGYIEGGHAQNVIPQSAKFGGTFRSLSNDGLLFIQRRIKEISEAQASVYRCKAEVNFEEKKPSLHPVMNNDEGLYEHGKKVAEAMIGKNNFHDFPVTMGGEDFSFFTQKTKAAIFVLGVKNETLGAGKPLHSPYFFVDEEALPVGAALHAAMAVSYLDEHGHSHEEEVKSEL

SEQ ID NO: 36947 - protein, 404 aa, Arabidopsis thaliana
  peptide (1)..(404): Ceres Seq. ID no. 13491781
  misc_feature (11)..(388): Pfam Name: Peptidase family M20/M25/M40 Pfam Description: Peptidase family M20/M25/M40
  misc_feature (1)..(398): Homolog of NCBI NO: 34910396 NR Description: putative IAA-Ala hydrolase
  misc_feature (1)..(395): Homolog of NCBI NO: 34900784 NR Description: IAA amidohydrolase-like protein~contains ESTs
  misc_feature (1)..(392): Homolog of NCBI NO: 28376716 NR Description: putative  IAA amidohydrolase
  misc_feature (1)..(392): Homolog of NCBI NO: 34900780 NR Description: putative IAA amidohydrolase
  misc_feature (1)..(392): Homolog of NCBI NO: 28376718 NR Description: putative  IAA amidohydrolase
  misc_feature (1)..(392): Homolog of NCBI NO: 34900782 NR Description: putative IAA amidohydrolase
  misc_feature (1)..(404): Homolog of NCBI NO: 18129692 NR Description: IAA amidohydrolase [Arabidopsis suecica]
  misc_feature (1)..(404): Homolog of NCBI NO: 887785 NR Description: ILR1
  misc_feature (1)..(404): Homolog of NCBI NO: 21554648 NR Description: IAA-amino acid hydrolase (ILR1) [Arabidopsis
  misc_feature (1)..(404): Homolog of NCBI NO: 15233011 NR Description: IAA-amino acid hydrolase 1 (ILR1) [Arabidopsis
MLHSAKDPEFFEWMRGIRRKIHENPETGFQEFKTSQLVRDELDSLGVKYKYPVAKTGVVAWIGSCSKPVFGLRADMDALPLQELVEWESKSKVDGKMHACGHDTHVAMLLGAAKLLQTTKHLIKGTVKLVFQPGEEGYAGAYEMLKDEILDDLDGILSVHVFPSIPSGGIGSRPGTVLAGAGLFTVTVHGQGSHAATPHFSKDPVLAASSAVVALQQIVSRELDPLEAGVVTVGYIEGGHAQNVIPQSAKFGGTFRSLSNDGLLFIQRRIKEISEAQASVYRCKAEVNFEEKKPSLHPVMNNDEGLYEHGKKVAEAMIGKNNFHDFPVTMGGEDFSFFTQKTKAAIFVLGVKNETLGAGKPLHSPYFFVDEEALPVGAALHAAMAVSYLDEHGHSHEEEVKSEL

SEQ ID NO: 36948 - DNA, 1977 bp, Arabidopsis thaliana
  misc_feature (1)..(1977): Ceres Seq. ID no. 12604873
  misc_feature: MA Experiment ID: 20000171 Result: Down-regulated in Transcription
  misc_feature: MA Experiment 20000171 PARAMETER Experiment Name: At_42deg_Heat_P Parameter: Age (day) Value: 14
  misc_feature: MA Experiment 20000171 PARAMETER Experiment Name: At_42deg_Heat_P Parameter: Organism Value: A. thaliana
  misc_feature: MA Experiment 20000171 PARAMETER Experiment Name: At_42deg_Heat_P Parameter: Plant Line Value: WS
  misc_feature: MA Experiment 20000171 PARAMETER Experiment Name: At_42deg_Heat_P Parameter: Temperature (deg C) Value: 42 vs. 22
  misc_feature: MA Experiment 20000171 PARAMETER Experiment Name: At_42deg_Heat_P Parameter: Timepoint (hr) Value: 1
  misc_feature: MA Experiment 20000171 PARAMETER Experiment Name: At_42deg_Heat_P Parameter: Tissue Value: Aerial
  misc_feature: MA Experiment ID: 20000227 Result: Up-regulated in Transcription
  misc_feature: MA Experiment 20000227 PARAMETER Experiment Name: At_Root-Tips-vs-Tops_P Parameter: Tissue Value: Root Tips vs. Root Tops
  misc_feature: MA Experiment ID: 20000234 Result: Up-regulated in Transcription
  misc_feature: MA Experiment 20000234 PARAMETER Experiment Name: At_Siliques_P Parameter: Age (day) Value: 21
  misc_feature: MA Experiment 20000234 PARAMETER Experiment Name: At_Siliques_P Parameter: Organism Value: A. thaliana
  misc_feature: MA Experiment 20000234 PARAMETER Experiment Name: At_Siliques_P Parameter: Plant Line Value: WS
  misc_feature: MA Experiment 20000234 PARAMETER Experiment Name: At_Siliques_P Parameter: Tissue Value: Less Than 5mm Siliques vs. Whole Plant
  misc_feature: MA Experiment ID: 20000286 Result: Up-regulated in Transcription
  misc_feature: MA Experiment 20000286 PARAMETER Experiment Name: At_Open_Flower_P Parameter: Age (day) Value: 21
  misc_feature: MA Experiment 20000286 PARAMETER Experiment Name: At_Open_Flower_P Parameter: Plant Line Value: WS
  misc_feature: MA Experiment 20000286 PARAMETER Experiment Name: At_Open_Flower_P Parameter: Tissue Value: Half Open vs. Whole Plant
  misc_feature: MA Experiment ID: 20000438 Result: Up-regulated in Transcription
  misc_feature: MA Experiment 20000438 PARAMETER Experiment Name: At_Shoots__P Parameter: Age (day) Value: 14
  misc_feature: MA Experiment 20000438 PARAMETER Experiment Name: At_Shoots__P Parameter: Tissue Value: Shoots vs. Whole Plant
  misc_feature: MA Experiment ID: 20001248 Result: Down-regulated in Transcription
  misc_feature: MA Experiment 20001248 PARAMETER Experiment Name: At_Far-red-induction_P Parameter: Age (day) Value: 7
  misc_feature: MA Experiment 20001248 PARAMETER Experiment Name: At_Far-red-induction_P Parameter: Light Value: Far-red vs. White
  misc_feature: MA Experiment 20001248 PARAMETER Experiment Name: At_Far-red-induction_P Parameter: Organism Value: A. thaliana
  misc_feature: MA Experiment 20001248 PARAMETER Experiment Name: At_Far-red-induction_P Parameter: Plant Line Value: Columbia
  misc_feature: MA Experiment 20001248 PARAMETER Experiment Name: At_Far-red-induction_P Parameter: Timepoint (hr) Value: 4
  misc_feature: MA Experiment 20001248 PARAMETER Experiment Name: At_Far-red-induction_P Parameter: Tissue Value: Whole Plant
  misc_feature: MA Experiment ID: 20001450 Result: Down-regulated in Transcription
  misc_feature: MA Experiment 20001450 PARAMETER Experiment Name: At_Far-red-induction_P Parameter: Age (day) Value: 7
  misc_feature: MA Experiment 20001450 PARAMETER Experiment Name: At_Far-red-induction_P Parameter: Light Value: Far-red vs. White
  misc_feature: MA Experiment 20001450 PARAMETER Experiment Name: At_Far-red-induction_P Parameter: Organism Value: A. thaliana
  misc_feature: MA Experiment 20001450 PARAMETER Experiment Name: At_Far-red-induction_P Parameter: Plant Line Value: Columbia
  misc_feature: MA Experiment 20001450 PARAMETER Experiment Name: At_Far-red-induction_P Parameter: Timepoint (hr) Value: 8
  misc_feature: MA Experiment 20001450 PARAMETER Experiment Name: At_Far-red-induction_P Parameter: Tissue Value: Whole Plant
  misc_feature: MA Experiment ID: 20001451 Result: Down-regulated in Transcription
  misc_feature: MA Experiment 20001451 PARAMETER Experiment Name: At_Far-red-induction_P Parameter: Age (day) Value: 7
  misc_feature: MA Experiment 20001451 PARAMETER Experiment Name: At_Far-red-induction_P Parameter: Light Value: Far-red vs. White
  misc_feature: MA Experiment 20001451 PARAMETER Experiment Name: At_Far-red-induction_P Parameter: Organism Value: A. thaliana
  misc_feature: MA Experiment 20001451 PARAMETER Experiment Name: At_Far-red-induction_P Parameter: Plant Line Value: Columbia
  misc_feature: MA Experiment 20001451 PARAMETER Experiment Name: At_Far-red-induction_P Parameter: Timepoint (hr) Value: 24
  misc_feature: MA Experiment 20001451 PARAMETER Experiment Name: At_Far-red-induction_P Parameter: Tissue Value: Whole Plant
  misc_feature: MA Experiment ID: 20001556 Result: Up-regulated in Transcription
  misc_feature: MA Experiment 20001556 PARAMETER Experiment Name: At_Drought_Soil_Dry_P Parameter: Age (day) Value: 26
  misc_feature: MA Experiment 20001556 PARAMETER Experiment Name: At_Drought_Soil_Dry_P Parameter: Organism Value: A. thaliana
  misc_feature: MA Experiment 20001556 PARAMETER Experiment Name: At_Drought_Soil_Dry_P Parameter: Plant Line Value: WS
  misc_feature: MA Experiment 20001556 PARAMETER Experiment Name: At_Drought_Soil_Dry_P Parameter: Post Timepoint (hr) Value: None
  misc_feature: MA Experiment 20001556 PARAMETER Experiment Name: At_Drought_Soil_Dry_P Parameter: Post-Treatment Value: None
  misc_feature: MA Experiment 20001556 PARAMETER Experiment Name: At_Drought_Soil_Dry_P Parameter: Timepoint (day) Value: 12
  misc_feature: MA Experiment 20001556 PARAMETER Experiment Name: At_Drought_Soil_Dry_P Parameter: Treatment Value: Drought vs. No Drought
  misc_feature: MA Experiment ID: 20001557 Result: Up-regulated in Transcription
  misc_feature: MA Experiment 20001557 PARAMETER Experiment Name: At_Drought_Soil_Dry_P Parameter: Age (day) Value: 27
  misc_feature: MA Experiment 20001557 PARAMETER Experiment Name: At_Drought_Soil_Dry_P Parameter: Organism Value: A. thaliana
  misc_feature: MA Experiment 20001557 PARAMETER Experiment Name: At_Drought_Soil_Dry_P Parameter: Plant Line Value: WS
  misc_feature: MA Experiment 20001557 PARAMETER Experiment Name: At_Drought_Soil_Dry_P Parameter: Post Timepoint (hr) Value: 3
  misc_feature: MA Experiment 20001557 PARAMETER Experiment Name: At_Drought_Soil_Dry_P Parameter: Post-Treatment Value: Re-Water vs. No Drought
  misc_feature: MA Experiment 20001557 PARAMETER Experiment Name: At_Drought_Soil_Dry_P Parameter: Timepoint (day) Value: 13
  misc_feature: MA Experiment 20001557 PARAMETER Experiment Name: At_Drought_Soil_Dry_P Parameter: Treatment Value: Drought vs. No Drought
  misc_feature: MA Experiment ID: 20001558 Result: Up-regulated in Transcription
  misc_feature: MA Experiment 20001558 PARAMETER Experiment Name: At_Drought_Soil_Dry_P Parameter: Age (day) Value: 27
  misc_feature: MA Experiment 20001558 PARAMETER Experiment Name: At_Drought_Soil_Dry_P Parameter: Organism Value: A. thaliana
  misc_feature: MA Experiment 20001558 PARAMETER Experiment Name: At_Drought_Soil_Dry_P Parameter: Plant Line Value: WS
  misc_feature: MA Experiment 20001558 PARAMETER Experiment Name: At_Drought_Soil_Dry_P Parameter: Post Timepoint (hr) Value: 6
  misc_feature: MA Experiment 20001558 PARAMETER Experiment Name: At_Drought_Soil_Dry_P Parameter: Post-Treatment Value: Re-Water vs. No Drought
  misc_feature: MA Experiment 20001558 PARAMETER Experiment Name: At_Drought_Soil_Dry_P Parameter: Timepoint (day) Value: 13
  misc_feature: MA Experiment 20001558 PARAMETER Experiment Name: At_Drought_Soil_Dry_P Parameter: Treatment Value: Drought vs. No Drought
atgacgtcatcactacctgttcgagctccttcctgggtctcttcccggagaattttcgaagagagactccaagaccttcccaaatgcgctaatctaaaccaagtgaaacagcttcacgctcagataatccgacgaaaccttcatgaagatctacacatagcaccgaagctaatctctgctctttctctctgtcgtcaaacgaatttagctgttagggtttttaatcaggttcaagaaccaaatgttcatctttgcaattctctgattagagctcatgcccagaactctcagccttatcaagctttcttcgttttctcagagatgcaaagatttggtctttttgctgataatttcacttacccgtttcttcttaaagcttgttctggtcaatcatggttacctgtggtgaagatgatgcataatcatatagaaaaattggggctttcttctgatatttatgtacccaatgctctcattgattgttattctagatgtggtggtttgggtgttagagatgctatgaagttgtttgagaagatgagtgaaagagatactgtgtcttggaattcgatgcttggtgggttagtgaaagctggggaattgagagatgcacggagactgttcgatgaaatgcctcagagggatttgattagttggaatactatgttggatggttatgctaggtgtagagagatgagtaaagcgtttgagttgtttgagaagatgcctgagagaaatactgtgtcttggtcgacgatggttatgggttatagtaaagctggggatatggaaatggctagagttatgtttgataaaatgccattgcctgctaaaaatgttgtcacttggacgataattattgctgggtatgcggagaaggggcttttgaaggaggctgatagattagttgaccaaatggtggcttcaggattgaaatttgatgctgcggctgtgattagtatcttggctgcttgtactgagtctggtttgctcagtttaggaatgaggattcactccatactgaaaaggtctaatctcggttcgaatgcttatgtgttgaatgcactacttgatatgtatgcaaaatgtggtaacctaaagaaagcgtttgatgtgtttaacgatatacccaagaaggatctcgtgtcttggaacactatgcttcatggtcttggcgttcatggccacggaaaggaagcaatcgagcttttttcgagaatgagaagggaagggattcggcctgataaagtcacgtttattgctgttttgtgttcctgtaatcacgcgggtctcattgatgaaggaatagattacttctactcaatggagaaagtatatgatcttgttccacaagttgaacactatggttgtcttgttgacctattaggtcgagtagggcggttaaaggaagcgataaaggttgtccaaacaatgccaatggagcccaatgttgttatttggggtgctcttcttggagcgtgcaggatgcataacgaggtggatattgctaaggaagttctggataatctggttaaattagacccttgtgatcctggaaactattcgcttctgtcaaatatttatgcagcagcagaggattgggaaggagttgctgacataagatcaaagatgaagagtatgggagtagagaaaccatctggagctagttcggttgaattggaggatgggatacatgaatttacagtgttcgacaaatcacacccaaaatctgatcaaatatatcagatgcttggtagtttaattgaacctccagatcctggtgagctggttgctgttcgataatctgcttagtttatgtccagatcattaggtattatatcgattataggctgtgagcatcagcactgtggcctaggccaaaaatttgtagttcattttccaaaggaacacaaagatggttttatccttgtaacgagttcgagtactgtatatagagcataatttataaatcttgag

SEQ ID NO: 36949 - protein, 600 aa, Arabidopsis thaliana
  peptide (1)..(600): Ceres Seq. ID no. 12604874
  misc_feature (217)..(251): Pfam Name: PPR repeat Pfam Description: PPR repeat
  misc_feature (151)..(587): Homolog of NCBI NO: 22328738 NR Description: similar to putative selenium-binding protein
  misc_feature (84)..(559): Homolog of NCBI NO: 34906898 NR Description: P0470A12.29 [Oryza sativa (japonica
  misc_feature (34)..(580): Homolog of NCBI NO: 15230593 NR Description: unknown protein; protein id: At3g12770.1
  misc_feature (34)..(580): Homolog of NCBI NO: 11994419 NR Description: selenium-binding protein-like [Arabidopsis
  misc_feature (73)..(587): Homolog of NCBI NO: 15235498 NR Description: hypothetical protein; protein id: At4g02750.1
  misc_feature (42)..(588): Homolog of NCBI NO: 15225365 NR Description: hypothetical protein; protein id: At2g44880.1
  misc_feature (32)..(587): Homolog of NCBI NO: 15231970 NR Description: unknown protein; protein id: At3g08820.1
  misc_feature (88)..(587): Homolog of NCBI NO: 15222280 NR Description: hypothetical protein; protein id: At1g13410.1
  misc_feature (23)..(556): Homolog of NCBI NO: 15240281 NR Description: putative protein; protein id: At5g37570.1
  misc_feature (23)..(587): Homolog of NCBI NO: 34906932 NR Description: selenium-binding protein-like
MTSSLPVRAPSWVSSRRIFEERLQDLPKCANLNQVKQLHAQIIRRNLHEDLHIAPKLISALSLCRQTNLAVRVFNQVQEPNVHLCNSLIRAHAQNSQPYQAFFVFSEMQRFGLFADNFTYPFLLKACSGQSWLPVVKMMHNHIEKLGLSSDIYVPNALIDCYSRCGGLGVRDAMKLFEKMSERDTVSWNSMLGGLVKAGELRDARRLFDEMPQRDLISWNTMLDGYARCREMSKAFELFEKMPERNTVSWSTMVMGYSKAGDMEMARVMFDKMPLPAKNVVTWTIIIAGYAEKGLLKEADRLVDQMVASGLKFDAAAVISILAACTESGLLSLGMRIHSILKRSNLGSNAYVLNALLDMYAKCGNLKKAFDVFNDIPKKDLVSWNTMLHGLGVHGHGKEAIELFSRMRREGIRPDKVTFIAVLCSCNHAGLIDEGIDYFYSMEKVYDLVPQVEHYGCLVDLLGRVGRLKEAIKVVQTMPMEPNVVIWGALLGACRMHNEVDIAKEVLDNLVKLDPCDPGNYSLLSNIYAAAEDWEGVADIRSKMKSMGVEKPSGASSVELEDGIHEFTVFDKSHPKSDQIYQMLGSLIEPPDPGELVAVR

SEQ ID NO: 36950 - protein, 493 aa, Arabidopsis thaliana
  peptide (1)..(493): Ceres Seq. ID no. 12604875
  misc_feature (110)..(144): Pfam Name: PPR repeat Pfam Description: PPR repeat
  misc_feature (44)..(480): Homolog of NCBI NO: 22328738 NR Description: similar to putative selenium-binding protein
  misc_feature (1)..(452): Homolog of NCBI NO: 34906898 NR Description: P0470A12.29 [Oryza sativa (japonica
  misc_feature (1)..(473): Homolog of NCBI NO: 15230593 NR Description: unknown protein; protein id: At3g12770.1
  misc_feature (1)..(473): Homolog of NCBI NO: 11994419 NR Description: selenium-binding protein-like [Arabidopsis
  misc_feature (1)..(480): Homolog of NCBI NO: 15235498 NR Description: hypothetical protein; protein id: At4g02750.1
  misc_feature (1)..(481): Homolog of NCBI NO: 15225365 NR Description: hypothetical protein; protein id: At2g44880.1
  misc_feature (1)..(480): Homolog of NCBI NO: 15231970 NR Description: unknown protein; protein id: At3g08820.1
  misc_feature (1)..(480): Homolog of NCBI NO: 15222280 NR Description: hypothetical protein; protein id: At1g13410.1
  misc_feature (1)..(449): Homolog of NCBI NO: 15240281 NR Description: putative protein; protein id: At5g37570.1
  misc_feature (1)..(480): Homolog of NCBI NO: 34906932 NR Description: selenium-binding protein-like
MQRFGLFADNFTYPFLLKACSGQSWLPVVKMMHNHIEKLGLSSDIYVPNALIDCYSRCGGLGVRDAMKLFEKMSERDTVSWNSMLGGLVKAGELRDARRLFDEMPQRDLISWNTMLDGYARCREMSKAFELFEKMPERNTVSWSTMVMGYSKAGDMEMARVMFDKMPLPAKNVVTWTIIIAGYAEKGLLKEADRLVDQMVASGLKFDAAAVISILAACTESGLLSLGMRIHSILKRSNLGSNAYVLNALLDMYAKCGNLKKAFDVFNDIPKKDLVSWNTMLHGLGVHGHGKEAIELFSRMRREGIRPDKVTFIAVLCSCNHAGLIDEGIDYFYSMEKVYDLVPQVEHYGCLVDLLGRVGRLKEAIKVVQTMPMEPNVVIWGALLGACRMHNEVDIAKEVLDNLVKLDPCDPGNYSLLSNIYAAAEDWEGVADIRSKMKSMGVEKPSGASSVELEDGIHEFTVFDKSHPKSDQIYQMLGSLIEPPDPGELVAVR

SEQ ID NO: 36951 - protein, 463 aa, Arabidopsis thaliana
  peptide (1)..(463): Ceres Seq. ID no. 12604876
  misc_feature (80)..(114): Pfam Name: PPR repeat Pfam Description: PPR repeat
  misc_feature (14)..(450): Homolog of NCBI NO: 22328738 NR Description: similar to putative selenium-binding protein
  misc_feature (1)..(422): Homolog of NCBI NO: 34906898 NR Description: P0470A12.29 [Oryza sativa (japonica
  misc_feature (1)..(443): Homolog of NCBI NO: 15230593 NR Description: unknown protein; protein id: At3g12770.1
  misc_feature (1)..(443): Homolog of NCBI NO: 11994419 NR Description: selenium-binding protein-like [Arabidopsis
  misc_feature (1)..(450): Homolog of NCBI NO: 15235498 NR Description: hypothetical protein; protein id: At4g02750.1
  misc_feature (1)..(451): Homolog of NCBI NO: 15225365 NR Description: hypothetical protein; protein id: At2g44880.1
  misc_feature (1)..(450): Homolog of NCBI NO: 15231970 NR Description: unknown protein; protein id: At3g08820.1
  misc_feature (1)..(450): Homolog of NCBI NO: 15222280 NR Description: hypothetical protein; protein id: At1g13410.1
  misc_feature (1)..(419): Homolog of NCBI NO: 15240281 NR Description: putative protein; protein id: At5g37570.1
  misc_feature (1)..(450): Homolog of NCBI NO: 34906932 NR Description: selenium-binding protein-like
MMHNHIEKLGLSSDIYVPNALIDCYSRCGGLGVRDAMKLFEKMSERDTVSWNSMLGGLVKAGELRDARRLFDEMPQRDLISWNTMLDGYARCREMSKAFELFEKMPERNTVSWSTMVMGYSKAGDMEMARVMFDKMPLPAKNVVTWTIIIAGYAEKGLLKEADRLVDQMVASGLKFDAAAVISILAACTESGLLSLGMRIHSILKRSNLGSNAYVLNALLDMYAKCGNLKKAFDVFNDIPKKDLVSWNTMLHGLGVHGHGKEAIELFSRMRREGIRPDKVTFIAVLCSCNHAGLIDEGIDYFYSMEKVYDLVPQVEHYGCLVDLLGRVGRLKEAIKVVQTMPMEPNVVIWGALLGACRMHNEVDIAKEVLDNLVKLDPCDPGNYSLLSNIYAAAEDWEGVADIRSKMKSMGVEKPSGASSVELEDGIHEFTVFDKSHPKSDQIYQMLGSLIEPPDPGELVAVR

SEQ ID NO: 36952 - DNA, 561 bp, Arabidopsis thaliana
  misc_feature (1)..(561): Ceres Seq. ID no. 12393836
  misc_feature: MA Experiment ID: 20000184 Result: Up-regulated in Transcription
  misc_feature: MA Experiment 20000184 PARAMETER Experiment Name: At_Shoots__P Parameter: Age (day) Value: 7
  misc_feature: MA Experiment 20000184 PARAMETER Experiment Name: At_Shoots__P Parameter: Tissue Value: Shoots vs. Whole Plant
aaaaacacagaacaacggaaaaggcaaatcgggatcagccaccggcgatgaaggaagacatggataagatggtggcggtagggctcgtatggggagccaccaatgctctgatccgtcgtggcgctcttgcctgggataaaacaaagtcttcttcgacaacagaatctcattctcctcctcttcagatccgccgcaaaatcatgattgctctccgcgactggatcaatctcctcctcttctggcaatactcaattcctttcctcataaacctctccgcctccgccacattcttcgcccttctcagtcacgctcccatctctcttgccgttccggtgactaacgccacaacctttgccgcaaccgccgcttttgggatccttttaggggaagaaactcaaatcggacttgctttgttaggtacgagctttattgtatttggaatttggctttgtgttctgtgaaattcgaattttgtaaaaccgtgactctgtttctgtgagatctattttgccaaagaactatttgtgtaccatcttttgagaattttagctaactctctgc

SEQ ID NO: 36953 - protein, 152 aa, Arabidopsis thaliana
  peptide (1)..(152): Ceres Seq. ID no. 12393837
  misc_feature (23)..(151): Homolog of NCBI NO: 21361814 NR Description: hypothetical protein RP4-622L5 [Homo sapiens]
  misc_feature (23)..(151): Homolog of NCBI NO: 13436137 NR Description: Similar to RIKEN cDNA 4933407D05 gene [Homo
  misc_feature (22)..(151): Homolog of NCBI NO: 24652124 NR Description: CG12929-PA [Drosophila melanogaster]
  misc_feature (23)..(151): Homolog of NCBI NO: 28829061 NR Description: similar to putative protein
  misc_feature (16)..(152): Homolog of NCBI NO: 15239774 NR Description: putative protein
KHRTTEKANRDQPPAMKEDMDKMVAVGLVWGATNALIRRGALAWDKTKSSSTTESHSPPLQIRRKIMIALRDWINLLLFWQYSIPFLINLSASATFFALLSHAPISLAVPVTNATTFAATAAFGILLGEETQIGLALLGTSFIVFGIWLCVL

SEQ ID NO: 36954 - protein, 137 aa, Arabidopsis thaliana
  peptide (1)..(137): Ceres Seq. ID no. 12393838
  misc_feature (8)..(136): Homolog of NCBI NO: 21361814 NR Description: hypothetical protein RP4-622L5 [Homo sapiens]
  misc_feature (8)..(136): Homolog of NCBI NO: 13436137 NR Description: Similar to RIKEN cDNA 4933407D05 gene [Homo
  misc_feature (7)..(136): Homolog of NCBI NO: 24652124 NR Description: CG12929-PA [Drosophila melanogaster]
  misc_feature (8)..(136): Homolog of NCBI NO: 28829061 NR Description: similar to putative protein
  misc_feature (1)..(137): Homolog of NCBI NO: 15239774 NR Description: putative protein
MKEDMDKMVAVGLVWGATNALIRRGALAWDKTKSSSTTESHSPPLQIRRKIMIALRDWINLLLFWQYSIPFLINLSASATFFALLSHAPISLAVPVTNATTFAATAAFGILLGEETQIGLALLGTSFIVFGIWLCVL

SEQ ID NO: 36955 - protein, 133 aa, Arabidopsis thaliana
  peptide (1)..(133): Ceres Seq. ID no. 12393839
  misc_feature (4)..(132): Homolog of NCBI NO: 21361814 NR Description: hypothetical protein RP4-622L5 [Homo sapiens]
  misc_feature (4)..(132): Homolog of NCBI NO: 13436137 NR Description: Similar to RIKEN cDNA 4933407D05 gene [Homo
  misc_feature (3)..(132): Homolog of NCBI NO: 24652124 NR Description: CG12929-PA [Drosophila melanogaster]
  misc_feature (4)..(132): Homolog of NCBI NO: 28829061 NR Description: similar to putative protein
  misc_feature (1)..(133): Homolog of NCBI NO: 15239774 NR Description: putative protein
MDKMVAVGLVWGATNALIRRGALAWDKTKSSSTTESHSPPLQIRRKIMIALRDWINLLLFWQYSIPFLINLSASATFFALLSHAPISLAVPVTNATTFAATAAFGILLGEETQIGLALLGTSFIVFGIWLCVL

SEQ ID NO: 36956 - DNA, 1883 bp, Arabidopsis thaliana
  misc_feature (1)..(1883): Ceres Seq. ID no. 13503035
  misc_feature: MA Experiment ID: 20000166 Result: Up-regulated in Transcription
  misc_feature: MA Experiment 20000166 PARAMETER Experiment Name: At_100uM_ABA_P Parameter: Age (day) Value: 14
  misc_feature: MA Experiment 20000166 PARAMETER Experiment Name: At_100uM_ABA_P Parameter: Organism Value: A. thaliana
  misc_feature: MA Experiment 20000166 PARAMETER Experiment Name: At_100uM_ABA_P Parameter: Plant Line Value: WS
  misc_feature: MA Experiment 20000166 PARAMETER Experiment Name: At_100uM_ABA_P Parameter: Timepoint (hr) Value: 1
  misc_feature: MA Experiment 20000166 PARAMETER Experiment Name: At_100uM_ABA_P Parameter: Tissue Value: Aerial
  misc_feature: MA Experiment 20000166 PARAMETER Experiment Name: At_100uM_ABA_P Parameter: Treatment Value: 100uM ABA vs. No Treatment
  misc_feature: MA Experiment ID: 20000182 Result: Up-regulated in Transcription
  misc_feature: MA Experiment 20000182 PARAMETER Experiment Name: At_2mM_SA_P Parameter: Age (day) Value: 14
  misc_feature: MA Experiment 20000182 PARAMETER Experiment Name: At_2mM_SA_P Parameter: Organism Value: A. thaliana
  misc_feature: MA Experiment 20000182 PARAMETER Experiment Name: At_2mM_SA_P Parameter: Plant Line Value: WS
  misc_feature: MA Experiment 20000182 PARAMETER Experiment Name: At_2mM_SA_P Parameter: Timepoint (hr) Value: 6
  misc_feature: MA Experiment 20000182 PARAMETER Experiment Name: At_2mM_SA_P Parameter: Tissue Value: Aerial
  misc_feature: MA Experiment 20000182 PARAMETER Experiment Name: At_2mM_SA_P Parameter: Treatment Value: 2mM SA vs. No Treatment
  misc_feature: MA Experiment ID: 20000227 Result: Up-regulated in Transcription
  misc_feature: MA Experiment 20000227 PARAMETER Experiment Name: At_Root-Tips-vs-Tops_P Parameter: Tissue Value: Root Tips vs. Root Tops
  misc_feature: MA Experiment ID: 20000794 Result: Up-regulated in Transcription
  misc_feature: MA Experiment 20000794 PARAMETER Experiment Name: At_Petals_P Parameter: Age (day) Value: 23-25 days
  misc_feature: MA Experiment 20000794 PARAMETER Experiment Name: At_Petals_P Parameter: Plant Line Value: WS
  misc_feature: MA Experiment 20000794 PARAMETER Experiment Name: At_Petals_P Parameter: Tissue Value: Petals vs. Whole plant
  misc_feature: MA Experiment ID: 20001247 Result: Down-regulated in Transcription
  misc_feature: MA Experiment 20001247 PARAMETER Experiment Name: At_Far-red-induction_P Parameter: Age (day) Value: 7
  misc_feature: MA Experiment 20001247 PARAMETER Experiment Name: At_Far-red-induction_P Parameter: Light Value: Far-red vs. White
  misc_feature: MA Experiment 20001247 PARAMETER Experiment Name: At_Far-red-induction_P Parameter: Organism Value: A. thaliana
  misc_feature: MA Experiment 20001247 PARAMETER Experiment Name: At_Far-red-induction_P Parameter: Plant Line Value: Columbia
  misc_feature: MA Experiment 20001247 PARAMETER Experiment Name: At_Far-red-induction_P Parameter: Timepoint (hr) Value: 1
  misc_feature: MA Experiment 20001247 PARAMETER Experiment Name: At_Far-red-induction_P Parameter: Tissue Value: Whole Plant
  misc_feature: MA Experiment ID: 20001555 Result: Up-regulated in Transcription
  misc_feature: MA Experiment 20001555 PARAMETER Experiment Name: At_Drought_Soil_Dry_P Parameter: Age (day) Value: 24
  misc_feature: MA Experiment 20001555 PARAMETER Experiment Name: At_Drought_Soil_Dry_P Parameter: Organism Value: A. thaliana
  misc_feature: MA Experiment 20001555 PARAMETER Experiment Name: At_Drought_Soil_Dry_P Parameter: Plant Line Value: WS
  misc_feature: MA Experiment 20001555 PARAMETER Experiment Name: At_Drought_Soil_Dry_P Parameter: Post Timepoint (hr) Value: None
  misc_feature: MA Experiment 20001555 PARAMETER Experiment Name: At_Drought_Soil_Dry_P Parameter: Post-Treatment Value: None
  misc_feature: MA Experiment 20001555 PARAMETER Experiment Name: At_Drought_Soil_Dry_P Parameter: Timepoint (day) Value: 10
  misc_feature: MA Experiment 20001555 PARAMETER Experiment Name: At_Drought_Soil_Dry_P Parameter: Treatment Value: Drought vs. No Drought
  misc_feature: MA Experiment ID: 20001905 Result: Up-regulated in Transcription
  misc_feature: MA Experiment 20001905 PARAMETER Experiment Name: At_Drought_Reproduction_P Parameter: Age (day) Value: 40
  misc_feature: MA Experiment 20001905 PARAMETER Experiment Name: At_Drought_Reproduction_P Parameter: Organism Value: A. thaliana
  misc_feature: MA Experiment 20001905 PARAMETER Experiment Name: At_Drought_Reproduction_P Parameter: Plant Line Value: WS
  misc_feature: MA Experiment 20001905 PARAMETER Experiment Name: At_Drought_Reproduction_P Parameter: Timepoint (day) Value: 10
  misc_feature: MA Experiment 20001905 PARAMETER Experiment Name: At_Drought_Reproduction_P Parameter: Tissue Value: Rosettes
  misc_feature: MA Experiment 20001905 PARAMETER Experiment Name: At_Drought_Reproduction_P Parameter: Treatment Value: Drought vs. No Drought
aagaagtcgttctgatttcgtctttcttctctgtaaagtcgtttctctctccaatttttttgttttcctgcgaaaatcaaagagactaacacagagagcttattcaattttctttcgatctgtgaaatctcagattttgatttggaaagttgtggagatttcagctgttcttctttgttgttgggtctatttctgggtttcttcgagctgatttatagagtttggttctccgatgatagagctaatctgcttgagatagctactgtattgagagttcttctgaggatctttatttttctttacatcttgtgaggaaaatgtctgcgaagatcaaaggagagtattcttctagaagcttcgtatcgagaaaatggacgatattactctgcttaggaagcttctgcgtcggaatgttcttcaccaatcggatgtggaatattccggaatctaaaggcatgtctcatccatctgtaaccgaagctgagagattgaagctggtctctgaaggctgcaatccaaaagctaaagaagtcaaaagagatcctcaggctttgtttggagaagtagccaatacacatattgcattacagacattggataagaccatttcaagcttagagatggagttagctgcagcaaggtcagttcaggaatctttacaaaacggtgctcctttatcagatgatatggggaagaagcaacctcaggaacagagacggtttttgatggtcgttgggattaatacagcttttagtagcagaaagagaagagattctattcgagcaacttggatgcctcaaggtgaaaaaaggaagagactagaagaggagaaggggattatcatccggtttgtcattggtcacagtgccacgaccgggggaattctagatcgagctatagaagctgaggacaggaagcatggagatttcttgagactggaccatgttgaagggtacctagagttgtcaggcaagacgaaaacttacttttctacagcattttcgatgtgggatgcagatttctatgtcaaagtagatgatgatgttcatgtcaatatagcaactcttggggaaactcttgttagacaccggaaaaaaccacgggtctatattggttgcatgaaatctggccctgtcctctctcaaaaaggggtgaggtaccatgagccagagtactggaagtttggtgaaaatgggaacaaatacttccgtcatgctactggacagttatacgccatttcaagggacttggcttcttatatatcaatcaatcagcatgttcttcacaagtatgcgaacgaagatgtttcgctaggagcttggtttatcgggattgatgttaaacacattgatgatagaagattatgctgcggaactcctcctgattgcgaatggaaagcacaagctggaaacatctgtgtagcatcattcgactggagctgcagcggaatctgcagatccgcagatcgcatcaaagaggttcatagacgttgcggtgaaggtgaaaaggctctttggagtgccacgttttgacatataaacagaggaatggtaaaaacataacggttttgctcagcccccaaaaacagctcaaagatcagaggaaggtcgtccagatatacaattccaagagatatccacttttgtattcataggtacatagaatagaagaggcaggaaggattagagataagtgtgaaaacctctggcaagaatcgcaattgcgtattgtgattgtggcgtttccattttggtataaggaaactgaacactacagtgaacacccctgctgctttgttcgttttgggtggcttgaaaatgaagcaacttgtggatttttacatcaaatacaaaacactatgccctgattcttttggatccata

SEQ ID NO: 36957 - protein, 404 aa, Arabidopsis thaliana
  peptide (1)..(404): Ceres Seq. ID no. 13503036
  misc_feature (149)..(347): Pfam Name: Galactosyltransferase Pfam Description: Galactosyltransferase
  misc_feature (149)..(347): Pfam Name: Galactosyltransferase Pfam Description: Galactosyltransferase
  misc_feature (11)..(401): Homolog of NCBI NO: 30699558 NR Description: Avr9 elicitor response protein -related
  misc_feature (11)..(401): Homolog of NCBI NO: 12323294 NR Description: putative (Avr9) elicitor response protein;
  misc_feature (7)..(404): Homolog of NCBI NO: 15223337 NR Description: galactosyltransferase family [Arabidopsis
  misc_feature (5)..(404): Homolog of NCBI NO: 4138265 NR Description: Avr9 elicitor response protein [Nicotiana tabacum]
  misc_feature (1)..(128): Homolog of NCBI NO: 15221085 NR Description: galactosyltransferase family [Arabidopsis
  misc_feature (11)..(401): Homolog of NCBI NO: 30699558 NR Description: Avr9 elicitor response protein -related
  misc_feature (7)..(404): Homolog of NCBI NO: 15223337 NR Description: galactosyltransferase family [Arabidopsis
  misc_feature (1)..(128): Homolog of NCBI NO: 15221085 NR Description: galactosyltransferase family [Arabidopsis
  misc_feature (1)..(404): Homolog of NCBI NO: 15220440 NR Description: galactosyltransferase family [Arabidopsis
  misc_feature (1)..(404): Homolog of NCBI NO: 15225684 NR Description: galactosyltransferase family [Arabidopsis
  misc_feature (10)..(404): Homolog of NCBI NO: 18416895 NR Description: galactosyltransferase family [Arabidopsis
  misc_feature (10)..(404): Homolog of NCBI NO: 7485336 NR Description: hypothetical protein F10M23.280 - Arabidopsis
  misc_feature (93)..(402): Homolog of NCBI NO: 15221085 NR Description: galactosyltransferase family [Arabidopsis
  misc_feature (5)..(404): Homolog of NCBI NO: 4138265 NR Description: Avr9 elicitor response protein [Nicotiana tabacum]
  misc_feature (11)..(401): Homolog of NCBI NO: 12323294 NR Description: putative (Avr9) elicitor response protein;
  misc_feature (93)..(402): Homolog of NCBI NO: 15221085 NR Description: galactosyltransferase family [Arabidopsis
  misc_feature (10)..(404): Homolog of NCBI NO: 7485336 NR Description: hypothetical protein F10M23.280 - Arabidopsis
  misc_feature (10)..(404): Homolog of NCBI NO: 18416895 NR Description: galactosyltransferase family [Arabidopsis
  misc_feature (1)..(404): Homolog of NCBI NO: 15225684 NR Description: galactosyltransferase family [Arabidopsis
  misc_feature (1)..(404): Homolog of NCBI NO: 15220440 NR Description: galactosyltransferase family [Arabidopsis
MSAKIKGEYSSRSFVSRKWTILLCLGSFCVGMFFTNRMWNIPESKGMSHPSVTEAERLKLVSEGCNPKAKEVKRDPQALFGEVANTHIALQTLDKTISSLEMELAAARSVQESLQNGAPLSDDMGKKQPQEQRRFLMVVGINTAFSSRKRRDSIRATWMPQGEKRKRLEEEKGIIIRFVIGHSATTGGILDRAIEAEDRKHGDFLRLDHVEGYLELSGKTKTYFSTAFSMWDADFYVKVDDDVHVNIATLGETLVRHRKKPRVYIGCMKSGPVLSQKGVRYHEPEYWKFGENGNKYFRHATGQLYAISRDLASYISINQHVLHKYANEDVSLGAWFIGIDVKHIDDRRLCCGTPPDCEWKAQAGNICVASFDWSCSGICRSADRIKEVHRRCGEGEKALWSATF

SEQ ID NO: 36958 - protein, 373 aa, Arabidopsis thaliana
  peptide (1)..(373): Ceres Seq. ID no. 13503037
  misc_feature (118)..(316): Pfam Name: Galactosyltransferase Pfam Description: Galactosyltransferase
  misc_feature (118)..(316): Pfam Name: Galactosyltransferase Pfam Description: Galactosyltransferase
  misc_feature (1)..(370): Homolog of NCBI NO: 30699558 NR Description: Avr9 elicitor response protein -related
  misc_feature (1)..(370): Homolog of NCBI NO: 12323294 NR Description: putative (Avr9) elicitor response protein;
  misc_feature (1)..(373): Homolog of NCBI NO: 15223337 NR Description: galactosyltransferase family [Arabidopsis
  misc_feature (1)..(373): Homolog of NCBI NO: 4138265 NR Description: Avr9 elicitor response protein [Nicotiana tabacum]
  misc_feature (1)..(97): Homolog of NCBI NO: 15221085 NR Description: galactosyltransferase family [Arabidopsis
  misc_feature (1)..(370): Homolog of NCBI NO: 30699558 NR Description: Avr9 elicitor response protein -related
  misc_feature (1)..(373): Homolog of NCBI NO: 15223337 NR Description: galactosyltransferase family [Arabidopsis
  misc_feature (1)..(97): Homolog of NCBI NO: 15221085 NR Description: galactosyltransferase family [Arabidopsis
  misc_feature (1)..(373): Homolog of NCBI NO: 15220440 NR Description: galactosyltransferase family [Arabidopsis
  misc_feature (1)..(373): Homolog of NCBI NO: 15225684 NR Description: galactosyltransferase family [Arabidopsis
  misc_feature (1)..(373): Homolog of NCBI NO: 18416895 NR Description: galactosyltransferase family [Arabidopsis
  misc_feature (1)..(373): Homolog of NCBI NO: 7485336 NR Description: hypothetical protein F10M23.280 - Arabidopsis
  misc_feature (62)..(371): Homolog of NCBI NO: 15221085 NR Description: galactosyltransferase family [Arabidopsis
  misc_feature (1)..(373): Homolog of NCBI NO: 4138265 NR Description: Avr9 elicitor response protein [Nicotiana tabacum]
  misc_feature (1)..(370): Homolog of NCBI NO: 12323294 NR Description: putative (Avr9) elicitor response protein;
  misc_feature (62)..(371): Homolog of NCBI NO: 15221085 NR Description: galactosyltransferase family [Arabidopsis
  misc_feature (1)..(373): Homolog of NCBI NO: 7485336 NR Description: hypothetical protein F10M23.280 - Arabidopsis
  misc_feature (1)..(373): Homolog of NCBI NO: 18416895 NR Description: galactosyltransferase family [Arabidopsis
  misc_feature (1)..(373): Homolog of NCBI NO: 15225684 NR Description: galactosyltransferase family [Arabidopsis
  misc_feature (1)..(373): Homolog of NCBI NO: 15220440 NR Description: galactosyltransferase family [Arabidopsis
MFFTNRMWNIPESKGMSHPSVTEAERLKLVSEGCNPKAKEVKRDPQALFGEVANTHIALQTLDKTISSLEMELAAARSVQESLQNGAPLSDDMGKKQPQEQRRFLMVVGINTAFSSRKRRDSIRATWMPQGEKRKRLEEEKGIIIRFVIGHSATTGGILDRAIEAEDRKHGDFLRLDHVEGYLELSGKTKTYFSTAFSMWDADFYVKVDDDVHVNIATLGETLVRHRKKPRVYIGCMKSGPVLSQKGVRYHEPEYWKFGENGNKYFRHATGQLYAISRDLASYISINQHVLHKYANEDVSLGAWFIGIDVKHIDDRRLCCGTPPDCEWKAQAGNICVASFDWSCSGICRSADRIKEVHRRCGEGEKALWSATF

SEQ ID NO: 36959 - protein, 367 aa, Arabidopsis thaliana
  peptide (1)..(367): Ceres Seq. ID no. 13503038
  misc_feature (112)..(310): Pfam Name: Galactosyltransferase Pfam Description: Galactosyltransferase
  misc_feature (112)..(310): Pfam Name: Galactosyltransferase Pfam Description: Galactosyltransferase
  misc_feature (1)..(364): Homolog of NCBI NO: 30699558 NR Description: Avr9 elicitor response protein -related
  misc_feature (1)..(364): Homolog of NCBI NO: 12323294 NR Description: putative (Avr9) elicitor response protein;
  misc_feature (1)..(367): Homolog of NCBI NO: 15223337 NR Description: galactosyltransferase family [Arabidopsis
  misc_feature (1)..(367): Homolog of NCBI NO: 4138265 NR Description: Avr9 elicitor response protein [Nicotiana tabacum]
  misc_feature (1)..(91): Homolog of NCBI NO: 15221085 NR Description: galactosyltransferase family [Arabidopsis
  misc_feature (1)..(364): Homolog of NCBI NO: 30699558 NR Description: Avr9 elicitor response protein -related
  misc_feature (1)..(367): Homolog of NCBI NO: 15223337 NR Description: galactosyltransferase family [Arabidopsis
  misc_feature (1)..(91): Homolog of NCBI NO: 15221085 NR Description: galactosyltransferase family [Arabidopsis
  misc_feature (1)..(367): Homolog of NCBI NO: 15220440 NR Description: galactosyltransferase family [Arabidopsis
  misc_feature (1)..(367): Homolog of NCBI NO: 15225684 NR Description: galactosyltransferase family [Arabidopsis
  misc_feature (1)..(367): Homolog of NCBI NO: 18416895 NR Description: galactosyltransferase family [Arabidopsis
  misc_feature (1)..(367): Homolog of NCBI NO: 7485336 NR Description: hypothetical protein F10M23.280 - Arabidopsis
  misc_feature (56)..(365): Homolog of NCBI NO: 15221085 NR Description: galactosyltransferase family [Arabidopsis
  misc_feature (1)..(367): Homolog of NCBI NO: 4138265 NR Description: Avr9 elicitor response protein [Nicotiana tabacum]
  misc_feature (1)..(364): Homolog of NCBI NO: 12323294 NR Description: putative (Avr9) elicitor response protein;
  misc_feature (56)..(365): Homolog of NCBI NO: 15221085 NR Description: galactosyltransferase family [Arabidopsis
  misc_feature (1)..(367): Homolog of NCBI NO: 7485336 NR Description: hypothetical protein F10M23.280 - Arabidopsis
  misc_feature (1)..(367): Homolog of NCBI NO: 18416895 NR Description: galactosyltransferase family [Arabidopsis
  misc_feature (1)..(367): Homolog of NCBI NO: 15225684 NR Description: galactosyltransferase family [Arabidopsis
  misc_feature (1)..(367): Homolog of NCBI NO: 15220440 NR Description: galactosyltransferase family [Arabidopsis
MWNIPESKGMSHPSVTEAERLKLVSEGCNPKAKEVKRDPQALFGEVANTHIALQTLDKTISSLEMELAAARSVQESLQNGAPLSDDMGKKQPQEQRRFLMVVGINTAFSSRKRRDSIRATWMPQGEKRKRLEEEKGIIIRFVIGHSATTGGILDRAIEAEDRKHGDFLRLDHVEGYLELSGKTKTYFSTAFSMWDADFYVKVDDDVHVNIATLGETLVRHRKKPRVYIGCMKSGPVLSQKGVRYHEPEYWKFGENGNKYFRHATGQLYAISRDLASYISINQHVLHKYANEDVSLGAWFIGIDVKHIDDRRLCCGTPPDCEWKAQAGNICVASFDWSCSGICRSADRIKEVHRRCGEGEKALWSATF

SEQ ID NO: 36960 - DNA, 1275 bp, Arabidopsis thaliana
  misc_feature (1)..(1275): Ceres Seq. ID no. 13575189
  misc_feature: MA Experiment ID: 108463 Result: Up-regulated in Transcription
  misc_feature: MA Experiment 108463 PARAMETER Experiment Name: At_Germinating_Seeds_cDNA_P Parameter: Age (day) Value: 3 vs. 0
  misc_feature: MA Experiment 108463 PARAMETER Experiment Name: At_Germinating_Seeds_cDNA_P Parameter: Tissue Value: Germinating Seeds
  misc_feature: MA Experiment ID: 20000184 Result: Down-regulated in Transcription
  misc_feature: MA Experiment 20000184 PARAMETER Experiment Name: At_Shoots__P Parameter: Age (day) Value: 7
  misc_feature: MA Experiment 20000184 PARAMETER Experiment Name: At_Shoots__P Parameter: Tissue Value: Shoots vs. Whole Plant
  misc_feature: MA Experiment ID: 20000224 Result: Up-regulated in Transcription
  misc_feature: MA Experiment ID: 20000234 Result: Down-regulated in Transcription
  misc_feature: MA Experiment 20000234 PARAMETER Experiment Name: At_Siliques_P Parameter: Age (day) Value: 21
  misc_feature: MA Experiment 20000234 PARAMETER Experiment Name: At_Siliques_P Parameter: Organism Value: A. thaliana
  misc_feature: MA Experiment 20000234 PARAMETER Experiment Name: At_Siliques_P Parameter: Plant Line Value: WS
  misc_feature: MA Experiment 20000234 PARAMETER Experiment Name: At_Siliques_P Parameter: Tissue Value: Less Than 5mm Siliques vs. Whole Plant
  misc_feature: MA Experiment ID: 20000264 Result: Down-regulated in Transcription
  misc_feature: MA Experiment 20000264 PARAMETER Experiment Name: At_Open_Flower_P Parameter: Age (day) Value: 21
  misc_feature: MA Experiment 20000264 PARAMETER Experiment Name: At_Open_Flower_P Parameter: Plant Line Value: WS
  misc_feature: MA Experiment 20000264 PARAMETER Experiment Name: At_Open_Flower_P Parameter: Tissue Value: Open Flower vs. Whole Plant
  misc_feature: MA Experiment ID: 20000265 Result: Down-regulated in Transcription
  misc_feature: MA Experiment 20000265 PARAMETER Experiment Name: At_Open_Flower_P Parameter: Age (day) Value: 21
  misc_feature: MA Experiment 20000265 PARAMETER Experiment Name: At_Open_Flower_P Parameter: Plant Line Value: WS
  misc_feature: MA Experiment 20000265 PARAMETER Experiment Name: At_Open_Flower_P Parameter: Tissue Value: Closed Flower vs. Whole Plant
  misc_feature: MA Experiment ID: 20000286 Result: Down-regulated in Transcription
  misc_feature: MA Experiment 20000286 PARAMETER Experiment Name: At_Open_Flower_P Parameter: Age (day) Value: 21
  misc_feature: MA Experiment 20000286 PARAMETER Experiment Name: At_Open_Flower_P Parameter: Plant Line Value: WS
  misc_feature: MA Experiment 20000286 PARAMETER Experiment Name: At_Open_Flower_P Parameter: Tissue Value: Half Open vs. Whole Plant
  misc_feature: MA Experiment ID: 20001247 Result: Up-regulated in Transcription
  misc_feature: MA Experiment 20001247 PARAMETER Experiment Name: At_Far-red-induction_P Parameter: Age (day) Value: 7
  misc_feature: MA Experiment 20001247 PARAMETER Experiment Name: At_Far-red-induction_P Parameter: Light Value: Far-red vs. White
  misc_feature: MA Experiment 20001247 PARAMETER Experiment Name: At_Far-red-induction_P Parameter: Organism Value: A. thaliana
  misc_feature: MA Experiment 20001247 PARAMETER Experiment Name: At_Far-red-induction_P Parameter: Plant Line Value: Columbia
  misc_feature: MA Experiment 20001247 PARAMETER Experiment Name: At_Far-red-induction_P Parameter: Timepoint (hr) Value: 1
  misc_feature: MA Experiment 20001247 PARAMETER Experiment Name: At_Far-red-induction_P Parameter: Tissue Value: Whole Plant
  misc_feature: MA Experiment ID: 20001451 Result: Up-regulated in Transcription
  misc_feature: MA Experiment 20001451 PARAMETER Experiment Name: At_Far-red-induction_P Parameter: Age (day) Value: 7
  misc_feature: MA Experiment 20001451 PARAMETER Experiment Name: At_Far-red-induction_P Parameter: Light Value: Far-red vs. White
  misc_feature: MA Experiment 20001451 PARAMETER Experiment Name: At_Far-red-induction_P Parameter: Organism Value: A. thaliana
  misc_feature: MA Experiment 20001451 PARAMETER Experiment Name: At_Far-red-induction_P Parameter: Plant Line Value: Columbia
  misc_feature: MA Experiment 20001451 PARAMETER Experiment Name: At_Far-red-induction_P Parameter: Timepoint (hr) Value: 24
  misc_feature: MA Experiment 20001451 PARAMETER Experiment Name: At_Far-red-induction_P Parameter: Tissue Value: Whole Plant
aaactattacttaaataataaaaaaataagagccatcgtgacttcgagagaagaagccagcaaggaacgatggagattattacggcatcatcatcatcatcatcatcatttggaaattaggcttgttgtttgatttcgctacgagaaaatggacaagtacgagcttgttaaagacatcggtgctgggaattttggagtggcgaggctcatgagagtcaaaaactccaaggaactcgttgctatgaagtacatcgagcgtggacctaagattgatgagaacgtggcgagagagattattaaccacagatcacttcgtcatcccaatattatccggtttaaggaggtggttttgacaccaacgcacatcgccattgctatggaatatgctgctggcggtgagctatttgagcgtatatgtagcgctggaagattcagtgaggatgaggcaagatactttttccagcagcttatctcaggagtcagctattgtcatgctatgcaaatatgccacagagatctgaagcttgaaaataccctcttagatggaagtcctgctccacgcctgaagatctgtgattttggttattccaagtcctcactgttgcactctatgcccaaatcaactgttggaactccagcatatattgcacctgaggttctttctcgcggagagtatgatggcaagatggctgatgtatggtcttgtggtgtgactctttatgtcatgctggtgggagcatacccatttgaagaccaagaggatcccaaaaacttcaaaaaaacaatacaaagaataatggctgtcaagtacaagatcccggactatgtccatatctcacaagattgcaaacatctcctctcccgtatatttgtcaccaactcgaataagaggattacgataggtgacatcaagaaacatccatggttcctaaagaacctgccaagggaacttacagaaatagctcaagctgcatacttcaggaaagagaacccgacattctcactccaaagcgtcgaagagataatgaagattgtggaagaggcaaaaactccagctcgtgtttctcggtcgattggagcatttgggtggggaggaggagaagatgccgagggcaaggaggaagatgcagaggaagaagttgaggaagtagaagaagaagaagacgaagaagatgagtatgataagacggtgaagcaagtgcatgctagcatgggagaagtccgagtcagttaaaaaaaaagattgattttcttttcacgaaagtattctaaaac

SEQ ID NO: 36961 - protein, 361 aa, Arabidopsis thaliana
  peptide (1)..(361): Ceres Seq. ID no. 13575190
  misc_feature (4)..(260): Pfam Name: Protein kinase domain Pfam Description: Protein kinase domain
  misc_feature (1)..(361): Homolog of NCBI NO: 19568098 NR Description: osmotic stress-activated protein kinase
  misc_feature (1)..(358): Homolog of NCBI NO: 2129803 NR Description: probable serine/threonine-specific protein kinase
  misc_feature (1)..(361): Homolog of NCBI NO: 1362026 NR Description: probable serine/threonine-specific protein kinase
  misc_feature (1)..(361): Homolog of NCBI NO: 15220251 NR Description: serine/threonine protein kinase, putative
  misc_feature (1)..(361): Homolog of NCBI NO: 21618062 NR Description: putative serine/threonine-protein kinase
  misc_feature (1)..(361): Homolog of NCBI NO: 15219836 NR Description: serine/threonine protein kinase, putative
MDKYELVKDIGAGNFGVARLMRVKNSKELVAMKYIERGPKIDENVAREIINHRSLRHPNIIRFKEVVLTPTHIAIAMEYAAGGELFERICSAGRFSEDEARYFFQQLISGVSYCHAMQICHRDLKLENTLLDGSPAPRLKICDFGYSKSSLLHSMPKSTVGTPAYIAPEVLSRGEYDGKMADVWSCGVTLYVMLVGAYPFEDQEDPKNFKKTIQRIMAVKYKIPDYVHISQDCKHLLSRIFVTNSNKRITIGDIKKHPWFLKNLPRELTEIAQAAYFRKENPTFSLQSVEEIMKIVEEAKTPARVSRSIGAFGWGGGEDAEGKEEDAEEEVEEVEEEEDEEDEYDKTVKQVHASMGEVRVS

SEQ ID NO: 36962 - protein, 341 aa, Arabidopsis thaliana
  peptide (1)..(341): Ceres Seq. ID no. 13575191
  misc_feature (1)..(240): Pfam Name: Protein kinase domain Pfam Description: Protein kinase domain
  misc_feature (1)..(341): Homolog of NCBI NO: 19568098 NR Description: osmotic stress-activated protein kinase
  misc_feature (1)..(338): Homolog of NCBI NO: 2129803 NR Description: probable serine/threonine-specific protein kinase
  misc_feature (1)..(341): Homolog of NCBI NO: 1362026 NR Description: probable serine/threonine-specific protein kinase
  misc_feature (1)..(341): Homolog of NCBI NO: 15220251 NR Description: serine/threonine protein kinase, putative
  misc_feature (1)..(341): Homolog of NCBI NO: 21618062 NR Description: putative serine/threonine-protein kinase
  misc_feature (1)..(341): Homolog of NCBI NO: 15219836 NR Description: serine/threonine protein kinase, putative
MRVKNSKELVAMKYIERGPKIDENVAREIINHRSLRHPNIIRFKEVVLTPTHIAIAMEYAAGGELFERICSAGRFSEDEARYFFQQLISGVSYCHAMQICHRDLKLENTLLDGSPAPRLKICDFGYSKSSLLHSMPKSTVGTPAYIAPEVLSRGEYDGKMADVWSCGVTLYVMLVGAYPFEDQEDPKNFKKTIQRIMAVKYKIPDYVHISQDCKHLLSRIFVTNSNKRITIGDIKKHPWFLKNLPRELTEIAQAAYFRKENPTFSLQSVEEIMKIVEEAKTPARVSRSIGAFGWGGGEDAEGKEEDAEEEVEEVEEEEDEEDEYDKTVKQVHASMGEVRVS

SEQ ID NO: 36963 - protein, 330 aa, Arabidopsis thaliana
  peptide (1)..(330): Ceres Seq. ID no. 13575192
  misc_feature (1)..(229): Pfam Name: Protein kinase domain Pfam Description: Protein kinase domain
  misc_feature (1)..(330): Homolog of NCBI NO: 19568098 NR Description: osmotic stress-activated protein kinase
  misc_feature (1)..(327): Homolog of NCBI NO: 2129803 NR Description: probable serine/threonine-specific protein kinase
  misc_feature (1)..(330): Homolog of NCBI NO: 1362026 NR Description: probable serine/threonine-specific protein kinase
  misc_feature (1)..(330): Homolog of NCBI NO: 15220251 NR Description: serine/threonine protein kinase, putative
  misc_feature (1)..(330): Homolog of NCBI NO: 21618062 NR Description: putative serine/threonine-protein kinase
  misc_feature (1)..(330): Homolog of NCBI NO: 15219836 NR Description: serine/threonine protein kinase, putative
MKYIERGPKIDENVAREIINHRSLRHPNIIRFKEVVLTPTHIAIAMEYAAGGELFERICSAGRFSEDEARYFFQQLISGVSYCHAMQICHRDLKLENTLLDGSPAPRLKICDFGYSKSSLLHSMPKSTVGTPAYIAPEVLSRGEYDGKMADVWSCGVTLYVMLVGAYPFEDQEDPKNFKKTIQRIMAVKYKIPDYVHISQDCKHLLSRIFVTNSNKRITIGDIKKHPWFLKNLPRELTEIAQAAYFRKENPTFSLQSVEEIMKIVEEAKTPARVSRSIGAFGWGGGEDAEGKEEDAEEEVEEVEEEEDEEDEYDKTVKQVHASMGEVRVS

SEQ ID NO: 36964 - DNA, 1241 bp, Arabidopsis thaliana
  misc_feature (1)..(1241): Ceres Seq. ID no. 12337172
  misc_feature: MA Experiment ID: 108434 Result: Up-regulated in Transcription
  misc_feature: MA Experiment 108434 PARAMETER Experiment Name: At_Root_Tips_cDNA_P Parameter: Tissue Value: Root Tips
  misc_feature: MA Experiment ID: 108462 Result: Down-regulated in Transcription
  misc_feature: MA Experiment 108462 PARAMETER Experiment Name: At_Germinating_Seeds_cDNA_P Parameter: Age (day) Value: 2 vs. 0
  misc_feature: MA Experiment 108462 PARAMETER Experiment Name: At_Germinating_Seeds_cDNA_P Parameter: Tissue Value: Germinating Seeds
  misc_feature: MA Experiment ID: 108463 Result: Down-regulated in Transcription
  misc_feature: MA Experiment 108463 PARAMETER Experiment Name: At_Germinating_Seeds_cDNA_P Parameter: Age (day) Value: 3 vs. 0
  misc_feature: MA Experiment 108463 PARAMETER Experiment Name: At_Germinating_Seeds_cDNA_P Parameter: Tissue Value: Germinating Seeds
  misc_feature: MA Experiment ID: 108464 Result: Down-regulated in Transcription
  misc_feature: MA Experiment 108464 PARAMETER Experiment Name: At_Germinating_Seeds_cDNA_P Parameter: Age (day) Value: 4 vs. 0
  misc_feature: MA Experiment 108464 PARAMETER Experiment Name: At_Germinating_Seeds_cDNA_P Parameter: Tissue Value: Germinating Seeds
  misc_feature: MA Experiment ID: 108576 Result: Up-regulated in Transcription
  misc_feature: MA Experiment 108576 PARAMETER Experiment Name: At_42deg_Heat_cDNA_P Parameter: Temperature (deg C) Value: 42 vs. 22
  misc_feature: MA Experiment 108576 PARAMETER Experiment Name: At_42deg_Heat_cDNA_P Parameter: Timepoint (hr) Value: 1
  misc_feature: MA Experiment 108576 PARAMETER Experiment Name: At_42deg_Heat_cDNA_P Parameter: Tissue Value: Aerial
  misc_feature: MA Experiment ID: 108577 Result: Up-regulated in Transcription
  misc_feature: MA Experiment 108577 PARAMETER Experiment Name: At_42deg_Heat_cDNA_P Parameter: Temperature (deg C) Value: 42 vs. 22
  misc_feature: MA Experiment 108577 PARAMETER Experiment Name: At_42deg_Heat_cDNA_P Parameter: Timepoint (hr) Value: 6
  misc_feature: MA Experiment 108577 PARAMETER Experiment Name: At_42deg_Heat_cDNA_P Parameter: Tissue Value: Aerial
  misc_feature: MA Experiment ID: 108607 Result: Down-regulated in Transcription
  misc_feature: MA Experiment 108607 PARAMETER Experiment Name: At_100uM_ABA_cDNA_P Parameter: Timepoint (hr) Value: 4
  misc_feature: MA Experiment 108607 PARAMETER Experiment Name: At_100uM_ABA_cDNA_P Parameter: Tissue Value: Aerial
  misc_feature: MA Experiment 108607 PARAMETER Experiment Name: At_100uM_ABA_cDNA_P Parameter: Treatment Value: 100uM ABA vs. No Treatment
  misc_feature: MA Experiment ID: 20000087 Result: Down-regulated in Transcription
  misc_feature: MA Experiment 20000087 PARAMETER Experiment Name: At_100uM_ABA_Mutants_cDNA_P Parameter: Plant Line Value: WS
  misc_feature: MA Experiment 20000087 PARAMETER Experiment Name: At_100uM_ABA_Mutants_cDNA_P Parameter: Timepoint (hr) Value: 6
  misc_feature: MA Experiment 20000087 PARAMETER Experiment Name: At_100uM_ABA_Mutants_cDNA_P Parameter: Tissue Value: Aerial
  misc_feature: MA Experiment 20000087 PARAMETER Experiment Name: At_100uM_ABA_Mutants_cDNA_P Parameter: Treatment Value: 100uM ABA vs. No Treatment
  misc_feature: MA Experiment ID: 20000093 Result: Up-regulated in Transcription
  misc_feature: MA Experiment 20000093 PARAMETER Experiment Name: At_42deg_Heat_cDNA_P Parameter: Temperature (deg C) Value: 42 vs. 22
  misc_feature: MA Experiment 20000093 PARAMETER Experiment Name: At_42deg_Heat_cDNA_P Parameter: Timepoint (hr) Value: 0.5
  misc_feature: MA Experiment 20000093 PARAMETER Experiment Name: At_42deg_Heat_cDNA_P Parameter: Tissue Value: Aerial
  misc_feature: MA Experiment ID: 20000111 Result: Up-regulated in Transcription
  misc_feature: MA Experiment 20000111 PARAMETER Experiment Name: At_42deg_Heat_cDNA_P Parameter: Temperature (deg C) Value: 42 vs. 22
  misc_feature: MA Experiment 20000111 PARAMETER Experiment Name: At_42deg_Heat_cDNA_P Parameter: Timepoint (hr) Value: 6
  misc_feature: MA Experiment 20000111 PARAMETER Experiment Name: At_42deg_Heat_cDNA_P Parameter: Tissue Value: Aerial
  misc_feature: MA Experiment ID: 20000112 Result: Up-regulated in Transcription
  misc_feature: MA Experiment 20000112 PARAMETER Experiment Name: At_42deg_Heat_cDNA_P Parameter: Temperature (deg C) Value: 42 vs. 22
  misc_feature: MA Experiment 20000112 PARAMETER Experiment Name: At_42deg_Heat_cDNA_P Parameter: Timepoint (hr) Value: 2
  misc_feature: MA Experiment 20000112 PARAMETER Experiment Name: At_42deg_Heat_cDNA_P Parameter: Tissue Value: Aerial
  misc_feature: MA Experiment ID: 20000113 Result: Up-regulated in Transcription
  misc_feature: MA Experiment 20000113 PARAMETER Experiment Name: At_42deg_Heat_cDNA_P Parameter: Temperature (deg C) Value: 42 vs. 22
  misc_feature: MA Experiment 20000113 PARAMETER Experiment Name: At_42deg_Heat_cDNA_P Parameter: Timepoint (hr) Value: 8
  misc_feature: MA Experiment 20000113 PARAMETER Experiment Name: At_42deg_Heat_cDNA_P Parameter: Tissue Value: Aerial
  misc_feature: MA Experiment ID: 20000144 Result: Up-regulated in Transcription
  misc_feature: MA Experiment 20000144 PARAMETER Experiment Name: At_42deg_Heat_cDNA_P Parameter: Temperature (deg C) Value: 42 vs. 22
  misc_feature: MA Experiment 20000144 PARAMETER Experiment Name: At_42deg_Heat_cDNA_P Parameter: Timepoint (hr) Value: 1
  misc_feature: MA Experiment 20000144 PARAMETER Experiment Name: At_42deg_Heat_cDNA_P Parameter: Tissue Value: Aerial
  misc_feature: MA Experiment ID: 20000171 Result: Up-regulated in Transcription
  misc_feature: MA Experiment 20000171 PARAMETER Experiment Name: At_42deg_Heat_P Parameter: Age (day) Value: 14
  misc_feature: MA Experiment 20000171 PARAMETER Experiment Name: At_42deg_Heat_P Parameter: Organism Value: A. thaliana
  misc_feature: MA Experiment 20000171 PARAMETER Experiment Name: At_42deg_Heat_P Parameter: Plant Line Value: WS
  misc_feature: MA Experiment 20000171 PARAMETER Experiment Name: At_42deg_Heat_P Parameter: Temperature (deg C) Value: 42 vs. 22
  misc_feature: MA Experiment 20000171 PARAMETER Experiment Name: At_42deg_Heat_P Parameter: Timepoint (hr) Value: 1
  misc_feature: MA Experiment 20000171 PARAMETER Experiment Name: At_42deg_Heat_P Parameter: Tissue Value: Aerial
  misc_feature: MA Experiment ID: 20000173 Result: Up-regulated in Transcription
  misc_feature: MA Experiment 20000173 PARAMETER Experiment Name: At_42deg_Heat_P Parameter: Age (day) Value: 14
  misc_feature: MA Experiment 20000173 PARAMETER Experiment Name: At_42deg_Heat_P Parameter: Organism Value: A. thaliana
  misc_feature: MA Experiment 20000173 PARAMETER Experiment Name: At_42deg_Heat_P Parameter: Plant Line Value: WS
  misc_feature: MA Experiment 20000173 PARAMETER Experiment Name: At_42deg_Heat_P Parameter: Temperature (deg C) Value: 42 vs. 22
  misc_feature: MA Experiment 20000173 PARAMETER Experiment Name: At_42deg_Heat_P Parameter: Timepoint (hr) Value: 6
  misc_feature: MA Experiment 20000173 PARAMETER Experiment Name: At_42deg_Heat_P Parameter: Tissue Value: Aerial
  misc_feature: MA Experiment ID: 20000180 Result: Down-regulated in Transcription
  misc_feature: MA Experiment 20000180 PARAMETER Experiment Name: At_Germinating_Seeds_P Parameter: Age (hr) Value: 24 vs. 0
  misc_feature: MA Experiment 20000180 PARAMETER Experiment Name: At_Germinating_Seeds_P Parameter: Tissue Value: Germinating Seeds
  misc_feature: MA Experiment ID: 20000224 Result: Down-regulated in Transcription
  misc_feature: MA Experiment ID: 20000265 Result: Up-regulated in Transcription
  misc_feature: MA Experiment 20000265 PARAMETER Experiment Name: At_Open_Flower_P Parameter: Age (day) Value: 21
  misc_feature: MA Experiment 20000265 PARAMETER Experiment Name: At_Open_Flower_P Parameter: Plant Line Value: WS
  misc_feature: MA Experiment 20000265 PARAMETER Experiment Name: At_Open_Flower_P Parameter: Tissue Value: Closed Flower vs. Whole Plant
  misc_feature: MA Experiment ID: 20000286 Result: Up-regulated in Transcription
  misc_feature: MA Experiment 20000286 PARAMETER Experiment Name: At_Open_Flower_P Parameter: Age (day) Value: 21
  misc_feature: MA Experiment 20000286 PARAMETER Experiment Name: At_Open_Flower_P Parameter: Plant Line Value: WS
  misc_feature: MA Experiment 20000286 PARAMETER Experiment Name: At_Open_Flower_P Parameter: Tissue Value: Half Open vs. Whole Plant
  misc_feature: MA Experiment ID: 20001451 Result: Down-regulated in Transcription
  misc_feature: MA Experiment 20001451 PARAMETER Experiment Name: At_Far-red-induction_P Parameter: Age (day) Value: 7
  misc_feature: MA Experiment 20001451 PARAMETER Experiment Name: At_Far-red-induction_P Parameter: Light Value: Far-red vs. White
  misc_feature: MA Experiment 20001451 PARAMETER Experiment Name: At_Far-red-induction_P Parameter: Organism Value: A. thaliana
  misc_feature: MA Experiment 20001451 PARAMETER Experiment Name: At_Far-red-induction_P Parameter: Plant Line Value: Columbia
  misc_feature: MA Experiment 20001451 PARAMETER Experiment Name: At_Far-red-induction_P Parameter: Timepoint (hr) Value: 24
  misc_feature: MA Experiment 20001451 PARAMETER Experiment Name: At_Far-red-induction_P Parameter: Tissue Value: Whole Plant
  misc_feature: MA Experiment ID: 20001757 Result: Up-regulated in Transcription
  misc_feature: MA Experiment 20001757 PARAMETER Experiment Name: At_50mM_NH4NO3_L-to-H_P Parameter: Timepoint (hr) Value: 6
  misc_feature: MA Experiment 20001757 PARAMETER Experiment Name: At_50mM_NH4NO3_L-to-H_P Parameter: Tissue Value: Leaf
  misc_feature: MA Experiment 20001757 PARAMETER Experiment Name: At_50mM_NH4NO3_L-to-H_P Parameter: Treatment Value: 50mM NH4NO3 vs 100mM Mannitol
acatcaacacgccctaaaaccgctctcgagagacgaatcgctctcagcttcttctagaaccttctccttctccttcgacgcatcgtcgccttcaagatcacactacctcgcacaacaatggagttctggggtgttgaagttaagaatggcaaaccacttcacctagatcctgggctagacaggctcgtgcacatctctcaggttgctttgggagagagtaagaacaatgtaaccgaaccaatccagctttacgtgactgttggatcggataagcttctcattggaacgctatctcatgagaagtttcctcagctgtctacggagattgtcttggaaaggaactttgcgctgtctcatacttggaagaatgggagcgttttcttctctggttacaaagttgatgcatctgatcccgagcctgaggatttgattgatgatcaacttgaggctgctggtttcaaagctgctccgaaatctgctgcgaaacaggtgaactttcagttgccaaatgaagatgtcaaagccaagcaagatgatgacgctgacggtagtgaagaagattcttcagatgatgatgatagtgaaaactctggagacgaggaggaagagaaggttactgctgaatctgacagtgaggaagatgactcatcagacgacgaagaagatgactcctcagaagaggaaaccccaaagaagcctgaagaacccaagaagaggtctgcagaacccaactcctccaagaaccctgcgtccaacaagaaggctaagtttgtaactcctcagaaaacagattcgaagaaaccgcatgtccatgttgcaactcctcatccctcaaaacaggcgggtaagaattctggtggaggcagcactggagagacatcgaagcagcagcagacaccgaagtctgcaggagcgtttgggtgcaagtcgtgcaccagaacctttacttcggaaatgggattgcagtctcacacaaaggccaaacacagtgcagctgcttgagaagaagaagcagcatgatgactactctctataatatctactctagaactttgatgtcttttggtacttaaatctggaacttgcgagtgagccagttttagttggtcttttttttcaggcatttcttcctgtttaactttatcgttttggtagctgaaactgtgctaaacctttgtttgtgtttagtggtatggatattaagtctttttgtagacttttctagtgaaaatctacatttg

SEQ ID NO: 36965 - protein, 294 aa, Arabidopsis thaliana
  peptide (1)..(294): Ceres Seq. ID no. 12337173
  misc_feature (92)..(234): Pfam Name: Chromadorea ALT protein Pfam Description: Chromadorea ALT protein
  misc_feature (1)..(292): Homolog of NCBI NO: 7716948 NR Description: histone deacetylase 2 isoform b [Zea mays]
  misc_feature (1)..(292): Homolog of NCBI NO: 7804960 NR Description: putative histone deacetylase HD2 [Oryza sativa]
  misc_feature (1)..(294): Homolog of NCBI NO: 11282318 NR Description: histone deacetylase-like protein - Arabidopsis
  misc_feature (1)..(294): Homolog of NCBI NO: 30680179 NR Description: histone deacetylase -related protein [Arabidopsis
  misc_feature (1)..(294): Homolog of NCBI NO: 7804963 NR Description: putative histone deacetylase HD2c [Arabidopsis
MEFWGVEVKNGKPLHLDPGLDRLVHISQVALGESKNNVTEPIQLYVTVGSDKLLIGTLSHEKFPQLSTEIVLERNFALSHTWKNGSVFFSGYKVDASDPEPEDLIDDQLEAAGFKAAPKSAAKQVNFQLPNEDVKAKQDDDADGSEEDSSDDDDSENSGDEEEEKVTAESDSEEDDSSDDEEDDSSEEETPKKPEEPKKRSAEPNSSKNPASNKKAKFVTPQKTDSKKPHVHVATPHPSKQAGKNSGGGSTGETSKQQQTPKSAGAFGCKSCTRTFTSEMGLQSHTKAKHSAAA

SEQ ID NO: 36966 - DNA, 1394 bp, Arabidopsis thaliana
  misc_feature (1)..(1394): Ceres Seq. ID no. 13495730
  misc_feature: MA Experiment ID: 108573 Result: Up-regulated in Transcription
  misc_feature: MA Experiment 108573 PARAMETER Experiment Name: At_Drought_cDNA_P Parameter: Timepoint (hr) Value: 6
  misc_feature: MA Experiment 108573 PARAMETER Experiment Name: At_Drought_cDNA_P Parameter: Tissue Value: Aerial
  misc_feature: MA Experiment 108573 PARAMETER Experiment Name: At_Drought_cDNA_P Parameter: Treatment Value: Drought vs. No Drought
  misc_feature: MA Experiment ID: 108574 Result: Up-regulated in Transcription
  misc_feature: MA Experiment 108574 PARAMETER Experiment Name: At_Wounding__cDNA_P Parameter: Timepoint (hr) Value: 1
  misc_feature: MA Experiment 108574 PARAMETER Experiment Name: At_Wounding__cDNA_P Parameter: Tissue Value: Aerial
  misc_feature: MA Experiment 108574 PARAMETER Experiment Name: At_Wounding__cDNA_P Parameter: Treatment Value: Wounding vs. No Wounding
  misc_feature: MA Experiment ID: 108585 Result: Up-regulated in Transcription
  misc_feature: MA Experiment 108585 PARAMETER Experiment Name: At_5mM_NaNP_cDNA_P Parameter: Timepoint (hr) Value: 6
  misc_feature: MA Experiment 108585 PARAMETER Experiment Name: At_5mM_NaNP_cDNA_P Parameter: Tissue Value: Aerial
  misc_feature: MA Experiment 108585 PARAMETER Experiment Name: At_5mM_NaNP_cDNA_P Parameter: Treatment Value: null
  misc_feature: MA Experiment ID: 108607 Result: Up-regulated in Transcription
  misc_feature: MA Experiment 108607 PARAMETER Experiment Name: At_100uM_ABA_cDNA_P Parameter: Timepoint (hr) Value: 4
  misc_feature: MA Experiment 108607 PARAMETER Experiment Name: At_100uM_ABA_cDNA_P Parameter: Tissue Value: Aerial
  misc_feature: MA Experiment 108607 PARAMETER Experiment Name: At_100uM_ABA_cDNA_P Parameter: Treatment Value: 100uM ABA vs. No Treatment
  misc_feature: MA Experiment ID: 20000072 Result: Up-regulated in Transcription
  misc_feature: MA Experiment 20000072 PARAMETER Experiment Name: At_100uM_ABA_Mutants_cDNA_P Parameter: Plant Line Value: CS8105
  misc_feature: MA Experiment 20000072 PARAMETER Experiment Name: At_100uM_ABA_Mutants_cDNA_P Parameter: Timepoint (hr) Value: 6
  misc_feature: MA Experiment 20000072 PARAMETER Experiment Name: At_100uM_ABA_Mutants_cDNA_P Parameter: Tissue Value: Aerial
  misc_feature: MA Experiment 20000072 PARAMETER Experiment Name: At_100uM_ABA_Mutants_cDNA_P Parameter: Treatment Value: 100uM ABA vs. No Treatment
  misc_feature: MA Experiment ID: 20000315 Result: Down-regulated in Transcription
  misc_feature: MA Experiment 20000315 PARAMETER Experiment Name: At_14day_Shoots-Roots_Sub_P Parameter: Age (day) Value: 14
  misc_feature: MA Experiment 20000315 PARAMETER Experiment Name: At_14day_Shoots-Roots_Sub_P Parameter: Organism Value: A. thaliana
  misc_feature: MA Experiment 20000315 PARAMETER Experiment Name: At_14day_Shoots-Roots_Sub_P Parameter: Plant Line Value: WS
  misc_feature: MA Experiment 20000315 PARAMETER Experiment Name: At_14day_Shoots-Roots_Sub_P Parameter: Tissue Value: Shoots vs. Whole Plant
  misc_feature: MA Experiment ID: 20000328 Result: Down-regulated in Transcription
  misc_feature: MA Experiment 20000328 PARAMETER Experiment Name: At_42deg_Heat_Sub_P Parameter: Age (day) Value: 14
  misc_feature: MA Experiment 20000328 PARAMETER Experiment Name: At_42deg_Heat_Sub_P Parameter: Organism Value: A. thaliana
  misc_feature: MA Experiment 20000328 PARAMETER Experiment Name: At_42deg_Heat_Sub_P Parameter: Plant Line Value: WS
  misc_feature: MA Experiment 20000328 PARAMETER Experiment Name: At_42deg_Heat_Sub_P Parameter: Temperature (deg C) Value: 42 vs. 22
  misc_feature: MA Experiment 20000328 PARAMETER Experiment Name: At_42deg_Heat_Sub_P Parameter: Timepoint (hr) Value: 6
  misc_feature: MA Experiment 20000328 PARAMETER Experiment Name: At_42deg_Heat_Sub_P Parameter: Tissue Value: Aerial
tgagacgagaggcacacaaaaagagatacaaaaccaaaactttcaagcaaagcaattcaatttcaatcaaaaaccaaatcgaagatctttgaaagtttcctttttttccgaaatctgagcttgggtattgttggataagcttctcggagattgagattgaggattttgataggtgaggagattgaaagatttggatttttgggcggcaaaaatggtgatgcagacggaagctagggttggtgtgagctcaggacatggcgtagcttcgtcttctcatcgtttaacgcaggaccagagatcacatatcgaatcggcgtcgcagctcttagccggaggactcgctggtgcttttagcaagacttgtactgctcctctatctcgtctcaccattctcttccaggtgcaaggtatgcacacaaatgctgcagctttaagaaagccaagcatattacacgaggcttcacggatattgaatgaagaaggattgaaagctttttggaaagggaatctagttactattgctcaccggcttccatattcttctgttaatttctacgcatatgaacactacaagaagttcatgtatatggttactgggatggaaaatcacaaggagggtataagttcaaacctttttgtacattttgtagccggtggtttggctggaatcacagctgcttctgccacttatccacttgatcttgttagaactcgtcttgctgctcagacaaaagtaatctactactcgggtatctggcatactctgcgctctattacaaccgatgaaggtatcttgggcctctacaagggactaggaacaacgcttgtgggtgttgggcctagtattgccattagcttttctgtgtatgaatcattgagatcttattggaggtcaactaggccccatgattcccctatcatggtcagtctagcttgtggaagtctttcaggaatagcatcttcaacagctacgtttccattggatctggtgagaagaaggaagcagctggaaggaataggcgggcgagcggtagtgtacaagacaggtttgttaggcacattaaagcgtattgttcaaacggaaggagcgagaggcctgtacagaggaattcttccagagtactacaaagtggtacctggtgtagggatttgcttcatgacctacgagacactcaagctttacttcaaggatctttcttcgaatctataacggtttaaaaggttggtagatttgtttaggtctatttttggtgagaggaaaaaaactgtaaaaaccaaacagcggaaaatgataatgtatacgaaatgtagaattatatatgtagttgttggatgtagcttatacgagattaacatttgtattggtacaatccttttccattgttacatggctt

SEQ ID NO: 36967 - protein, 332 aa, Arabidopsis thaliana
  peptide (1)..(332): Ceres Seq. ID no. 13495731
  misc_feature (236)..(322): Homolog of NCBI NO: 15234063 NR Description: mitochondrial carrier protein family [Arabidopsis
  misc_feature (1)..(268): Homolog of NCBI NO: 15234063 NR Description: mitochondrial carrier protein family [Arabidopsis
  misc_feature (3)..(322): Homolog of NCBI NO: 25295875 NR Description: probable mitochondrial carrier protein
  misc_feature (3)..(322): Homolog of NCBI NO: 34895726 NR Description: putative peroxisomal Ca-dependent solute carrier
  misc_feature (3)..(322): Homolog of NCBI NO: 30687297 NR Description: mitochondrial carrier protein family [Arabidopsis
  misc_feature (1)..(322): Homolog of NCBI NO: 11277067 NR Description: hypothetical protein F5K20.240 - Arabidopsis
  misc_feature (38)..(331): Homolog of NCBI NO: 34902034 NR Description: putative peroxisomal Ca-dependent solute carrier
  misc_feature (1)..(322): Homolog of NCBI NO: 22331775 NR Description: mitochondrial carrier protein family [Arabidopsis
  misc_feature (3)..(332): Homolog of NCBI NO: 21554682 NR Description: Ca-dependent solute carrier-like protein
  misc_feature (1)..(332): Homolog of NCBI NO: 15228163 NR Description: mitochondrial carrier protein family [Arabidopsis
MVMQTEARVGVSSGHGVASSSHRLTQDQRSHIESASQLLAGGLAGAFSKTCTAPLSRLTILFQVQGMHTNAAALRKPSILHEASRILNEEGLKAFWKGNLVTIAHRLPYSSVNFYAYEHYKKFMYMVTGMENHKEGISSNLFVHFVAGGLAGITAASATYPLDLVRTRLAAQTKVIYYSGIWHTLRSITTDEGILGLYKGLGTTLVGVGPSIAISFSVYESLRSYWRSTRPHDSPIMVSLACGSLSGIASSTATFPLDLVRRRKQLEGIGGRAVVYKTGLLGTLKRIVQTEGARGLYRGILPEYYKVVPGVGICFMTYETLKLYFKDLSSNL

SEQ ID NO: 36968 - protein, 330 aa, Arabidopsis thaliana
  peptide (1)..(330): Ceres Seq. ID no. 13495732
  misc_feature (234)..(320): Homolog of NCBI NO: 15234063 NR Description: mitochondrial carrier protein family [Arabidopsis
  misc_feature (1)..(266): Homolog of NCBI NO: 15234063 NR Description: mitochondrial carrier protein family [Arabidopsis
  misc_feature (1)..(320): Homolog of NCBI NO: 25295875 NR Description: probable mitochondrial carrier protein
  misc_feature (1)..(320): Homolog of NCBI NO: 34895726 NR Description: putative peroxisomal Ca-dependent solute carrier
  misc_feature (1)..(320): Homolog of NCBI NO: 30687297 NR Description: mitochondrial carrier protein family [Arabidopsis
  misc_feature (1)..(320): Homolog of NCBI NO: 11277067 NR Description: hypothetical protein F5K20.240 - Arabidopsis
  misc_feature (36)..(329): Homolog of NCBI NO: 34902034 NR Description: putative peroxisomal Ca-dependent solute carrier
  misc_feature (1)..(320): Homolog of NCBI NO: 22331775 NR Description: mitochondrial carrier protein family [Arabidopsis
  misc_feature (1)..(330): Homolog of NCBI NO: 21554682 NR Description: Ca-dependent solute carrier-like protein
  misc_feature (1)..(330): Homolog of NCBI NO: 15228163 NR Description: mitochondrial carrier protein family [Arabidopsis
MQTEARVGVSSGHGVASSSHRLTQDQRSHIESASQLLAGGLAGAFSKTCTAPLSRLTILFQVQGMHTNAAALRKPSILHEASRILNEEGLKAFWKGNLVTIAHRLPYSSVNFYAYEHYKKFMYMVTGMENHKEGISSNLFVHFVAGGLAGITAASATYPLDLVRTRLAAQTKVIYYSGIWHTLRSITTDEGILGLYKGLGTTLVGVGPSIAISFSVYESLRSYWRSTRPHDSPIMVSLACGSLSGIASSTATFPLDLVRRRKQLEGIGGRAVVYKTGLLGTLKRIVQTEGARGLYRGILPEYYKVVPGVGICFMTYETLKLYFKDLSSNL

SEQ ID NO: 36969 - protein, 266 aa, Arabidopsis thaliana
  peptide (1)..(266): Ceres Seq. ID no. 13495733
  misc_feature (170)..(256): Homolog of NCBI NO: 15234063 NR Description: mitochondrial carrier protein family [Arabidopsis
  misc_feature (1)..(202): Homolog of NCBI NO: 15234063 NR Description: mitochondrial carrier protein family [Arabidopsis
  misc_feature (1)..(256): Homolog of NCBI NO: 25295875 NR Description: probable mitochondrial carrier protein
  misc_feature (1)..(256): Homolog of NCBI NO: 34895726 NR Description: putative peroxisomal Ca-dependent solute carrier
  misc_feature (1)..(256): Homolog of NCBI NO: 30687297 NR Description: mitochondrial carrier protein family [Arabidopsis
  misc_feature (1)..(256): Homolog of NCBI NO: 11277067 NR Description: hypothetical protein F5K20.240 - Arabidopsis
  misc_feature (1)..(265): Homolog of NCBI NO: 34902034 NR Description: putative peroxisomal Ca-dependent solute carrier
  misc_feature (1)..(256): Homolog of NCBI NO: 22331775 NR Description: mitochondrial carrier protein family [Arabidopsis
  misc_feature (1)..(266): Homolog of NCBI NO: 21554682 NR Description: Ca-dependent solute carrier-like protein
  misc_feature (1)..(266): Homolog of NCBI NO: 15228163 NR Description: mitochondrial carrier protein family [Arabidopsis
MHTNAAALRKPSILHEASRILNEEGLKAFWKGNLVTIAHRLPYSSVNFYAYEHYKKFMYMVTGMENHKEGISSNLFVHFVAGGLAGITAASATYPLDLVRTRLAAQTKVIYYSGIWHTLRSITTDEGILGLYKGLGTTLVGVGPSIAISFSVYESLRSYWRSTRPHDSPIMVSLACGSLSGIASSTATFPLDLVRRRKQLEGIGGRAVVYKTGLLGTLKRIVQTEGARGLYRGILPEYYKVVPGVGICFMTYETLKLYFKDLSSNL

SEQ ID NO: 36970 - DNA, 932 bp, Arabidopsis thaliana
  misc_feature (1)..(932): Ceres Seq. ID no. 13646128
  misc_feature: MA Experiment ID: 108594 Result: Down-regulated in Transcription
  misc_feature: MA Experiment 108594 PARAMETER Experiment Name: At_Ler-rhl_Root_cDNA_P Parameter: Plant Line Value: null
  misc_feature: MA Experiment ID: 108595 Result: Down-regulated in Transcription
  misc_feature: MA Experiment 108595 PARAMETER Experiment Name: At_Ler-pi_Ovule_cDNA_P Parameter: Plant Line Value: null
  misc_feature: MA Experiment ID: 20000227 Result: Down-regulated in Transcription
  misc_feature: MA Experiment 20000227 PARAMETER Experiment Name: At_Root-Tips-vs-Tops_P Parameter: Tissue Value: Root Tips vs. Root Tops
  misc_feature: MA Experiment ID: 20000234 Result: Down-regulated in Transcription
  misc_feature: MA Experiment 20000234 PARAMETER Experiment Name: At_Siliques_P Parameter: Age (day) Value: 21
  misc_feature: MA Experiment 20000234 PARAMETER Experiment Name: At_Siliques_P Parameter: Organism Value: A. thaliana
  misc_feature: MA Experiment 20000234 PARAMETER Experiment Name: At_Siliques_P Parameter: Plant Line Value: WS
  misc_feature: MA Experiment 20000234 PARAMETER Experiment Name: At_Siliques_P Parameter: Tissue Value: Less Than 5mm Siliques vs. Whole Plant
  misc_feature: MA Experiment ID: 20000235 Result: Down-regulated in Transcription
  misc_feature: MA Experiment 20000235 PARAMETER Experiment Name: At_Siliques_P Parameter: Age (day) Value: 21
  misc_feature: MA Experiment 20000235 PARAMETER Experiment Name: At_Siliques_P Parameter: Organism Value: A. thaliana
  misc_feature: MA Experiment 20000235 PARAMETER Experiment Name: At_Siliques_P Parameter: Plant Line Value: WS
  misc_feature: MA Experiment 20000235 PARAMETER Experiment Name: At_Siliques_P Parameter: Tissue Value: 5-10mm Siliques vs. Whole Plant
  misc_feature: MA Experiment ID: 20000286 Result: Down-regulated in Transcription
  misc_feature: MA Experiment 20000286 PARAMETER Experiment Name: At_Open_Flower_P Parameter: Age (day) Value: 21
  misc_feature: MA Experiment 20000286 PARAMETER Experiment Name: At_Open_Flower_P Parameter: Plant Line Value: WS
  misc_feature: MA Experiment 20000286 PARAMETER Experiment Name: At_Open_Flower_P Parameter: Tissue Value: Half Open vs. Whole Plant
  misc_feature: MA Experiment ID: 20000495 Result: Down-regulated in Transcription
  misc_feature: MA Experiment 20000495 PARAMETER Experiment Name: At_Guard_Cells_P Parameter: Harvest Date Value: 8/2/2002
  misc_feature: MA Experiment 20000495 PARAMETER Experiment Name: At_Guard_Cells_P Parameter: Organism Value: A. thaliana
  misc_feature: MA Experiment 20000495 PARAMETER Experiment Name: At_Guard_Cells_P Parameter: Tissue Value: Guard Cells vs. Leaves
gtgttatgtctgctcaaagacagcctttgtaaccaaaaccaaagtgtctctcttttcttcttcctaaatttctttccacgagaattgatttgggtttgtgttgtttttttctttcttttttgggtttttgtaattgggttggtgaataatcctgcaaaagtgttcgatgattttctccagagaagaattttgaagtttctctttttagagattttttttgttgttggggttttttgttttctgggggaaattgaaaagagatggcaggtgaagaagattggatagaactaaagtttagactagcagatggtacagacataggtccaagcaagtataatcaatctatgactgtttcttctcttaaagagaaactcatttctcaatggcctaaagataaagaaaatactccaaaaactgtaaatgatatgaagctcatcaatgccgggaaaatactggagaacaataggacacttgctgaatccaggcttcctgtttgtgaacttcctggaatgatcattactatgcatattgttcttcgccttcctacgttagacaaaaagagcgaaaaactgcagaatgatccaccgatgaagaatcgctgcgtgtgcaccattttgtagctgcaagtaaattggatcatagagatttatatccgtcatgatcatggcactagatgatgctccacggaacaacttccatggcatcaaacaagctttgagaagttccttcagtacagaatgattggcataggcatgaaaacaaaagatcttcattacagaatttggttccatgtgtgtggttgttaattattattttttaaaaatcaaaatggcttgagaaaatgtactatgattcttgaaggttggttcttttataaatatatacaatatgttcaatacaacagtaaataacaagaatggtattgtccttac

SEQ ID NO: 36971 - protein, 119 aa, Arabidopsis thaliana
  peptide (1)..(119): Ceres Seq. ID no. 13646129
  misc_feature (8)..(95): Pfam Name: Ubiquitin family Pfam Description: Ubiquitin family
  misc_feature (4)..(119): Homolog of NCBI NO: 15234839 NR Description: ubiquitin family [Arabidopsis thaliana]
  misc_feature (1)..(119): Homolog of NCBI NO: 38347220 NR Description: OSJNBa0055C08.14 [Oryza sativa (japonica
  misc_feature (1)..(116): Homolog of NCBI NO: 18417680 NR Description: expressed protein [Arabidopsis thaliana]
  misc_feature (1)..(119): Homolog of NCBI NO: 15232032 NR Description: ubiquitin family [Arabidopsis thaliana]
  misc_feature (4)..(119): Homolog of NCBI NO: 22331362 NR Description: ubiquitin family [Arabidopsis thaliana]
  misc_feature (5)..(119): Homolog of NCBI NO: 4097587 NR Description: NTGP5 [Nicotiana tabacum]
  misc_feature (3)..(119): Homolog of NCBI NO: 15218145 NR Description: expressed protein [Arabidopsis thaliana]
  misc_feature (3)..(119): Homolog of NCBI NO: 21592966 NR Description: ubiquitin-fusion protein, putative [Arabidopsis
  misc_feature (1)..(101): Homolog of NCBI NO: 25402954 NR Description: protein F2E2.12 [imported] - Arabidopsis thaliana
  misc_feature (1)..(119): Homolog of NCBI NO: 15219188 NR Description: ubiquitin family [Arabidopsis thaliana]
MAGEEDWIELKFRLADGTDIGPSKYNQSMTVSSLKEKLISQWPKDKENTPKTVNDMKLINAGKILENNRTLAESRLPVCELPGMIITMHIVLRLPTLDKKSEKLQNDPPMKNRCVCTIL

SEQ ID NO: 36972 - protein, 94 aa, Arabidopsis thaliana
  peptide (1)..(94): Ceres Seq. ID no. 13646130
VLCLLKDSLCNQNQSVSLFFFLNFFPRELIWVCVVFFFLFWVFVIGLVNNPAKVFDDFLQRRILKFLFLEIFFVVGVFCFLGEIEKRWQVKKIG

SEQ ID NO: 36973 - protein, 91 aa, Arabidopsis thaliana
  peptide (1)..(91): Ceres Seq. ID no. 13646131
  misc_feature (1)..(67): Pfam Name: Ubiquitin family Pfam Description: Ubiquitin family
  misc_feature (1)..(91): Homolog of NCBI NO: 15234839 NR Description: ubiquitin family [Arabidopsis thaliana]
  misc_feature (1)..(91): Homolog of NCBI NO: 38347220 NR Description: OSJNBa0055C08.14 [Oryza sativa (japonica
  misc_feature (1)..(88): Homolog of NCBI NO: 18417680 NR Description: expressed protein [Arabidopsis thaliana]
  misc_feature (1)..(91): Homolog of NCBI NO: 15232032 NR Description: ubiquitin family [Arabidopsis thaliana]
  misc_feature (1)..(91): Homolog of NCBI NO: 22331362 NR Description: ubiquitin family [Arabidopsis thaliana]
  misc_feature (1)..(91): Homolog of NCBI NO: 4097587 NR Description: NTGP5 [Nicotiana tabacum]
  misc_feature (1)..(91): Homolog of NCBI NO: 15218145 NR Description: expressed protein [Arabidopsis thaliana]
  misc_feature (1)..(91): Homolog of NCBI NO: 21592966 NR Description: ubiquitin-fusion protein, putative [Arabidopsis
  misc_feature (1)..(73): Homolog of NCBI NO: 25402954 NR Description: protein F2E2.12 [imported] - Arabidopsis thaliana
  misc_feature (1)..(91): Homolog of NCBI NO: 15219188 NR Description: ubiquitin family [Arabidopsis thaliana]
MTVSSLKEKLISQWPKDKENTPKTVNDMKLINAGKILENNRTLAESRLPVCELPGMIITMHIVLRLPTLDKKSEKLQNDPPMKNRCVCTIL

SEQ ID NO: 36974 - DNA, 810 bp, Arabidopsis thaliana
  misc_feature (1)..(810): Ceres Seq. ID no. 13592949
  misc_feature: MA Experiment ID: 20000184 Result: Down-regulated in Transcription
  misc_feature: MA Experiment 20000184 PARAMETER Experiment Name: At_Shoots__P Parameter: Age (day) Value: 7
  misc_feature: MA Experiment 20000184 PARAMETER Experiment Name: At_Shoots__P Parameter: Tissue Value: Shoots vs. Whole Plant
  misc_feature: MA Experiment ID: 20000234 Result: Up-regulated in Transcription
  misc_feature: MA Experiment 20000234 PARAMETER Experiment Name: At_Siliques_P Parameter: Age (day) Value: 21
  misc_feature: MA Experiment 20000234 PARAMETER Experiment Name: At_Siliques_P Parameter: Organism Value: A. thaliana
  misc_feature: MA Experiment 20000234 PARAMETER Experiment Name: At_Siliques_P Parameter: Plant Line Value: WS
  misc_feature: MA Experiment 20000234 PARAMETER Experiment Name: At_Siliques_P Parameter: Tissue Value: Less Than 5mm Siliques vs. Whole Plant
  misc_feature: MA Experiment ID: 20000264 Result: Up-regulated in Transcription
  misc_feature: MA Experiment 20000264 PARAMETER Experiment Name: At_Open_Flower_P Parameter: Age (day) Value: 21
  misc_feature: MA Experiment 20000264 PARAMETER Experiment Name: At_Open_Flower_P Parameter: Plant Line Value: WS
  misc_feature: MA Experiment 20000264 PARAMETER Experiment Name: At_Open_Flower_P Parameter: Tissue Value: Open Flower vs. Whole Plant
  misc_feature: MA Experiment ID: 20000265 Result: Up-regulated in Transcription
  misc_feature: MA Experiment 20000265 PARAMETER Experiment Name: At_Open_Flower_P Parameter: Age (day) Value: 21
  misc_feature: MA Experiment 20000265 PARAMETER Experiment Name: At_Open_Flower_P Parameter: Plant Line Value: WS
  misc_feature: MA Experiment 20000265 PARAMETER Experiment Name: At_Open_Flower_P Parameter: Tissue Value: Closed Flower vs. Whole Plant
  misc_feature: MA Experiment ID: 20000286 Result: Up-regulated in Transcription
  misc_feature: MA Experiment 20000286 PARAMETER Experiment Name: At_Open_Flower_P Parameter: Age (day) Value: 21
  misc_feature: MA Experiment 20000286 PARAMETER Experiment Name: At_Open_Flower_P Parameter: Plant Line Value: WS
  misc_feature: MA Experiment 20000286 PARAMETER Experiment Name: At_Open_Flower_P Parameter: Tissue Value: Half Open vs. Whole Plant
  misc_feature: MA Experiment ID: 20000794 Result: Up-regulated in Transcription
  misc_feature: MA Experiment 20000794 PARAMETER Experiment Name: At_Petals_P Parameter: Age (day) Value: 23-25 days
  misc_feature: MA Experiment 20000794 PARAMETER Experiment Name: At_Petals_P Parameter: Plant Line Value: WS
  misc_feature: MA Experiment 20000794 PARAMETER Experiment Name: At_Petals_P Parameter: Tissue Value: Petals vs. Whole plant
  misc_feature: MA Experiment ID: 20001757 Result: Down-regulated in Transcription
  misc_feature: MA Experiment 20001757 PARAMETER Experiment Name: At_50mM_NH4NO3_L-to-H_P Parameter: Timepoint (hr) Value: 6
  misc_feature: MA Experiment 20001757 PARAMETER Experiment Name: At_50mM_NH4NO3_L-to-H_P Parameter: Tissue Value: Leaf
  misc_feature: MA Experiment 20001757 PARAMETER Experiment Name: At_50mM_NH4NO3_L-to-H_P Parameter: Treatment Value: 50mM NH4NO3 vs 100mM Mannitol
  misc_feature: MA Experiment ID: 20001904 Result: Up-regulated in Transcription
  misc_feature: MA Experiment 20001904 PARAMETER Experiment Name: At_Drought_Reproduction_P Parameter: Age (day) Value: 37
  misc_feature: MA Experiment 20001904 PARAMETER Experiment Name: At_Drought_Reproduction_P Parameter: Organism Value: A. thaliana
  misc_feature: MA Experiment 20001904 PARAMETER Experiment Name: At_Drought_Reproduction_P Parameter: Plant Line Value: WS
  misc_feature: MA Experiment 20001904 PARAMETER Experiment Name: At_Drought_Reproduction_P Parameter: Timepoint (day) Value: 7
  misc_feature: MA Experiment 20001904 PARAMETER Experiment Name: At_Drought_Reproduction_P Parameter: Tissue Value: Rosettes
  misc_feature: MA Experiment 20001904 PARAMETER Experiment Name: At_Drought_Reproduction_P Parameter: Treatment Value: Drought vs. No Drought
  misc_feature: MA Experiment ID: 20001905 Result: Up-regulated in Transcription
  misc_feature: MA Experiment 20001905 PARAMETER Experiment Name: At_Drought_Reproduction_P Parameter: Age (day) Value: 40
  misc_feature: MA Experiment 20001905 PARAMETER Experiment Name: At_Drought_Reproduction_P Parameter: Organism Value: A. thaliana
  misc_feature: MA Experiment 20001905 PARAMETER Experiment Name: At_Drought_Reproduction_P Parameter: Plant Line Value: WS
  misc_feature: MA Experiment 20001905 PARAMETER Experiment Name: At_Drought_Reproduction_P Parameter: Timepoint (day) Value: 10
  misc_feature: MA Experiment 20001905 PARAMETER Experiment Name: At_Drought_Reproduction_P Parameter: Tissue Value: Rosettes
  misc_feature: MA Experiment 20001905 PARAMETER Experiment Name: At_Drought_Reproduction_P Parameter: Treatment Value: Drought vs. No Drought
  misc_feature: MA Experiment ID: 20001910 Result: Up-regulated in Transcription
  misc_feature: MA Experiment 20001910 PARAMETER Experiment Name: At_Drought_Reproduction_P Parameter: Age (day) Value: 37
  misc_feature: MA Experiment 20001910 PARAMETER Experiment Name: At_Drought_Reproduction_P Parameter: Organism Value: A. thaliana
  misc_feature: MA Experiment 20001910 PARAMETER Experiment Name: At_Drought_Reproduction_P Parameter: Plant Line Value: WS
  misc_feature: MA Experiment 20001910 PARAMETER Experiment Name: At_Drought_Reproduction_P Parameter: Timepoint (day) Value: 7
  misc_feature: MA Experiment 20001910 PARAMETER Experiment Name: At_Drought_Reproduction_P Parameter: Tissue Value: Flowers
  misc_feature: MA Experiment 20001910 PARAMETER Experiment Name: At_Drought_Reproduction_P Parameter: Treatment Value: Drought vs. No Drought
caattctctttaacattctccttgatttctgacactaccctcatcgggtctccaagaggccaagaaagacctctttctcggcttctaggagtctcatcattctcttttttcacatttgcttcctccacacgcaacctccaaaaagccctaaatttattaaaacaaatggattccacggagctgaaccgtgtgttccaaatgttcgacaaggacggagacgggaagatcactacgaaggagctgaacgagtcattcaagaacctcggtatcataatacccgaagacgaactaacacaaattatccaaaagatcgatgttaatggtgacggttgtgttgacattgaagagtttggagagctctacaagacgataatggtagaagatgaggacgaggtaggagaagaagatatgaaggaagcgttcaacgtatttgatcggaacggagatgggtttataacggtggatgaattgaaagcggttttatcttccttgggactcaagcaaggtaagaccttggaggaatgtaggaagatgataatgcaagtggatgttgatggtgatggtagggttaattacatggagtttagacaaatgatgaaaaagggtcgcttttttagctctttgagctgataataactttttttcttctttttttaccttctcttgtttttaattttggttatttgcttaaccattttctcttgcggtctaaatggaaaatacatgatcatagactaattattttatcttcaagacatgcgagagcacattgtaaaaaaaaaaaaaaaaaagcttatcgataccgtcgac

SEQ ID NO: 36975 - protein, 209 aa, Arabidopsis thaliana
  peptide (1)..(209): Ceres Seq. ID no. 13592950
  misc_feature (174)..(202): Pfam Name: EF hand Pfam Description: EF hand
  misc_feature (60)..(199): Homolog of NCBI NO: 4959165 NR Description: calmodulin mutant SYNCAM57D [synthetic construct]
  misc_feature (54)..(204): Homolog of NCBI NO: 21740787 NR Description: OSJNBb0091E11.1 [Oryza sativa (japonica
  misc_feature (60)..(204): Homolog of NCBI NO: 15231685 NR Description: calcium-binding protein, putative [Arabidopsis
  misc_feature (56)..(209): Homolog of NCBI NO: 15235516 NR Description: calcium-binding protein, putative [Arabidopsis
  misc_feature (56)..(204): Homolog of NCBI NO: 15231470 NR Description: calcium-binding protein, putative [Arabidopsis
  misc_feature (54)..(207): Homolog of NCBI NO: 25295758 NR Description: probable calcium binding protein [imported] -
  misc_feature (54)..(207): Homolog of NCBI NO: 18406202 NR Description: calmodulin-like protein (MSS3) [Arabidopsis
  misc_feature (51)..(209): Homolog of NCBI NO: 28301674 NR Description: calcium-binding protein [Lotus japonicus]
  misc_feature (56)..(206): Homolog of NCBI NO: 15221358 NR Description: calcium-binding protein, putative [Arabidopsis
  misc_feature (56)..(209): Homolog of NCBI NO: 15236276 NR Description: calcium-binding protein, putative [Arabidopsis
QFSLTFSLISDTTLIGSPRGQERPLSRLLGVSSFSFFTFASSTRNLQKALNLLKQMDSTELNRVFQMFDKDGDGKITTKELNESFKNLGIIIPEDELTQIIQKIDVNGDGCVDIEEFGELYKTIMVEDEDEVGEEDMKEAFNVFDRNGDGFITVDELKAVLSSLGLKQGKTLEECRKMIMQVDVDGDGRVNYMEFRQMMKKGRFFSSLS

SEQ ID NO: 36976 - protein, 154 aa, Arabidopsis thaliana
  peptide (1)..(154): Ceres Seq. ID no. 13592951
  misc_feature (119)..(147): Pfam Name: EF hand Pfam Description: EF hand
  misc_feature (5)..(144): Homolog of NCBI NO: 4959165 NR Description: calmodulin mutant SYNCAM57D [synthetic construct]
  misc_feature (1)..(149): Homolog of NCBI NO: 21740787 NR Description: OSJNBb0091E11.1 [Oryza sativa (japonica
  misc_feature (5)..(149): Homolog of NCBI NO: 15231685 NR Description: calcium-binding protein, putative [Arabidopsis
  misc_feature (1)..(154): Homolog of NCBI NO: 15235516 NR Description: calcium-binding protein, putative [Arabidopsis
  misc_feature (1)..(149): Homolog of NCBI NO: 15231470 NR Description: calcium-binding protein, putative [Arabidopsis
  misc_feature (1)..(152): Homolog of NCBI NO: 25295758 NR Description: probable calcium binding protein [imported] -
  misc_feature (1)..(152): Homolog of NCBI NO: 18406202 NR Description: calmodulin-like protein (MSS3) [Arabidopsis
  misc_feature (1)..(154): Homolog of NCBI NO: 28301674 NR Description: calcium-binding protein [Lotus japonicus]
  misc_feature (1)..(151): Homolog of NCBI NO: 15221358 NR Description: calcium-binding protein, putative [Arabidopsis
  misc_feature (1)..(154): Homolog of NCBI NO: 15236276 NR Description: calcium-binding protein, putative [Arabidopsis
MDSTELNRVFQMFDKDGDGKITTKELNESFKNLGIIIPEDELTQIIQKIDVNGDGCVDIEEFGELYKTIMVEDEDEVGEEDMKEAFNVFDRNGDGFITVDELKAVLSSLGLKQGKTLEECRKMIMQVDVDGDGRVNYMEFRQMMKKGRFFSSLS

SEQ ID NO: 36977 - protein, 143 aa, Arabidopsis thaliana
  peptide (1)..(143): Ceres Seq. ID no. 13592952
  misc_feature (108)..(136): Pfam Name: EF hand Pfam Description: EF hand
  misc_feature (1)..(133): Homolog of NCBI NO: 4959165 NR Description: calmodulin mutant SYNCAM57D [synthetic construct]
  misc_feature (1)..(138): Homolog of NCBI NO: 21740787 NR Description: OSJNBb0091E11.1 [Oryza sativa (japonica
  misc_feature (1)..(138): Homolog of NCBI NO: 15231685 NR Description: calcium-binding protein, putative [Arabidopsis
  misc_feature (1)..(143): Homolog of NCBI NO: 15235516 NR Description: calcium-binding protein, putative [Arabidopsis
  misc_feature (1)..(138): Homolog of NCBI NO: 15231470 NR Description: calcium-binding protein, putative [Arabidopsis
  misc_feature (1)..(141): Homolog of NCBI NO: 25295758 NR Description: probable calcium binding protein [imported] -
  misc_feature (1)..(141): Homolog of NCBI NO: 18406202 NR Description: calmodulin-like protein (MSS3) [Arabidopsis
  misc_feature (1)..(143): Homolog of NCBI NO: 28301674 NR Description: calcium-binding protein [Lotus japonicus]
  misc_feature (1)..(140): Homolog of NCBI NO: 15221358 NR Description: calcium-binding protein, putative [Arabidopsis
  misc_feature (1)..(143): Homolog of NCBI NO: 15236276 NR Description: calcium-binding protein, putative [Arabidopsis
MFDKDGDGKITTKELNESFKNLGIIIPEDELTQIIQKIDVNGDGCVDIEEFGELYKTIMVEDEDEVGEEDMKEAFNVFDRNGDGFITVDELKAVLSSLGLKQGKTLEECRKMIMQVDVDGDGRVNYMEFRQMMKKGRFFSSLS

SEQ ID NO: 36978 - DNA, 1505 bp, Arabidopsis thaliana
  misc_feature (1)..(1505): Ceres Seq. ID no. 12394634
  misc_feature: MA Experiment ID: 108461 Result: Up-regulated in Transcription
  misc_feature: MA Experiment 108461 PARAMETER Experiment Name: At_Germinating_Seeds_cDNA_P Parameter: Age (day) Value: 1 vs. 0
  misc_feature: MA Experiment 108461 PARAMETER Experiment Name: At_Germinating_Seeds_cDNA_P Parameter: Tissue Value: Germinating Seeds
  misc_feature: MA Experiment ID: 108464 Result: Up-regulated in Transcription
  misc_feature: MA Experiment 108464 PARAMETER Experiment Name: At_Germinating_Seeds_cDNA_P Parameter: Age (day) Value: 4 vs. 0
  misc_feature: MA Experiment 108464 PARAMETER Experiment Name: At_Germinating_Seeds_cDNA_P Parameter: Tissue Value: Germinating Seeds
  misc_feature: MA Experiment ID: 108573 Result: Up-regulated in Transcription
  misc_feature: MA Experiment 108573 PARAMETER Experiment Name: At_Drought_cDNA_P Parameter: Timepoint (hr) Value: 6
  misc_feature: MA Experiment 108573 PARAMETER Experiment Name: At_Drought_cDNA_P Parameter: Tissue Value: Aerial
  misc_feature: MA Experiment 108573 PARAMETER Experiment Name: At_Drought_cDNA_P Parameter: Treatment Value: Drought vs. No Drought
  misc_feature: MA Experiment ID: 108595 Result: Down-regulated in Transcription
  misc_feature: MA Experiment 108595 PARAMETER Experiment Name: At_Ler-pi_Ovule_cDNA_P Parameter: Plant Line Value: null
  misc_feature: MA Experiment ID: 20000069 Result: Up-regulated in Transcription
  misc_feature: MA Experiment 20000069 PARAMETER Experiment Name: At_100uM_ABA_Mutants_cDNA_P Parameter: Plant Line Value: CS23
  misc_feature: MA Experiment 20000069 PARAMETER Experiment Name: At_100uM_ABA_Mutants_cDNA_P Parameter: Timepoint (hr) Value: 6
  misc_feature: MA Experiment 20000069 PARAMETER Experiment Name: At_100uM_ABA_Mutants_cDNA_P Parameter: Tissue Value: Aerial
  misc_feature: MA Experiment 20000069 PARAMETER Experiment Name: At_100uM_ABA_Mutants_cDNA_P Parameter: Treatment Value: 100uM ABA vs. No Treatment
  misc_feature: MA Experiment ID: 20000070 Result: Up-regulated in Transcription
  misc_feature: MA Experiment 20000070 PARAMETER Experiment Name: At_100uM_ABA_Mutants_cDNA_P Parameter: Plant Line Value: CS24
  misc_feature: MA Experiment 20000070 PARAMETER Experiment Name: At_100uM_ABA_Mutants_cDNA_P Parameter: Timepoint (hr) Value: 6
  misc_feature: MA Experiment 20000070 PARAMETER Experiment Name: At_100uM_ABA_Mutants_cDNA_P Parameter: Tissue Value: Aerial
  misc_feature: MA Experiment 20000070 PARAMETER Experiment Name: At_100uM_ABA_Mutants_cDNA_P Parameter: Treatment Value: 100uM ABA vs. No Treatment
  misc_feature: MA Experiment ID: 20000071 Result: Up-regulated in Transcription
  misc_feature: MA Experiment 20000071 PARAMETER Experiment Name: At_100uM_ABA_Mutants_cDNA_P Parameter: Plant Line Value: CS8104
  misc_feature: MA Experiment 20000071 PARAMETER Experiment Name: At_100uM_ABA_Mutants_cDNA_P Parameter: Timepoint (hr) Value: 6
  misc_feature: MA Experiment 20000071 PARAMETER Experiment Name: At_100uM_ABA_Mutants_cDNA_P Parameter: Tissue Value: Aerial
  misc_feature: MA Experiment 20000071 PARAMETER Experiment Name: At_100uM_ABA_Mutants_cDNA_P Parameter: Treatment Value: 100uM ABA vs. No Treatment
  misc_feature: MA Experiment ID: 20000072 Result: Up-regulated in Transcription
  misc_feature: MA Experiment 20000072 PARAMETER Experiment Name: At_100uM_ABA_Mutants_cDNA_P Parameter: Plant Line Value: CS8105
  misc_feature: MA Experiment 20000072 PARAMETER Experiment Name: At_100uM_ABA_Mutants_cDNA_P Parameter: Timepoint (hr) Value: 6
  misc_feature: MA Experiment 20000072 PARAMETER Experiment Name: At_100uM_ABA_Mutants_cDNA_P Parameter: Tissue Value: Aerial
  misc_feature: MA Experiment 20000072 PARAMETER Experiment Name: At_100uM_ABA_Mutants_cDNA_P Parameter: Treatment Value: 100uM ABA vs. No Treatment
  misc_feature: MA Experiment ID: 20000087 Result: Up-regulated in Transcription
  misc_feature: MA Experiment 20000087 PARAMETER Experiment Name: At_100uM_ABA_Mutants_cDNA_P Parameter: Plant Line Value: WS
  misc_feature: MA Experiment 20000087 PARAMETER Experiment Name: At_100uM_ABA_Mutants_cDNA_P Parameter: Timepoint (hr) Value: 6
  misc_feature: MA Experiment 20000087 PARAMETER Experiment Name: At_100uM_ABA_Mutants_cDNA_P Parameter: Tissue Value: Aerial
  misc_feature: MA Experiment 20000087 PARAMETER Experiment Name: At_100uM_ABA_Mutants_cDNA_P Parameter: Treatment Value: 100uM ABA vs. No Treatment
  misc_feature: MA Experiment ID: 20000088 Result: Up-regulated in Transcription
  misc_feature: MA Experiment 20000088 PARAMETER Experiment Name: At_100uM_ABA_Mutants_cDNA_P Parameter: Plant Line Value: Landsberg
  misc_feature: MA Experiment 20000088 PARAMETER Experiment Name: At_100uM_ABA_Mutants_cDNA_P Parameter: Timepoint (hr) Value: 6
  misc_feature: MA Experiment 20000088 PARAMETER Experiment Name: At_100uM_ABA_Mutants_cDNA_P Parameter: Tissue Value: Aerial
  misc_feature: MA Experiment 20000088 PARAMETER Experiment Name: At_100uM_ABA_Mutants_cDNA_P Parameter: Treatment Value: 100uM ABA vs. No Treatment
  misc_feature: MA Experiment ID: 20000111 Result: Down-regulated in Transcription
  misc_feature: MA Experiment 20000111 PARAMETER Experiment Name: At_42deg_Heat_cDNA_P Parameter: Temperature (deg C) Value: 42 vs. 22
  misc_feature: MA Experiment 20000111 PARAMETER Experiment Name: At_42deg_Heat_cDNA_P Parameter: Timepoint (hr) Value: 6
  misc_feature: MA Experiment 20000111 PARAMETER Experiment Name: At_42deg_Heat_cDNA_P Parameter: Tissue Value: Aerial
  misc_feature: MA Experiment ID: 20000112 Result: Down-regulated in Transcription
  misc_feature: MA Experiment 20000112 PARAMETER Experiment Name: At_42deg_Heat_cDNA_P Parameter: Temperature (deg C) Value: 42 vs. 22
  misc_feature: MA Experiment 20000112 PARAMETER Experiment Name: At_42deg_Heat_cDNA_P Parameter: Timepoint (hr) Value: 2
  misc_feature: MA Experiment 20000112 PARAMETER Experiment Name: At_42deg_Heat_cDNA_P Parameter: Tissue Value: Aerial
  misc_feature: MA Experiment ID: 20000117 Result: Up-regulated in Transcription
  misc_feature: MA Experiment 20000117 PARAMETER Experiment Name: At_100uM_ABA_Mutants_cDNA_P Parameter: Plant Line Value: Columbia
  misc_feature: MA Experiment 20000117 PARAMETER Experiment Name: At_100uM_ABA_Mutants_cDNA_P Parameter: Timepoint (hr) Value: 6
  misc_feature: MA Experiment 20000117 PARAMETER Experiment Name: At_100uM_ABA_Mutants_cDNA_P Parameter: Tissue Value: Aerial
  misc_feature: MA Experiment 20000117 PARAMETER Experiment Name: At_100uM_ABA_Mutants_cDNA_P Parameter: Treatment Value: 100uM ABA vs. No Treatment
  misc_feature: MA Experiment ID: 20000144 Result: Down-regulated in Transcription
  misc_feature: MA Experiment 20000144 PARAMETER Experiment Name: At_42deg_Heat_cDNA_P Parameter: Temperature (deg C) Value: 42 vs. 22
  misc_feature: MA Experiment 20000144 PARAMETER Experiment Name: At_42deg_Heat_cDNA_P Parameter: Timepoint (hr) Value: 1
  misc_feature: MA Experiment 20000144 PARAMETER Experiment Name: At_42deg_Heat_cDNA_P Parameter: Tissue Value: Aerial
  misc_feature: MA Experiment ID: 20000265 Result: Down-regulated in Transcription
  misc_feature: MA Experiment 20000265 PARAMETER Experiment Name: At_Open_Flower_P Parameter: Age (day) Value: 21
  misc_feature: MA Experiment 20000265 PARAMETER Experiment Name: At_Open_Flower_P Parameter: Plant Line Value: WS
  misc_feature: MA Experiment 20000265 PARAMETER Experiment Name: At_Open_Flower_P Parameter: Tissue Value: Closed Flower vs. Whole Plant
  misc_feature: MA Experiment ID: 20000794 Result: Down-regulated in Transcription
  misc_feature: MA Experiment 20000794 PARAMETER Experiment Name: At_Petals_P Parameter: Age (day) Value: 23-25 days
  misc_feature: MA Experiment 20000794 PARAMETER Experiment Name: At_Petals_P Parameter: Plant Line Value: WS
  misc_feature: MA Experiment 20000794 PARAMETER Experiment Name: At_Petals_P Parameter: Tissue Value: Petals vs. Whole plant
  misc_feature: MA Experiment ID: 20001247 Result: Up-regulated in Transcription
  misc_feature: MA Experiment 20001247 PARAMETER Experiment Name: At_Far-red-induction_P Parameter: Age (day) Value: 7
  misc_feature: MA Experiment 20001247 PARAMETER Experiment Name: At_Far-red-induction_P Parameter: Light Value: Far-red vs. White
  misc_feature: MA Experiment 20001247 PARAMETER Experiment Name: At_Far-red-induction_P Parameter: Organism Value: A. thaliana
  misc_feature: MA Experiment 20001247 PARAMETER Experiment Name: At_Far-red-induction_P Parameter: Plant Line Value: Columbia
  misc_feature: MA Experiment 20001247 PARAMETER Experiment Name: At_Far-red-induction_P Parameter: Timepoint (hr) Value: 1
  misc_feature: MA Experiment 20001247 PARAMETER Experiment Name: At_Far-red-induction_P Parameter: Tissue Value: Whole Plant
  misc_feature: MA Experiment ID: 20001557 Result: Down-regulated in Transcription
  misc_feature: MA Experiment 20001557 PARAMETER Experiment Name: At_Drought_Soil_Dry_P Parameter: Age (day) Value: 27
  misc_feature: MA Experiment 20001557 PARAMETER Experiment Name: At_Drought_Soil_Dry_P Parameter: Organism Value: A. thaliana
  misc_feature: MA Experiment 20001557 PARAMETER Experiment Name: At_Drought_Soil_Dry_P Parameter: Plant Line Value: WS
  misc_feature: MA Experiment 20001557 PARAMETER Experiment Name: At_Drought_Soil_Dry_P Parameter: Post Timepoint (hr) Value: 3
  misc_feature: MA Experiment 20001557 PARAMETER Experiment Name: At_Drought_Soil_Dry_P Parameter: Post-Treatment Value: Re-Water vs. No Drought
  misc_feature: MA Experiment 20001557 PARAMETER Experiment Name: At_Drought_Soil_Dry_P Parameter: Timepoint (day) Value: 13
  misc_feature: MA Experiment 20001557 PARAMETER Experiment Name: At_Drought_Soil_Dry_P Parameter: Treatment Value: Drought vs. No Drought
  misc_feature: MA Experiment ID: 20001559 Result: Down-regulated in Transcription
  misc_feature: MA Experiment 20001559 PARAMETER Experiment Name: At_Drought_Soil_Dry_P Parameter: Age (day) Value: 28
  misc_feature: MA Experiment 20001559 PARAMETER Experiment Name: At_Drought_Soil_Dry_P Parameter: Organism Value: A. thaliana
  misc_feature: MA Experiment 20001559 PARAMETER Experiment Name: At_Drought_Soil_Dry_P Parameter: Plant Line Value: WS
  misc_feature: MA Experiment 20001559 PARAMETER Experiment Name: At_Drought_Soil_Dry_P Parameter: Post Timepoint (hr) Value: 29
  misc_feature: MA Experiment 20001559 PARAMETER Experiment Name: At_Drought_Soil_Dry_P Parameter: Post-Treatment Value: Re-Water vs. No Drought
  misc_feature: MA Experiment 20001559 PARAMETER Experiment Name: At_Drought_Soil_Dry_P Parameter: Timepoint (day) Value: 14
  misc_feature: MA Experiment 20001559 PARAMETER Experiment Name: At_Drought_Soil_Dry_P Parameter: Treatment Value: Drought vs. No Drought
  misc_feature: MA Experiment ID: 20001905 Result: Down-regulated in Transcription
  misc_feature: MA Experiment 20001905 PARAMETER Experiment Name: At_Drought_Reproduction_P Parameter: Age (day) Value: 40
  misc_feature: MA Experiment 20001905 PARAMETER Experiment Name: At_Drought_Reproduction_P Parameter: Organism Value: A. thaliana
  misc_feature: MA Experiment 20001905 PARAMETER Experiment Name: At_Drought_Reproduction_P Parameter: Plant Line Value: WS
  misc_feature: MA Experiment 20001905 PARAMETER Experiment Name: At_Drought_Reproduction_P Parameter: Timepoint (day) Value: 10
  misc_feature: MA Experiment 20001905 PARAMETER Experiment Name: At_Drought_Reproduction_P Parameter: Tissue Value: Rosettes
  misc_feature: MA Experiment 20001905 PARAMETER Experiment Name: At_Drought_Reproduction_P Parameter: Treatment Value: Drought vs. No Drought
attatacaaaaactgtatcatcatcatcatcaagcttgaaatcactctctttcatccttccccgcgcactgtgtctcgctctctctctcccacatttccattatctcctttactttctttctttgagaatgtcttctacaacaatcggcgagcacatcagactccgacgagctagaaaccaaacaatccgtcatctccacgccgccgacgatgatccgccgctaagccacgtcgttcttccgatttcacaacctaatcgcttctgtaactccgcaatgtcttccttctttcccctcccgacttcctcctccaacgaaagcacgaggaagaaaccgtaccaaacgtcgtcgtttcgagggatgggttgctatgccgcagcagcagcagcagctcaagaggtttctgttccctccgtcattcgctactccgcggatttggatgccagaattagaaaagataagaagaagaagaagcataagcataagaaaaagaaaaagaagaataaaggaagctacgaagatggttcgattaggattttaagcgaagaagctagagacgttattgatgtttggtgcagacctggattaggcttctccacggatgctgtaattggtcgatcggttgatcctcctcggggaaggaatattccgtcgtctcgtcgcaaaattgatgtggataacaacaattataatcacacactgggttcttctgttcttcccattcggtttctcaatcaagaaactcattctcatgatatcttcaactctgattctacttttgtgacatcatcacgcgctgaaccaacgatgttgtcaagtagatgtcgtggccatcttccacgctcttaccctgatgatcttaccgagatgaggatgctccagaatggttttgtaatgggaagaataacagattcccgtgataactaccacgaattgaggctcgatgttgatagcatgtcatacgagcaacttcttgagcttggtgatagaattggttatgtgaatactggactaaaagaaagcgagatacatcgttgtcttgggaaaatcaaaccatccgtatcacatactcttgttgatagaaaatgtagcatctgtcaggatgagtatgagagagaggatgaggttggggaattgaactgtggacacagctttcatgtccattgcgtgaaacaatggctttcgaggaagaatgcttgtccggtctgtaagaaggcagcatatggcaagccttaaaagacttttgtatctcgtcgggtttctgatagctcaagatctttcaagccaccttgctgtatagagatctgtatcatctgatacttgattcatatttgttgtttttgcatttagcaatcacaattttttttttttaagatcttatattctttgttgggtctatttatgtgattgaaatcaagagtttgaaatctatgttttctgttgcctaggtagatttaagacaggtagagagtaatttagcatatagcatacacgcacgtaactagg

SEQ ID NO: 36979 - protein, 410 aa, Arabidopsis thaliana
  peptide (1)..(410): Ceres Seq. ID no. 12394635
  misc_feature (362)..(402): Pfam Name: Zinc finger, C3HC4 type (RING finger) Pfam Description: Zinc finger, C3HC4 type (RING finger)
  misc_feature (306)..(406): Homolog of NCBI NO: 30687050 NR Description: zinc finger (C3HC4-type RING finger) protein
  misc_feature (225)..(403): Homolog of NCBI NO: 15220067 NR Description: hypothetical protein; protein id: At1g45180.1
  misc_feature (306)..(406): Homolog of NCBI NO: 38344153 NR Description: OSJNBa0041A02.20 [Oryza sativa (japonica
  misc_feature (284)..(407): Homolog of NCBI NO: 15221230 NR Description: zinc finger protein, putative; protein id:
  misc_feature (366)..(405): Homolog of NCBI NO: 34911396 NR Description: RING zinc finger protein-like
  misc_feature (93)..(348): Homolog of NCBI NO: 34911396 NR Description: RING zinc finger protein-like
  misc_feature (44)..(409): Homolog of NCBI NO: 15219544 NR Description: putative RING zinc finger protein; protein id:
  misc_feature (43)..(410): Homolog of NCBI NO: 25511721 NR Description: F2H15.19 protein - Arabidopsis thaliana
  misc_feature (43)..(410): Homolog of NCBI NO: 21554695 NR Description: zinc-finger protein (C-terminal), putative
  misc_feature (43)..(410): Homolog of NCBI NO: 15220912 NR Description: zinc-finger protein (C-terminal), putative
YTKTVSSSSSSLKSLSFILPRALCLALSLPHFHYLLYFLSLRMSSTTIGEHIRLRRARNQTIRHLHAADDDPPLSHVVLPISQPNRFCNSAMSSFFPLPTSSSNESTRKKPYQTSSFRGMGCYAAAAAAAQEVSVPSVIRYSADLDARIRKDKKKKKHKHKKKKKKNKGSYEDGSIRILSEEARDVIDVWCRPGLGFSTDAVIGRSVDPPRGRNIPSSRRKIDVDNNNYNHTLGSSVLPIRFLNQETHSHDIFNSDSTFVTSSRAEPTMLSSRCRGHLPRSYPDDLTEMRMLQNGFVMGRITDSRDNYHELRLDVDSMSYEQLLELGDRIGYVNTGLKESEIHRCLGKIKPSVSHTLVDRKCSICQDEYEREDEVGELNCGHSFHVHCVKQWLSRKNACPVCKKAAYGKP

SEQ ID NO: 36980 - protein, 368 aa, Arabidopsis thaliana
  peptide (1)..(368): Ceres Seq. ID no. 12394636
  misc_feature (320)..(360): Pfam Name: Zinc finger, C3HC4 type (RING finger) Pfam Description: Zinc finger, C3HC4 type (RING finger)
  misc_feature (264)..(364): Homolog of NCBI NO: 30687050 NR Description: zinc finger (C3HC4-type RING finger) protein
  misc_feature (183)..(361): Homolog of NCBI NO: 15220067 NR Description: hypothetical protein; protein id: At1g45180.1
  misc_feature (264)..(364): Homolog of NCBI NO: 38344153 NR Description: OSJNBa0041A02.20 [Oryza sativa (japonica
  misc_feature (242)..(365): Homolog of NCBI NO: 15221230 NR Description: zinc finger protein, putative; protein id:
  misc_feature (324)..(363): Homolog of NCBI NO: 34911396 NR Description: RING zinc finger protein-like
  misc_feature (51)..(306): Homolog of NCBI NO: 34911396 NR Description: RING zinc finger protein-like
  misc_feature (2)..(367): Homolog of NCBI NO: 15219544 NR Description: putative RING zinc finger protein; protein id:
  misc_feature (1)..(368): Homolog of NCBI NO: 25511721 NR Description: F2H15.19 protein - Arabidopsis thaliana
  misc_feature (1)..(368): Homolog of NCBI NO: 21554695 NR Description: zinc-finger protein (C-terminal), putative
  misc_feature (1)..(368): Homolog of NCBI NO: 15220912 NR Description: zinc-finger protein (C-terminal), putative
MSSTTIGEHIRLRRARNQTIRHLHAADDDPPLSHVVLPISQPNRFCNSAMSSFFPLPTSSSNESTRKKPYQTSSFRGMGCYAAAAAAAQEVSVPSVIRYSADLDARIRKDKKKKKHKHKKKKKKNKGSYEDGSIRILSEEARDVIDVWCRPGLGFSTDAVIGRSVDPPRGRNIPSSRRKIDVDNNNYNHTLGSSVLPIRFLNQETHSHDIFNSDSTFVTSSRAEPTMLSSRCRGHLPRSYPDDLTEMRMLQNGFVMGRITDSRDNYHELRLDVDSMSYEQLLELGDRIGYVNTGLKESEIHRCLGKIKPSVSHTLVDRKCSICQDEYEREDEVGELNCGHSFHVHCVKQWLSRKNACPVCKKAAYGKP

SEQ ID NO: 36981 - protein, 319 aa, Arabidopsis thaliana
  peptide (1)..(319): Ceres Seq. ID no. 12394637
  misc_feature (271)..(311): Pfam Name: Zinc finger, C3HC4 type (RING finger) Pfam Description: Zinc finger, C3HC4 type (RING finger)
  misc_feature (215)..(315): Homolog of NCBI NO: 30687050 NR Description: zinc finger (C3HC4-type RING finger) protein
  misc_feature (134)..(312): Homolog of NCBI NO: 15220067 NR Description: hypothetical protein; protein id: At1g45180.1
  misc_feature (215)..(315): Homolog of NCBI NO: 38344153 NR Description: OSJNBa0041A02.20 [Oryza sativa (japonica
  misc_feature (193)..(316): Homolog of NCBI NO: 15221230 NR Description: zinc finger protein, putative; protein id:
  misc_feature (275)..(314): Homolog of NCBI NO: 34911396 NR Description: RING zinc finger protein-like
  misc_feature (2)..(257): Homolog of NCBI NO: 34911396 NR Description: RING zinc finger protein-like
  misc_feature (1)..(318): Homolog of NCBI NO: 15219544 NR Description: putative RING zinc finger protein; protein id:
  misc_feature (1)..(319): Homolog of NCBI NO: 25511721 NR Description: F2H15.19 protein - Arabidopsis thaliana
  misc_feature (1)..(319): Homolog of NCBI NO: 21554695 NR Description: zinc-finger protein (C-terminal), putative
  misc_feature (1)..(319): Homolog of NCBI NO: 15220912 NR Description: zinc-finger protein (C-terminal), putative
MSSFFPLPTSSSNESTRKKPYQTSSFRGMGCYAAAAAAAQEVSVPSVIRYSADLDARIRKDKKKKKHKHKKKKKKNKGSYEDGSIRILSEEARDVIDVWCRPGLGFSTDAVIGRSVDPPRGRNIPSSRRKIDVDNNNYNHTLGSSVLPIRFLNQETHSHDIFNSDSTFVTSSRAEPTMLSSRCRGHLPRSYPDDLTEMRMLQNGFVMGRITDSRDNYHELRLDVDSMSYEQLLELGDRIGYVNTGLKESEIHRCLGKIKPSVSHTLVDRKCSICQDEYEREDEVGELNCGHSFHVHCVKQWLSRKNACPVCKKAAYGKP

SEQ ID NO: 36982 - DNA, 889 bp, Arabidopsis thaliana
  misc_feature (1)..(889): Ceres Seq. ID no. 13496329
aaaaaaagagtattttcctccgaattcgccgacgactaatcacgagatggcgccgccggtgacggagcggtggtgcttagctttgattcttctctttctctccttgttcgtccaatcttcaacggcaatttactgcggtgctgaagattgttatgctcttctcggagtcgctcaagatgcgaacgcatcggatatcaagagatcttattataagctctctcttcaacatcatccagataagaatccggatcctgaatcgaggaaactgtttgttaaaatcgccactgcttatgagattttgaaagataatactactcgggcacaatatgattatgcaattgaacatccagaagaggtattttacaacaccgctcaatattaccgcgcgaaatatggacataaatcggatccccgtgctgttcttgttggtctattggtggttttatctgcatttcaatatctgaacaacgtggcaaggtataatgaggctatagcgacggttaagcgaacacctgcttacaaaaataagctcaaggcattagaactcgaacgcacaggtggagtaagtaacaagaagaagggttcaaagcagattgaccagaaactacaggaagagctaagcaacgaacttgacttacaaatcaaaggagctgaaaaaccatcggtctgggaacttctcggtgttcgattcattctcctaccatacactatcattaagcttctagtatggtacagcagttgggtgtggagatataaggtcaagaaagctccttattcatgggaagacgcatcatacctaacccgaagatcacttagtgtgcctgccgacgcatgggctaatctaggtatccttctattctctaatttccaacctgaaccgacatattga

SEQ ID NO: 36983 - protein, 295 aa, Arabidopsis thaliana
  peptide (1)..(295): Ceres Seq. ID no. 13496330
  misc_feature (49)..(113): Pfam Name: DnaJ domain Pfam Description: DnaJ domain
  misc_feature (25)..(281): Homolog of NCBI NO: 23508632 NR Description: hypothetical protein, conserved [Plasmodium
  misc_feature (25)..(273): Homolog of NCBI NO: 39593758 NR Description: Hypothetical protein CBG06069 [Caenorhabditis
  misc_feature (28)..(273): Homolog of NCBI NO: 17538212 NR Description: DNaJ domain (prokaryotic heat shock protein)
  misc_feature (24)..(281): Homolog of NCBI NO: 12313893 NR Description: bA16L21.2.1 (novel DnaJ domain protein similar to
  misc_feature (24)..(281): Homolog of NCBI NO: 38078426 NR Description: RIKEN cDNA 2010203O07 [Mus musculus]
  misc_feature (24)..(281): Homolog of NCBI NO: 34868434 NR Description: similar to bA16L21.2.1 (novel DnaJ domain protein to Drosophila, C. elegans and Arabidopsis predicted proteins
  misc_feature (26)..(273): Homolog of NCBI NO: 18859921 NR Description: CG7872-PA [Drosophila melanogaster]
  misc_feature (117)..(281): Homolog of NCBI NO: 19347731 NR Description: unknown protein [Arabidopsis thaliana]
  misc_feature (16)..(281): Homolog of NCBI NO: 30696610 NR Description: DnaJ protein family [Arabidopsis thaliana]
  misc_feature (16)..(295): Homolog of NCBI NO: 25404348 NR Description: hypothetical protein T13M11.13 [imported] -
KKEYFPPNSPTTNHEMAPPVTERWCLALILLFLSLFVQSSTAIYCGAEDCYALLGVAQDANASDIKRSYYKLSLQHHPDKNPDPESRKLFVKIATAYEILKDNTTRAQYDYAIEHPEEVFYNTAQYYRAKYGHKSDPRAVLVGLLVVLSAFQYLNNVARYNEAIATVKRTPAYKNKLKALELERTGGVSNKKKGSKQIDQKLQEELSNELDLQIKGAEKPSVWELLGVRFILLPYTIIKLLVWYSSWVWRYKVKKAPYSWEDASYLTRRSLSVPADAWANLGILLFSNFQPEPTY

SEQ ID NO: 36984 - protein, 280 aa, Arabidopsis thaliana
  peptide (1)..(280): Ceres Seq. ID no. 13496331
  misc_feature (34)..(98): Pfam Name: DnaJ domain Pfam Description: DnaJ domain
  misc_feature (10)..(266): Homolog of NCBI NO: 23508632 NR Description: hypothetical protein, conserved [Plasmodium
  misc_feature (10)..(258): Homolog of NCBI NO: 39593758 NR Description: Hypothetical protein CBG06069 [Caenorhabditis
  misc_feature (13)..(258): Homolog of NCBI NO: 17538212 NR Description: DNaJ domain (prokaryotic heat shock protein)
  misc_feature (9)..(266): Homolog of NCBI NO: 12313893 NR Description: bA16L21.2.1 (novel DnaJ domain protein similar to
  misc_feature (9)..(266): Homolog of NCBI NO: 38078426 NR Description: RIKEN cDNA 2010203O07 [Mus musculus]
  misc_feature (9)..(266): Homolog of NCBI NO: 34868434 NR Description: similar to bA16L21.2.1 (novel DnaJ domain protein to Drosophila, C. elegans and Arabidopsis predicted proteins
  misc_feature (11)..(258): Homolog of NCBI NO: 18859921 NR Description: CG7872-PA [Drosophila melanogaster]
  misc_feature (102)..(266): Homolog of NCBI NO: 19347731 NR Description: unknown protein [Arabidopsis thaliana]
  misc_feature (1)..(266): Homolog of NCBI NO: 30696610 NR Description: DnaJ protein family [Arabidopsis thaliana]
  misc_feature (1)..(280): Homolog of NCBI NO: 25404348 NR Description: hypothetical protein T13M11.13 [imported] -
MAPPVTERWCLALILLFLSLFVQSSTAIYCGAEDCYALLGVAQDANASDIKRSYYKLSLQHHPDKNPDPESRKLFVKIATAYEILKDNTTRAQYDYAIEHPEEVFYNTAQYYRAKYGHKSDPRAVLVGLLVVLSAFQYLNNVARYNEAIATVKRTPAYKNKLKALELERTGGVSNKKKGSKQIDQKLQEELSNELDLQIKGAEKPSVWELLGVRFILLPYTIIKLLVWYSSWVWRYKVKKAPYSWEDASYLTRRSLSVPADAWANLGILLFSNFQPEPTY

SEQ ID NO: 36985 - DNA, 1183 bp, Arabidopsis thaliana
  misc_feature (1)..(1183): Ceres Seq. ID no. 12482638
  misc_feature: MA Experiment ID: 108461 Result: Up-regulated in Transcription
  misc_feature: MA Experiment 108461 PARAMETER Experiment Name: At_Germinating_Seeds_cDNA_P Parameter: Age (day) Value: 1 vs. 0
  misc_feature: MA Experiment 108461 PARAMETER Experiment Name: At_Germinating_Seeds_cDNA_P Parameter: Tissue Value: Germinating Seeds
  misc_feature: MA Experiment ID: 108462 Result: Up-regulated in Transcription
  misc_feature: MA Experiment 108462 PARAMETER Experiment Name: At_Germinating_Seeds_cDNA_P Parameter: Age (day) Value: 2 vs. 0
  misc_feature: MA Experiment 108462 PARAMETER Experiment Name: At_Germinating_Seeds_cDNA_P Parameter: Tissue Value: Germinating Seeds
  misc_feature: MA Experiment ID: 108579 Result: Up-regulated in Transcription
  misc_feature: MA Experiment 108579 PARAMETER Experiment Name: At_4deg_Cold_cDNA_P Parameter: Temperature (deg C) Value: 4 vs. 22
  misc_feature: MA Experiment 108579 PARAMETER Experiment Name: At_4deg_Cold_cDNA_P Parameter: Timepoint (hr) Value: 6
  misc_feature: MA Experiment 108579 PARAMETER Experiment Name: At_4deg_Cold_cDNA_P Parameter: Tissue Value: Aerial
  misc_feature: MA Experiment ID: 108595 Result: Down-regulated in Transcription
  misc_feature: MA Experiment 108595 PARAMETER Experiment Name: At_Ler-pi_Ovule_cDNA_P Parameter: Plant Line Value: null
  misc_feature: MA Experiment ID: 20000180 Result: Up-regulated in Transcription
  misc_feature: MA Experiment 20000180 PARAMETER Experiment Name: At_Germinating_Seeds_P Parameter: Age (hr) Value: 24 vs. 0
  misc_feature: MA Experiment 20000180 PARAMETER Experiment Name: At_Germinating_Seeds_P Parameter: Tissue Value: Germinating Seeds
  misc_feature: MA Experiment ID: 20000185 Result: Down-regulated in Transcription
  misc_feature: MA Experiment 20000185 PARAMETER Experiment Name: At_Roots__P Parameter: Age (day) Value: 7 vs. 21
  misc_feature: MA Experiment 20000185 PARAMETER Experiment Name: At_Roots__P Parameter: Organism Value: A. thaliana
  misc_feature: MA Experiment 20000185 PARAMETER Experiment Name: At_Roots__P Parameter: Tissue Value: Roots vs. Whole Plant
  misc_feature: MA Experiment ID: 20000439 Result: Down-regulated in Transcription
  misc_feature: MA Experiment 20000439 PARAMETER Experiment Name: At_Roots__P Parameter: Age (day) Value: 14 vs. 21
  misc_feature: MA Experiment 20000439 PARAMETER Experiment Name: At_Roots__P Parameter: Organism Value: A. thaliana
  misc_feature: MA Experiment 20000439 PARAMETER Experiment Name: At_Roots__P Parameter: Tissue Value: Roots vs. Whole Plant
  misc_feature: MA Experiment ID: 20001247 Result: Up-regulated in Transcription
  misc_feature: MA Experiment 20001247 PARAMETER Experiment Name: At_Far-red-induction_P Parameter: Age (day) Value: 7
  misc_feature: MA Experiment 20001247 PARAMETER Experiment Name: At_Far-red-induction_P Parameter: Light Value: Far-red vs. White
  misc_feature: MA Experiment 20001247 PARAMETER Experiment Name: At_Far-red-induction_P Parameter: Organism Value: A. thaliana
  misc_feature: MA Experiment 20001247 PARAMETER Experiment Name: At_Far-red-induction_P Parameter: Plant Line Value: Columbia
  misc_feature: MA Experiment 20001247 PARAMETER Experiment Name: At_Far-red-induction_P Parameter: Timepoint (hr) Value: 1
  misc_feature: MA Experiment 20001247 PARAMETER Experiment Name: At_Far-red-induction_P Parameter: Tissue Value: Whole Plant
  misc_feature: MA Experiment ID: 20001905 Result: Down-regulated in Transcription
  misc_feature: MA Experiment 20001905 PARAMETER Experiment Name: At_Drought_Reproduction_P Parameter: Age (day) Value: 40
  misc_feature: MA Experiment 20001905 PARAMETER Experiment Name: At_Drought_Reproduction_P Parameter: Organism Value: A. thaliana
  misc_feature: MA Experiment 20001905 PARAMETER Experiment Name: At_Drought_Reproduction_P Parameter: Plant Line Value: WS
  misc_feature: MA Experiment 20001905 PARAMETER Experiment Name: At_Drought_Reproduction_P Parameter: Timepoint (day) Value: 10
  misc_feature: MA Experiment 20001905 PARAMETER Experiment Name: At_Drought_Reproduction_P Parameter: Tissue Value: Rosettes
  misc_feature: MA Experiment 20001905 PARAMETER Experiment Name: At_Drought_Reproduction_P Parameter: Treatment Value: Drought vs. No Drought
  misc_feature: MA Experiment ID: 20001906 Result: Down-regulated in Transcription
  misc_feature: MA Experiment 20001906 PARAMETER Experiment Name: At_Drought_Reproduction_P Parameter: Age (day) Value: 35
  misc_feature: MA Experiment 20001906 PARAMETER Experiment Name: At_Drought_Reproduction_P Parameter: Organism Value: A. thaliana
  misc_feature: MA Experiment 20001906 PARAMETER Experiment Name: At_Drought_Reproduction_P Parameter: Plant Line Value: WS
  misc_feature: MA Experiment 20001906 PARAMETER Experiment Name: At_Drought_Reproduction_P Parameter: Timepoint (day) Value: 5
  misc_feature: MA Experiment 20001906 PARAMETER Experiment Name: At_Drought_Reproduction_P Parameter: Tissue Value: Siliques
  misc_feature: MA Experiment 20001906 PARAMETER Experiment Name: At_Drought_Reproduction_P Parameter: Treatment Value: Drought vs. No Drought
  misc_feature: MA Experiment ID: 20001908 Result: Down-regulated in Transcription
  misc_feature: MA Experiment 20001908 PARAMETER Experiment Name: At_Drought_Reproduction_P Parameter: Age (day) Value: 40
  misc_feature: MA Experiment 20001908 PARAMETER Experiment Name: At_Drought_Reproduction_P Parameter: Organism Value: A. thaliana
  misc_feature: MA Experiment 20001908 PARAMETER Experiment Name: At_Drought_Reproduction_P Parameter: Plant Line Value: WS
  misc_feature: MA Experiment 20001908 PARAMETER Experiment Name: At_Drought_Reproduction_P Parameter: Timepoint (day) Value: 10
  misc_feature: MA Experiment 20001908 PARAMETER Experiment Name: At_Drought_Reproduction_P Parameter: Tissue Value: Siliques
  misc_feature: MA Experiment 20001908 PARAMETER Experiment Name: At_Drought_Reproduction_P Parameter: Treatment Value: Drought vs. No Drought
  misc_feature: MA Experiment ID: 20001911 Result: Down-regulated in Transcription
  misc_feature: MA Experiment 20001911 PARAMETER Experiment Name: At_Drought_Reproduction_P Parameter: Age (day) Value: 40
  misc_feature: MA Experiment 20001911 PARAMETER Experiment Name: At_Drought_Reproduction_P Parameter: Organism Value: A. thaliana
  misc_feature: MA Experiment 20001911 PARAMETER Experiment Name: At_Drought_Reproduction_P Parameter: Plant Line Value: WS
  misc_feature: MA Experiment 20001911 PARAMETER Experiment Name: At_Drought_Reproduction_P Parameter: Timepoint (day) Value: 10
  misc_feature: MA Experiment 20001911 PARAMETER Experiment Name: At_Drought_Reproduction_P Parameter: Tissue Value: Flowers
  misc_feature: MA Experiment 20001911 PARAMETER Experiment Name: At_Drought_Reproduction_P Parameter: Treatment Value: Drought vs. No Drought
tcgatgaacagttcaattgtattaccaacggaagaccagacaaagatttccagaaattgaagtggaaacctaagaaatgtagtttaccaaggttaaatggagctatattgttggagatgcttagaggaagaagacttgtctttgtgggtgattcactaaataggaacatgtgggaatctctggtttgtattctcaaaggatcagtgaaagatgagactaaagtctatgaggctagaggaagacatcatttccgtggggaggctgagtactcattcgtcttccaagattataactgcacggtggagttctttgtttcacccttcttggttcaagagtgggaaattgtagacaagaaaggaacaaagaaggagactttaaggttggatttggttgggaagtcctctgagcagtacaaaggagctgatgttattgtctttaataccggacattggtggactcatgagaaaacatccaaaggggaggattattatcaagaaggaagtaatgtttatcatgaactcgctgttcttgaagcttttcgtaaagctttgactacatggggtcgatgggttgagaagaatgtgaatccggcaaagtccctcgttttctttcggggctattccgcatcccatttcagtggtgggcaatggaactcaggaggagcatgcgatagcgaaacagaaccgatcaagaacgatacatacctaaccccgtacccgtctaaaatgaaagtgcttgagaaagtgttaagaggtatgaaaacacctgtcacttatctaaacatcacgagattaacggactacaggaaggacggtcacccgtcagtataccggaaacagagcttatcggaaaaagagaaaaagtcgccattgctgtaccaagactgcagccattggtgcctccccggggttccagactcttggaatgaaatcctctacgctgagctgatcgtcaaactcaatcagctcagccaaacacaacgaaaaacttaaggttcttccacccccaatacttgtttgatctcaacacttttactttctattttgatggtaattgttgattatagaatgtgtagagtaaaaaagaaagatggaatataatggatcactcgatatctttgttactattggtttgtaaatgcttttgtcacgacgaatacaatatttagctccaaagagaggtt

SEQ ID NO: 36986 - protein, 329 aa, Arabidopsis thaliana
  peptide (1)..(329): Ceres Seq. ID no. 12482639
  misc_feature (1)..(316): Homolog of NCBI NO: 9759321 NR Description: gb|AAF00670.1~gene_id:MBL20.11~strong similarity
  misc_feature (1)..(318): Homolog of NCBI NO: 15228743 NR Description: putative protein
  misc_feature (1)..(318): Homolog of NCBI NO: 21592371 NR Description: unknown [Arabidopsis thaliana]
  misc_feature (1)..(318): Homolog of NCBI NO: 15242021 NR Description: putative protein
  misc_feature (1)..(322): Homolog of NCBI NO: 15239856 NR Description: putative protein; protein id: At5g49340.1
  misc_feature (1)..(316): Homolog of NCBI NO: 22330347 NR Description: hypothetical protein
  misc_feature (1)..(328): Homolog of NCBI NO: 15229945 NR Description: hypothetical protein; protein id: At3g12060.1
  misc_feature (39)..(329): Homolog of NCBI NO: 18415287 NR Description: putative protein
  misc_feature (1)..(329): Homolog of NCBI NO: 21618305 NR Description: unknown [Arabidopsis thaliana]
  misc_feature (1)..(329): Homolog of NCBI NO: 9759298 NR Description: emb|CAB82953.1~gene_id:MPH15.5~strong similarity
  misc_feature (1)..(316): Homolog of NCBI NO: 9759321 NR Description: gb|AAF00670.1~gene_id:MBL20.11~strong similarity
  misc_feature (1)..(318): Homolog of NCBI NO: 15228743 NR Description: putative protein
  misc_feature (1)..(318): Homolog of NCBI NO: 21592371 NR Description: unknown [Arabidopsis thaliana]
  misc_feature (1)..(318): Homolog of NCBI NO: 15242021 NR Description: putative protein
  misc_feature (1)..(322): Homolog of NCBI NO: 15239856 NR Description: putative protein; protein id: At5g49340.1
  misc_feature (1)..(316): Homolog of NCBI NO: 22330347 NR Description: hypothetical protein
  misc_feature (1)..(328): Homolog of NCBI NO: 15229945 NR Description: hypothetical protein; protein id: At3g12060.1
  misc_feature (39)..(329): Homolog of NCBI NO: 18415287 NR Description: putative protein
  misc_feature (1)..(329): Homolog of NCBI NO: 21618305 NR Description: unknown [Arabidopsis thaliana]
  misc_feature (1)..(329): Homolog of NCBI NO: 9759298 NR Description: emb|CAB82953.1~gene_id:MPH15.5~strong similarity
DEQFNCITNGRPDKDFQKLKWKPKKCSLPRLNGAILLEMLRGRRLVFVGDSLNRNMWESLVCILKGSVKDETKVYEARGRHHFRGEAEYSFVFQDYNCTVEFFVSPFLVQEWEIVDKKGTKKETLRLDLVGKSSEQYKGADVIVFNTGHWWTHEKTSKGEDYYQEGSNVYHELAVLEAFRKALTTWGRWVEKNVNPAKSLVFFRGYSASHFSGGQWNSGGACDSETEPIKNDTYLTPYPSKMKVLEKVLRGMKTPVTYLNITRLTDYRKDGHPSVYRKQSLSEKEKKSPLLYQDCSHWCLPGVPDSWNEILYAELIVKLNQLSQTQRKT

SEQ ID NO: 36987 - protein, 291 aa, Arabidopsis thaliana
  peptide (1)..(291): Ceres Seq. ID no. 12482640
  misc_feature (1)..(278): Homolog of NCBI NO: 9759321 NR Description: gb|AAF00670.1~gene_id:MBL20.11~strong similarity
  misc_feature (1)..(280): Homolog of NCBI NO: 15228743 NR Description: putative protein
  misc_feature (1)..(280): Homolog of NCBI NO: 21592371 NR Description: unknown [Arabidopsis thaliana]
  misc_feature (1)..(280): Homolog of NCBI NO: 15242021 NR Description: putative protein
  misc_feature (1)..(284): Homolog of NCBI NO: 15239856 NR Description: putative protein; protein id: At5g49340.1
  misc_feature (1)..(278): Homolog of NCBI NO: 22330347 NR Description: hypothetical protein
  misc_feature (1)..(290): Homolog of NCBI NO: 15229945 NR Description: hypothetical protein; protein id: At3g12060.1
  misc_feature (1)..(291): Homolog of NCBI NO: 18415287 NR Description: putative protein
  misc_feature (1)..(291): Homolog of NCBI NO: 21618305 NR Description: unknown [Arabidopsis thaliana]
  misc_feature (1)..(291): Homolog of NCBI NO: 9759298 NR Description: emb|CAB82953.1~gene_id:MPH15.5~strong similarity
  misc_feature (1)..(278): Homolog of NCBI NO: 9759321 NR Description: gb|AAF00670.1~gene_id:MBL20.11~strong similarity
  misc_feature (1)..(280): Homolog of NCBI NO: 15228743 NR Description: putative protein
  misc_feature (1)..(280): Homolog of NCBI NO: 21592371 NR Description: unknown [Arabidopsis thaliana]
  misc_feature (1)..(280): Homolog of NCBI NO: 15242021 NR Description: putative protein
  misc_feature (1)..(284): Homolog of NCBI NO: 15239856 NR Description: putative protein; protein id: At5g49340.1
  misc_feature (1)..(278): Homolog of NCBI NO: 22330347 NR Description: hypothetical protein
  misc_feature (1)..(290): Homolog of NCBI NO: 15229945 NR Description: hypothetical protein; protein id: At3g12060.1
  misc_feature (1)..(291): Homolog of NCBI NO: 18415287 NR Description: putative protein
  misc_feature (1)..(291): Homolog of NCBI NO: 21618305 NR Description: unknown [Arabidopsis thaliana]
  misc_feature (1)..(291): Homolog of NCBI NO: 9759298 NR Description: emb|CAB82953.1~gene_id:MPH15.5~strong similarity
MLRGRRLVFVGDSLNRNMWESLVCILKGSVKDETKVYEARGRHHFRGEAEYSFVFQDYNCTVEFFVSPFLVQEWEIVDKKGTKKETLRLDLVGKSSEQYKGADVIVFNTGHWWTHEKTSKGEDYYQEGSNVYHELAVLEAFRKALTTWGRWVEKNVNPAKSLVFFRGYSASHFSGGQWNSGGACDSETEPIKNDTYLTPYPSKMKVLEKVLRGMKTPVTYLNITRLTDYRKDGHPSVYRKQSLSEKEKKSPLLYQDCSHWCLPGVPDSWNEILYAELIVKLNQLSQTQRKT

SEQ ID NO: 36988 - protein, 274 aa, Arabidopsis thaliana
  peptide (1)..(274): Ceres Seq. ID no. 12482641
  misc_feature (1)..(261): Homolog of NCBI NO: 9759321 NR Description: gb|AAF00670.1~gene_id:MBL20.11~strong similarity
  misc_feature (1)..(263): Homolog of NCBI NO: 15228743 NR Description: putative protein
  misc_feature (1)..(263): Homolog of NCBI NO: 21592371 NR Description: unknown [Arabidopsis thaliana]
  misc_feature (1)..(263): Homolog of NCBI NO: 15242021 NR Description: putative protein
  misc_feature (1)..(267): Homolog of NCBI NO: 15239856 NR Description: putative protein; protein id: At5g49340.1
  misc_feature (1)..(261): Homolog of NCBI NO: 22330347 NR Description: hypothetical protein
  misc_feature (1)..(273): Homolog of NCBI NO: 15229945 NR Description: hypothetical protein; protein id: At3g12060.1
  misc_feature (1)..(274): Homolog of NCBI NO: 18415287 NR Description: putative protein
  misc_feature (1)..(274): Homolog of NCBI NO: 21618305 NR Description: unknown [Arabidopsis thaliana]
  misc_feature (1)..(274): Homolog of NCBI NO: 9759298 NR Description: emb|CAB82953.1~gene_id:MPH15.5~strong similarity
  misc_feature (1)..(261): Homolog of NCBI NO: 9759321 NR Description: gb|AAF00670.1~gene_id:MBL20.11~strong similarity
  misc_feature (1)..(263): Homolog of NCBI NO: 15228743 NR Description: putative protein
  misc_feature (1)..(263): Homolog of NCBI NO: 21592371 NR Description: unknown [Arabidopsis thaliana]
  misc_feature (1)..(263): Homolog of NCBI NO: 15242021 NR Description: putative protein
  misc_feature (1)..(267): Homolog of NCBI NO: 15239856 NR Description: putative protein; protein id: At5g49340.1
  misc_feature (1)..(261): Homolog of NCBI NO: 22330347 NR Description: hypothetical protein
  misc_feature (1)..(273): Homolog of NCBI NO: 15229945 NR Description: hypothetical protein; protein id: At3g12060.1
  misc_feature (1)..(274): Homolog of NCBI NO: 18415287 NR Description: putative protein
  misc_feature (1)..(274): Homolog of NCBI NO: 21618305 NR Description: unknown [Arabidopsis thaliana]
  misc_feature (1)..(274): Homolog of NCBI NO: 9759298 NR Description: emb|CAB82953.1~gene_id:MPH15.5~strong similarity
MWESLVCILKGSVKDETKVYEARGRHHFRGEAEYSFVFQDYNCTVEFFVSPFLVQEWEIVDKKGTKKETLRLDLVGKSSEQYKGADVIVFNTGHWWTHEKTSKGEDYYQEGSNVYHELAVLEAFRKALTTWGRWVEKNVNPAKSLVFFRGYSASHFSGGQWNSGGACDSETEPIKNDTYLTPYPSKMKVLEKVLRGMKTPVTYLNITRLTDYRKDGHPSVYRKQSLSEKEKKSPLLYQDCSHWCLPGVPDSWNEILYAELIVKLNQLSQTQRKT

SEQ ID NO: 36989 - DNA, 1387 bp, Arabidopsis thaliana
  misc_feature (1)..(1387): Ceres Seq. ID no. 12420491
aactttcatccctagttgctcgggagctttccccttcctgttcctgaagcttccgacatccgaccgcctcctcctcctcgttctactcgccgccccttctagaatcatccagaggcgtgccggtgaagcgcgagagcggtgaggcatggcgatgcagacgggggtcgcgacctccaaggtcctcatcctcgtcggtgcagggatgacgggctcgatcctgctgcggaatggccgcttatctgatgtgttgggagaactccagattatgaagggtgtaaatcaaggaacttcttcgggtccctatgacattgcacttattcaagctcagattcggaatttagcccaagaagtcagagatttgacattgtcaaagcccattaccatactgaatggcaaatctgactcgggaggcagtttatcatcctacatactgccagcagcagcagttggagcaatgggttattgctacatgtggtggaaggggttgtctctctcagatgtcatgtttgtcacaaaacacaacatggcaaatgctgttcagagcatgtcaaagcagttggagcaagtttcatcagcactagctgcaacaaaaagacatctaactcaacggcttgagaatttggatggcaaaatggatgaacaagtagaggtctccaaagctattagaaatgaggtcaatgatgttaaagatgacctgtctcaaattggatttgatgtcgaatcaattcagaaaatggttgctggattggagggaaagatcgagttacttgagaacaaacaggacgtggctaatactggtatctggtatctctgccaagtagcaggcggtttaaaagatggaataaacaccaggtttttccaggaaaccagtgagaagctgaagctctcacattcagctcaacctgaaaacaagccagtgaaggggcttgaatttttttcggaaagcaccatggaacagaaagtagctgactccaaaccaattgcggtgacagtcgacgctgagaagcctgagaaaaccgctgctgtaatgggcaccacagtgcacaggtctatcaggttctcatatcggaatgcaggccttgctttgtgatcaaatcctctccgcttgagatgcacgtggccttcctggttgctttttcttttttggcaacaaccttcctggttgctttgtgtgatggtcagaaaacatagaagaataacctgcaactggagtgacagaatttcttttccccgcagtagacaggtgtgcgttatttggttggaattatctccagtccactatcaatttttttttccttggattttgattcattttatgtttcgatttgttgccttatatactgtaaagtcattggaaagaataaataaaacacgaatgttttttgtc

SEQ ID NO: 36990 - protein, 314 aa, Arabidopsis thaliana
  peptide (1)..(314): Ceres Seq. ID no. 12420492
  misc_feature (11)..(224): Homolog of NCBI NO: 22329773 NR Description: Expressed protein
  misc_feature (7)..(219): Homolog of NCBI NO: 30688826 NR Description: expressed protein [Arabidopsis thaliana]
  misc_feature (12)..(212): Homolog of NCBI NO: 34894218 NR Description: P0439B06.30 [Oryza sativa (japonica
  misc_feature (1)..(224): Homolog of NCBI NO: 34906300 NR Description: unnamed protein product [Oryza sativa (japonica
  misc_feature (1)..(248): Homolog of NCBI NO: 7487252 NR Description: hypothetical protein At2g02730 [imported] -
  misc_feature (1)..(248): Homolog of NCBI NO: 15227027 NR Description: expressed protein
  misc_feature (1)..(228): Homolog of NCBI NO: 25361065 NR Description: protein T7N9.6 [imported] - Arabidopsis thaliana
  misc_feature (1)..(228): Homolog of NCBI NO: 18396143 NR Description: bZIP family transcription factor
  misc_feature (1)..(282): Homolog of NCBI NO: 21537323 NR Description: unknown [Arabidopsis thaliana]
  misc_feature (1)..(302): Homolog of NCBI NO: 18390460 NR Description: expressed protein
MAMQTGVATSKVLILVGAGMTGSILLRNGRLSDVLGELQIMKGVNQGTSSGPYDIALIQAQIRNLAQEVRDLTLSKPITILNGKSDSGGSLSSYILPAAAVGAMGYCYMWWKGLSLSDVMFVTKHNMANAVQSMSKQLEQVSSALAATKRHLTQRLENLDGKMDEQVEVSKAIRNEVNDVKDDLSQIGFDVESIQKMVAGLEGKIELLENKQDVANTGIWYLCQVAGGLKDGINTRFFQETSEKLKLSHSAQPENKPVKGLEFFSESTMEQKVADSKPIAVTVDAEKPEKTAAVMGTTVHRSIRFSYRNAGLAL

SEQ ID NO: 36991 - protein, 312 aa, Arabidopsis thaliana
  peptide (1)..(312): Ceres Seq. ID no. 12420493
  misc_feature (9)..(222): Homolog of NCBI NO: 22329773 NR Description: Expressed protein
  misc_feature (5)..(217): Homolog of NCBI NO: 30688826 NR Description: expressed protein [Arabidopsis thaliana]
  misc_feature (10)..(210): Homolog of NCBI NO: 34894218 NR Description: P0439B06.30 [Oryza sativa (japonica
  misc_feature (1)..(222): Homolog of NCBI NO: 34906300 NR Description: unnamed protein product [Oryza sativa (japonica
  misc_feature (1)..(246): Homolog of NCBI NO: 7487252 NR Description: hypothetical protein At2g02730 [imported] -
  misc_feature (1)..(246): Homolog of NCBI NO: 15227027 NR Description: expressed protein
  misc_feature (1)..(226): Homolog of NCBI NO: 25361065 NR Description: protein T7N9.6 [imported] - Arabidopsis thaliana
  misc_feature (1)..(226): Homolog of NCBI NO: 18396143 NR Description: bZIP family transcription factor
  misc_feature (1)..(280): Homolog of NCBI NO: 21537323 NR Description: unknown [Arabidopsis thaliana]
  misc_feature (1)..(300): Homolog of NCBI NO: 18390460 NR Description: expressed protein
MQTGVATSKVLILVGAGMTGSILLRNGRLSDVLGELQIMKGVNQGTSSGPYDIALIQAQIRNLAQEVRDLTLSKPITILNGKSDSGGSLSSYILPAAAVGAMGYCYMWWKGLSLSDVMFVTKHNMANAVQSMSKQLEQVSSALAATKRHLTQRLENLDGKMDEQVEVSKAIRNEVNDVKDDLSQIGFDVESIQKMVAGLEGKIELLENKQDVANTGIWYLCQVAGGLKDGINTRFFQETSEKLKLSHSAQPENKPVKGLEFFSESTMEQKVADSKPIAVTVDAEKPEKTAAVMGTTVHRSIRFSYRNAGLAL

SEQ ID NO: 36992 - protein, 295 aa, Arabidopsis thaliana
  peptide (1)..(295): Ceres Seq. ID no. 12420494
  misc_feature (1)..(205): Homolog of NCBI NO: 22329773 NR Description: Expressed protein
  misc_feature (1)..(200): Homolog of NCBI NO: 30688826 NR Description: expressed protein [Arabidopsis thaliana]
  misc_feature (1)..(193): Homolog of NCBI NO: 34894218 NR Description: P0439B06.30 [Oryza sativa (japonica
  misc_feature (1)..(205): Homolog of NCBI NO: 34906300 NR Description: unnamed protein product [Oryza sativa (japonica
  misc_feature (1)..(229): Homolog of NCBI NO: 7487252 NR Description: hypothetical protein At2g02730 [imported] -
  misc_feature (1)..(229): Homolog of NCBI NO: 15227027 NR Description: expressed protein
  misc_feature (1)..(209): Homolog of NCBI NO: 25361065 NR Description: protein T7N9.6 [imported] - Arabidopsis thaliana
  misc_feature (1)..(209): Homolog of NCBI NO: 18396143 NR Description: bZIP family transcription factor
  misc_feature (1)..(263): Homolog of NCBI NO: 21537323 NR Description: unknown [Arabidopsis thaliana]
  misc_feature (1)..(283): Homolog of NCBI NO: 18390460 NR Description: expressed protein
MTGSILLRNGRLSDVLGELQIMKGVNQGTSSGPYDIALIQAQIRNLAQEVRDLTLSKPITILNGKSDSGGSLSSYILPAAAVGAMGYCYMWWKGLSLSDVMFVTKHNMANAVQSMSKQLEQVSSALAATKRHLTQRLENLDGKMDEQVEVSKAIRNEVNDVKDDLSQIGFDVESIQKMVAGLEGKIELLENKQDVANTGIWYLCQVAGGLKDGINTRFFQETSEKLKLSHSAQPENKPVKGLEFFSESTMEQKVADSKPIAVTVDAEKPEKTAAVMGTTVHRSIRFSYRNAGLAL

SEQ ID NO: 36993 - DNA, 1772 bp, Arabidopsis thaliana
  misc_feature (1)..(1772): Ceres Seq. ID no. 12329490
  misc_feature: MA Experiment ID: 20000171 Result: Down-regulated in Transcription
  misc_feature: MA Experiment 20000171 PARAMETER Experiment Name: At_42deg_Heat_P Parameter: Age (day) Value: 14
  misc_feature: MA Experiment 20000171 PARAMETER Experiment Name: At_42deg_Heat_P Parameter: Organism Value: A. thaliana
  misc_feature: MA Experiment 20000171 PARAMETER Experiment Name: At_42deg_Heat_P Parameter: Plant Line Value: WS
  misc_feature: MA Experiment 20000171 PARAMETER Experiment Name: At_42deg_Heat_P Parameter: Temperature (deg C) Value: 42 vs. 22
  misc_feature: MA Experiment 20000171 PARAMETER Experiment Name: At_42deg_Heat_P Parameter: Timepoint (hr) Value: 1
  misc_feature: MA Experiment 20000171 PARAMETER Experiment Name: At_42deg_Heat_P Parameter: Tissue Value: Aerial
  misc_feature: MA Experiment ID: 20000182 Result: Up-regulated in Transcription
  misc_feature: MA Experiment 20000182 PARAMETER Experiment Name: At_2mM_SA_P Parameter: Age (day) Value: 14
  misc_feature: MA Experiment 20000182 PARAMETER Experiment Name: At_2mM_SA_P Parameter: Organism Value: A. thaliana
  misc_feature: MA Experiment 20000182 PARAMETER Experiment Name: At_2mM_SA_P Parameter: Plant Line Value: WS
  misc_feature: MA Experiment 20000182 PARAMETER Experiment Name: At_2mM_SA_P Parameter: Timepoint (hr) Value: 6
  misc_feature: MA Experiment 20000182 PARAMETER Experiment Name: At_2mM_SA_P Parameter: Tissue Value: Aerial
  misc_feature: MA Experiment 20000182 PARAMETER Experiment Name: At_2mM_SA_P Parameter: Treatment Value: 2mM SA vs. No Treatment
  misc_feature: MA Experiment ID: 20000184 Result: Up-regulated in Transcription
  misc_feature: MA Experiment 20000184 PARAMETER Experiment Name: At_Shoots__P Parameter: Age (day) Value: 7
  misc_feature: MA Experiment 20000184 PARAMETER Experiment Name: At_Shoots__P Parameter: Tissue Value: Shoots vs. Whole Plant
  misc_feature: MA Experiment ID: 20000234 Result: Up-regulated in Transcription
  misc_feature: MA Experiment 20000234 PARAMETER Experiment Name: At_Siliques_P Parameter: Age (day) Value: 21
  misc_feature: MA Experiment 20000234 PARAMETER Experiment Name: At_Siliques_P Parameter: Organism Value: A. thaliana
  misc_feature: MA Experiment 20000234 PARAMETER Experiment Name: At_Siliques_P Parameter: Plant Line Value: WS
  misc_feature: MA Experiment 20000234 PARAMETER Experiment Name: At_Siliques_P Parameter: Tissue Value: Less Than 5mm Siliques vs. Whole Plant
  misc_feature: MA Experiment ID: 20000235 Result: Up-regulated in Transcription
  misc_feature: MA Experiment 20000235 PARAMETER Experiment Name: At_Siliques_P Parameter: Age (day) Value: 21
  misc_feature: MA Experiment 20000235 PARAMETER Experiment Name: At_Siliques_P Parameter: Organism Value: A. thaliana
  misc_feature: MA Experiment 20000235 PARAMETER Experiment Name: At_Siliques_P Parameter: Plant Line Value: WS
  misc_feature: MA Experiment 20000235 PARAMETER Experiment Name: At_Siliques_P Parameter: Tissue Value: 5-10mm Siliques vs. Whole Plant
  misc_feature: MA Experiment ID: 20000438 Result: Up-regulated in Transcription
  misc_feature: MA Experiment 20000438 PARAMETER Experiment Name: At_Shoots__P Parameter: Age (day) Value: 14
  misc_feature: MA Experiment 20000438 PARAMETER Experiment Name: At_Shoots__P Parameter: Tissue Value: Shoots vs. Whole Plant
  misc_feature: MA Experiment ID: 20000439 Result: Up-regulated in Transcription
  misc_feature: MA Experiment 20000439 PARAMETER Experiment Name: At_Roots__P Parameter: Age (day) Value: 14 vs. 21
  misc_feature: MA Experiment 20000439 PARAMETER Experiment Name: At_Roots__P Parameter: Organism Value: A. thaliana
  misc_feature: MA Experiment 20000439 PARAMETER Experiment Name: At_Roots__P Parameter: Tissue Value: Roots vs. Whole Plant
  misc_feature: MA Experiment ID: 20000452 Result: Up-regulated in Transcription
  misc_feature: MA Experiment 20000452 PARAMETER Experiment Name: At_CS6879_Shoots-Roots_P Parameter: Age (day) Value: 14
  misc_feature: MA Experiment 20000452 PARAMETER Experiment Name: At_CS6879_Shoots-Roots_P Parameter: Organism Value: A. thaliana
  misc_feature: MA Experiment 20000452 PARAMETER Experiment Name: At_CS6879_Shoots-Roots_P Parameter: Plant Line Value: CS6879 vs. WS
  misc_feature: MA Experiment 20000452 PARAMETER Experiment Name: At_CS6879_Shoots-Roots_P Parameter: Tissue Value: Shoots
  misc_feature: MA Experiment ID: 20000495 Result: Down-regulated in Transcription
  misc_feature: MA Experiment 20000495 PARAMETER Experiment Name: At_Guard_Cells_P Parameter: Harvest Date Value: 8/2/2002
  misc_feature: MA Experiment 20000495 PARAMETER Experiment Name: At_Guard_Cells_P Parameter: Organism Value: A. thaliana
  misc_feature: MA Experiment 20000495 PARAMETER Experiment Name: At_Guard_Cells_P Parameter: Tissue Value: Guard Cells vs. Leaves
  misc_feature: MA Experiment ID: 20000527 Result: Down-regulated in Transcription
  misc_feature: MA Experiment 20000527 PARAMETER Experiment Name: At_10percent_PEG_P Parameter: Age (day) Value: 20
  misc_feature: MA Experiment 20000527 PARAMETER Experiment Name: At_10percent_PEG_P Parameter: Organism Value: A. thaliana
  misc_feature: MA Experiment 20000527 PARAMETER Experiment Name: At_10percent_PEG_P Parameter: Plant Line Value: WS
  misc_feature: MA Experiment 20000527 PARAMETER Experiment Name: At_10percent_PEG_P Parameter: Timepoint (day) Value: 20
  misc_feature: MA Experiment 20000527 PARAMETER Experiment Name: At_10percent_PEG_P Parameter: Tissue Value: Whole Plant
  misc_feature: MA Experiment 20000527 PARAMETER Experiment Name: At_10percent_PEG_P Parameter: Treatment Value: 10percent PEG vs. No Treatment
  misc_feature: MA Experiment ID: 20001248 Result: Down-regulated in Transcription
  misc_feature: MA Experiment 20001248 PARAMETER Experiment Name: At_Far-red-induction_P Parameter: Age (day) Value: 7
  misc_feature: MA Experiment 20001248 PARAMETER Experiment Name: At_Far-red-induction_P Parameter: Light Value: Far-red vs. White
  misc_feature: MA Experiment 20001248 PARAMETER Experiment Name: At_Far-red-induction_P Parameter: Organism Value: A. thaliana
  misc_feature: MA Experiment 20001248 PARAMETER Experiment Name: At_Far-red-induction_P Parameter: Plant Line Value: Columbia
  misc_feature: MA Experiment 20001248 PARAMETER Experiment Name: At_Far-red-induction_P Parameter: Timepoint (hr) Value: 4
  misc_feature: MA Experiment 20001248 PARAMETER Experiment Name: At_Far-red-induction_P Parameter: Tissue Value: Whole Plant
  misc_feature: MA Experiment ID: 20001450 Result: Down-regulated in Transcription
  misc_feature: MA Experiment 20001450 PARAMETER Experiment Name: At_Far-red-induction_P Parameter: Age (day) Value: 7
  misc_feature: MA Experiment 20001450 PARAMETER Experiment Name: At_Far-red-induction_P Parameter: Light Value: Far-red vs. White
  misc_feature: MA Experiment 20001450 PARAMETER Experiment Name: At_Far-red-induction_P Parameter: Organism Value: A. thaliana
  misc_feature: MA Experiment 20001450 PARAMETER Experiment Name: At_Far-red-induction_P Parameter: Plant Line Value: Columbia
  misc_feature: MA Experiment 20001450 PARAMETER Experiment Name: At_Far-red-induction_P Parameter: Timepoint (hr) Value: 8
  misc_feature: MA Experiment 20001450 PARAMETER Experiment Name: At_Far-red-induction_P Parameter: Tissue Value: Whole Plant
  misc_feature: MA Experiment ID: 20001557 Result: Up-regulated in Transcription
  misc_feature: MA Experiment 20001557 PARAMETER Experiment Name: At_Drought_Soil_Dry_P Parameter: Age (day) Value: 27
  misc_feature: MA Experiment 20001557 PARAMETER Experiment Name: At_Drought_Soil_Dry_P Parameter: Organism Value: A. thaliana
  misc_feature: MA Experiment 20001557 PARAMETER Experiment Name: At_Drought_Soil_Dry_P Parameter: Plant Line Value: WS
  misc_feature: MA Experiment 20001557 PARAMETER Experiment Name: At_Drought_Soil_Dry_P Parameter: Post Timepoint (hr) Value: 3
  misc_feature: MA Experiment 20001557 PARAMETER Experiment Name: At_Drought_Soil_Dry_P Parameter: Post-Treatment Value: Re-Water vs. No Drought
  misc_feature: MA Experiment 20001557 PARAMETER Experiment Name: At_Drought_Soil_Dry_P Parameter: Timepoint (day) Value: 13
  misc_feature: MA Experiment 20001557 PARAMETER Experiment Name: At_Drought_Soil_Dry_P Parameter: Treatment Value: Drought vs. No Drought
  misc_feature: MA Experiment ID: 20001761 Result: Down-regulated in Transcription
  misc_feature: MA Experiment 20001761 PARAMETER Experiment Name: At_50mM_NH4NO3_L-to-H_P Parameter: Timepoint (hr) Value: 4
  misc_feature: MA Experiment 20001761 PARAMETER Experiment Name: At_50mM_NH4NO3_L-to-H_P Parameter: Tissue Value: Siliques
  misc_feature: MA Experiment 20001761 PARAMETER Experiment Name: At_50mM_NH4NO3_L-to-H_P Parameter: Treatment Value: 50mM NH4NO3 vs 100mM Mannitol
aacaagtcacacacttaaaacaaaacaaaacaaaacaaaaacagagcacacaaaaagagaaaccaagttttcttaaaaatggagctagaatcttctcctcctctacctcctcatgtgatgctcgtatcttttccagggcaaggccacgttaatccacttcttcgtcttggtaagctcttagcttcaaagggtttgctcataaccttcgtcaccactgagtcatggggcaaaaagatgcgaatctccaacaaaatccaagaccgtgtcctcaaaccggttggtaaaggctatctccggtatgatttcttcgacgacgggcttcctgaagacgacgaagctagcagaaccaacttaaccatcctccgaccacatctagagctggtcggcaaaagagagatcaagaaccttgtgaaacgttacaaggaagtaacgaaacagcccgtgacatgtcttatcaacaaccctttcgtctcttgggtctgtgacgtggcagaagatcttcaaatcccttgtgctgttctttgggttcaatcttgtgcctgcttagctgcttattactattaccaccacaacctagttgacttcccgaccaaaacagaacccgagatcgatgtccaaatctctggcatgcctctcttgaaacatgacgagatcccttctttcattcacccttcaagtcctcactccgctttgcgagaagtgatcatagatcagattaaacggcttcacaagactttctccattttcatcgacactttcaactcattggagaaagacatcattgaccacatgtcgacgctctctctccccggtgttatcagaccgctaggaccactctacaaaatggctaaaaccgtagcttatgatgtcgttaaagtaaacatctctgagccaacggatccttgcatggagtggttagactcgcagccagtttcctccgttgtttacatctcattcgggaccgttgcttacttgaaacaagaacaaatagacgagatcgcttacggtgtgttaaacgccgacgttacgttcttgtgggtgattagacaacaagagttaggtttcaacaaagagaaacatgttttgccggaagaagttaaagggaaagggaagatcgttgaatggtgttcacaagagaaagtattatctcatccttcagtggcatgtttcgtgactcactgtggatggaactcaacgatggaagctgtgtcttccggagtcccgacggtttgttttcctcaatggggagatcaagtcacggacgccgtttacatgatcgatgtttggaagacgggagtgaggctaagccgtggagaggcggaggagaggttagtgccgagggaggaagttgcggagaggttgagagaggttactaaaggagagaaagcgatcgagttgaaaaagaatgctttgaagtggaaggaagaggcggaggcggcggttgctcgcggtggttcgtcggataggaatcttgaaaagtttgtggagaagttgggtgccaaacctgtggggaaagtacaaaacgggagtcataatcatgtcttggctggatcaatcaaaagcttttaaaaagtcatttaagtttttttgttttttgcctttggtttctgcaaattcgtaattgtgtttgtatccatcctcccattgtgttctttgtttttctgtttactatttttttttggtatgggtctaggggagagtcaatgaccttactgaagaatgtcagtcacgcattaaaaaatatattattaatggttaatactatatcttgc

SEQ ID NO: 36994 - protein, 496 aa, Arabidopsis thaliana
  peptide (1)..(496): Ceres Seq. ID no. 12329491
  misc_feature (31)..(476): Pfam Name: UDP-glucoronosyl and UDP-glucosyl transferase Pfam Description: UDP-glucoronosyl and UDP-glucosyl transferase
  misc_feature (12)..(472): Homolog of NCBI NO: 13431605 NR Description: Limonoid UDP-glucosyltransferase (Limonoid
  misc_feature (1)..(483): Homolog of NCBI NO: 7433899 NR Description: probable indole-3-acetate
  misc_feature (1)..(483): Homolog of NCBI NO: 30683281 NR Description: UDP-glycosyltransferase family [Arabidopsis
  misc_feature (1)..(483): Homolog of NCBI NO: 25082972 NR Description: indole-3-acetate beta-glucosyltransferase like
  misc_feature (1)..(482): Homolog of NCBI NO: 15234619 NR Description: indole-3-acetate beta-glucosyltransferase like
  misc_feature (7)..(485): Homolog of NCBI NO: 15234616 NR Description: UDP-glycosyltransferase, putative
  misc_feature (7)..(485): Homolog of NCBI NO: 21593030 NR Description: indole-3-acetate beta-glucosyltransferase like
  misc_feature (1)..(494): Homolog of NCBI NO: 9794913 NR Description: UDP-glucose:sinapate glucosyltransferase
  misc_feature (1)..(496): Homolog of NCBI NO: 20259348 NR Description: putative UDP-glucose:indole-3-acetate
  misc_feature (1)..(496): Homolog of NCBI NO: 15233091 NR Description: UDP-glucosyltransferase, putative
MELESSPPLPPHVMLVSFPGQGHVNPLLRLGKLLASKGLLITFVTTESWGKKMRISNKIQDRVLKPVGKGYLRYDFFDDGLPEDDEASRTNLTILRPHLELVGKREIKNLVKRYKEVTKQPVTCLINNPFVSWVCDVAEDLQIPCAVLWVQSCACLAAYYYYHHNLVDFPTKTEPEIDVQISGMPLLKHDEIPSFIHPSSPHSALREVIIDQIKRLHKTFSIFIDTFNSLEKDIIDHMSTLSLPGVIRPLGPLYKMAKTVAYDVVKVNISEPTDPCMEWLDSQPVSSVVYISFGTVAYLKQEQIDEIAYGVLNADVTFLWVIRQQELGFNKEKHVLPEEVKGKGKIVEWCSQEKVLSHPSVACFVTHCGWNSTMEAVSSGVPTVCFPQWGDQVTDAVYMIDVWKTGVRLSRGEAEERLVPREEVAERLREVTKGEKAIELKKNALKWKEEAEAAVARGGSSDRNLEKFVEKLGAKPVGKVQNGSHNHVLAGSIKSF

SEQ ID NO: 36995 - protein, 483 aa, Arabidopsis thaliana
  peptide (1)..(483): Ceres Seq. ID no. 12329492
  misc_feature (18)..(463): Pfam Name: UDP-glucoronosyl and UDP-glucosyl transferase Pfam Description: UDP-glucoronosyl and UDP-glucosyl transferase
  misc_feature (1)..(459): Homolog of NCBI NO: 13431605 NR Description: Limonoid UDP-glucosyltransferase (Limonoid
  misc_feature (1)..(470): Homolog of NCBI NO: 7433899 NR Description: probable indole-3-acetate
  misc_feature (1)..(470): Homolog of NCBI NO: 30683281 NR Description: UDP-glycosyltransferase family [Arabidopsis
  misc_feature (1)..(470): Homolog of NCBI NO: 25082972 NR Description: indole-3-acetate beta-glucosyltransferase like
  misc_feature (1)..(469): Homolog of NCBI NO: 15234619 NR Description: indole-3-acetate beta-glucosyltransferase like
  misc_feature (1)..(472): Homolog of NCBI NO: 15234616 NR Description: UDP-glycosyltransferase, putative
  misc_feature (1)..(472): Homolog of NCBI NO: 21593030 NR Description: indole-3-acetate beta-glucosyltransferase like
  misc_feature (1)..(481): Homolog of NCBI NO: 9794913 NR Description: UDP-glucose:sinapate glucosyltransferase
  misc_feature (1)..(483): Homolog of NCBI NO: 20259348 NR Description: putative UDP-glucose:indole-3-acetate
  misc_feature (1)..(483): Homolog of NCBI NO: 15233091 NR Description: UDP-glucosyltransferase, putative
MLVSFPGQGHVNPLLRLGKLLASKGLLITFVTTESWGKKMRISNKIQDRVLKPVGKGYLRYDFFDDGLPEDDEASRTNLTILRPHLELVGKREIKNLVKRYKEVTKQPVTCLINNPFVSWVCDVAEDLQIPCAVLWVQSCACLAAYYYYHHNLVDFPTKTEPEIDVQISGMPLLKHDEIPSFIHPSSPHSALREVIIDQIKRLHKTFSIFIDTFNSLEKDIIDHMSTLSLPGVIRPLGPLYKMAKTVAYDVVKVNISEPTDPCMEWLDSQPVSSVVYISFGTVAYLKQEQIDEIAYGVLNADVTFLWVIRQQELGFNKEKHVLPEEVKGKGKIVEWCSQEKVLSHPSVACFVTHCGWNSTMEAVSSGVPTVCFPQWGDQVTDAVYMIDVWKTGVRLSRGEAEERLVPREEVAERLREVTKGEKAIELKKNALKWKEEAEAAVARGGSSDRNLEKFVEKLGAKPVGKVQNGSHNHVLAGSIKSF

SEQ ID NO: 36996 - protein, 444 aa, Arabidopsis thaliana
  peptide (1)..(444): Ceres Seq. ID no. 12329493
  misc_feature (1)..(424): Pfam Name: UDP-glucoronosyl and UDP-glucosyl transferase Pfam Description: UDP-glucoronosyl and UDP-glucosyl transferase
  misc_feature (1)..(420): Homolog of NCBI NO: 13431605 NR Description: Limonoid UDP-glucosyltransferase (Limonoid
  misc_feature (1)..(431): Homolog of NCBI NO: 7433899 NR Description: probable indole-3-acetate
  misc_feature (1)..(431): Homolog of NCBI NO: 30683281 NR Description: UDP-glycosyltransferase family [Arabidopsis
  misc_feature (1)..(431): Homolog of NCBI NO: 25082972 NR Description: indole-3-acetate beta-glucosyltransferase like
  misc_feature (1)..(430): Homolog of NCBI NO: 15234619 NR Description: indole-3-acetate beta-glucosyltransferase like
  misc_feature (1)..(433): Homolog of NCBI NO: 15234616 NR Description: UDP-glycosyltransferase, putative
  misc_feature (1)..(433): Homolog of NCBI NO: 21593030 NR Description: indole-3-acetate beta-glucosyltransferase like
  misc_feature (1)..(442): Homolog of NCBI NO: 9794913 NR Description: UDP-glucose:sinapate glucosyltransferase
  misc_feature (1)..(444): Homolog of NCBI NO: 20259348 NR Description: putative UDP-glucose:indole-3-acetate
  misc_feature (1)..(444): Homolog of NCBI NO: 15233091 NR Description: UDP-glucosyltransferase, putative
MRISNKIQDRVLKPVGKGYLRYDFFDDGLPEDDEASRTNLTILRPHLELVGKREIKNLVKRYKEVTKQPVTCLINNPFVSWVCDVAEDLQIPCAVLWVQSCACLAAYYYYHHNLVDFPTKTEPEIDVQISGMPLLKHDEIPSFIHPSSPHSALREVIIDQIKRLHKTFSIFIDTFNSLEKDIIDHMSTLSLPGVIRPLGPLYKMAKTVAYDVVKVNISEPTDPCMEWLDSQPVSSVVYISFGTVAYLKQEQIDEIAYGVLNADVTFLWVIRQQELGFNKEKHVLPEEVKGKGKIVEWCSQEKVLSHPSVACFVTHCGWNSTMEAVSSGVPTVCFPQWGDQVTDAVYMIDVWKTGVRLSRGEAEERLVPREEVAERLREVTKGEKAIELKKNALKWKEEAEAAVARGGSSDRNLEKFVEKLGAKPVGKVQNGSHNHVLAGSIKSF

SEQ ID NO: 36997 - DNA, 780 bp, Arabidopsis thaliana
  misc_feature (1)..(780): Ceres Seq. ID no. 12603324
  misc_feature: MA Experiment ID: 20000185 Result: Down-regulated in Transcription
  misc_feature: MA Experiment 20000185 PARAMETER Experiment Name: At_Roots__P Parameter: Age (day) Value: 7 vs. 21
  misc_feature: MA Experiment 20000185 PARAMETER Experiment Name: At_Roots__P Parameter: Organism Value: A. thaliana
  misc_feature: MA Experiment 20000185 PARAMETER Experiment Name: At_Roots__P Parameter: Tissue Value: Roots vs. Whole Plant
  misc_feature: MA Experiment ID: 20000439 Result: Down-regulated in Transcription
  misc_feature: MA Experiment 20000439 PARAMETER Experiment Name: At_Roots__P Parameter: Age (day) Value: 14 vs. 21
  misc_feature: MA Experiment 20000439 PARAMETER Experiment Name: At_Roots__P Parameter: Organism Value: A. thaliana
  misc_feature: MA Experiment 20000439 PARAMETER Experiment Name: At_Roots__P Parameter: Tissue Value: Roots vs. Whole Plant
acaatggcgaatcttcccaccgttctcgtcaccggcgctagtggcagaacaggccagattgtgtataagaagctgaaggaggggtcagacaagtttgtagcaaagggtttagttagaagtgctcaaggaaaagagaaaattggaggagaagctgatgttttcattggggatataacagatgctgatagcattaaccctgcgtttcaaggaatcgatgcgcttgtgattctcactagtgctgtgcctaaaatgaaacctggttttgatcccactaaaggtggaagacctgagttcattttcgaagatggacagtatcctgatcatcctttgaacaaactgggaaatgggaatatactggtttggaagagaaaggctgaacagtaccttgctgattctggaactccttacacaattatcagagctggaggacttctagataaggaaggcggtgtacagctgctagttggtaaagacgatgagctacttcagacagacacgaaaaccgtccccagggctgatgttgcagaagtctgcattcaggcattgctgttcgaggaggccaagaacaaagctttcgatctcggctcaaagccagagggaaccagtaccccaaccaaagacttcaaggctctcttctctcaagtcacctctcgtttttaaatcattatctttgttgccaataagaacatttgggatcaaaccttctaaaataaattctgtagtgtctatttgaaaggatacgttctttcaattcaatgagaatattggggttgaatgtcc

SEQ ID NO: 36998 - protein, 219 aa, Arabidopsis thaliana
  peptide (1)..(219): Ceres Seq. ID no. 12603325
  misc_feature (107)..(219): Homolog of NCBI NO: 18404496 NR Description: expressed protein
  misc_feature (107)..(219): Homolog of NCBI NO: 7485430 NR Description: hypothetical protein At2g37660 [imported] -
  misc_feature (6)..(117): Homolog of NCBI NO: 34897418 NR Description: unknown protein [Oryza sativa (japonica
  misc_feature (103)..(219): Homolog of NCBI NO: 34897418 NR Description: unknown protein [Oryza sativa (japonica
  misc_feature (5)..(117): Homolog of NCBI NO: 14719331 NR Description: putative 3-beta hydroxysteroid
  misc_feature (107)..(219): Homolog of NCBI NO: 14719331 NR Description: putative 3-beta hydroxysteroid
  misc_feature (103)..(214): Homolog of NCBI NO: 11358410 NR Description: hypothetical protein T7H20.290 - Arabidopsis
  misc_feature (2)..(117): Homolog of NCBI NO: 11358410 NR Description: hypothetical protein T7H20.290 - Arabidopsis
  misc_feature (2)..(117): Homolog of NCBI NO: 18413869 NR Description: putative protein
  misc_feature (103)..(219): Homolog of NCBI NO: 18413869 NR Description: putative protein
TMANLPTVLVTGASGRTGQIVYKKLKEGSDKFVAKGLVRSAQGKEKIGGEADVFIGDITDADSINPAFQGIDALVILTSAVPKMKPGFDPTKGGRPEFIFEDGQYPDHPLNKLGNGNILVWKRKAEQYLADSGTPYTIIRAGGLLDKEGGVQLLVGKDDELLQTDTKTVPRADVAEVCIQALLFEEAKNKAFDLGSKPEGTSTPTKDFKALFSQVTSRF

SEQ ID NO: 36999 - protein, 218 aa, Arabidopsis thaliana
  peptide (1)..(218): Ceres Seq. ID no. 12603326
  misc_feature (106)..(218): Homolog of NCBI NO: 18404496 NR Description: expressed protein
  misc_feature (106)..(218): Homolog of NCBI NO: 7485430 NR Description: hypothetical protein At2g37660 [imported] -
  misc_feature (5)..(116): Homolog of NCBI NO: 34897418 NR Description: unknown protein [Oryza sativa (japonica
  misc_feature (102)..(218): Homolog of NCBI NO: 34897418 NR Description: unknown protein [Oryza sativa (japonica
  misc_feature (4)..(116): Homolog of NCBI NO: 14719331 NR Description: putative 3-beta hydroxysteroid
  misc_feature (106)..(218): Homolog of NCBI NO: 14719331 NR Description: putative 3-beta hydroxysteroid
  misc_feature (102)..(213): Homolog of NCBI NO: 11358410 NR Description: hypothetical protein T7H20.290 - Arabidopsis
  misc_feature (1)..(116): Homolog of NCBI NO: 11358410 NR Description: hypothetical protein T7H20.290 - Arabidopsis
  misc_feature (1)..(116): Homolog of NCBI NO: 18413869 NR Description: putative protein
  misc_feature (102)..(218): Homolog of NCBI NO: 18413869 NR Description: putative protein
MANLPTVLVTGASGRTGQIVYKKLKEGSDKFVAKGLVRSAQGKEKIGGEADVFIGDITDADSINPAFQGIDALVILTSAVPKMKPGFDPTKGGRPEFIFEDGQYPDHPLNKLGNGNILVWKRKAEQYLADSGTPYTIIRAGGLLDKEGGVQLLVGKDDELLQTDTKTVPRADVAEVCIQALLFEEAKNKAFDLGSKPEGTSTPTKDFKALFSQVTSRF

SEQ ID NO: 37000 - protein, 136 aa, Arabidopsis thaliana
  peptide (1)..(136): Ceres Seq. ID no. 12603327
  misc_feature (24)..(136): Homolog of NCBI NO: 18404496 NR Description: expressed protein
  misc_feature (24)..(136): Homolog of NCBI NO: 7485430 NR Description: hypothetical protein At2g37660 [imported] -
  misc_feature (1)..(34): Homolog of NCBI NO: 34897418 NR Description: unknown protein [Oryza sativa (japonica
  misc_feature (20)..(136): Homolog of NCBI NO: 34897418 NR Description: unknown protein [Oryza sativa (japonica
  misc_feature (1)..(34): Homolog of NCBI NO: 14719331 NR Description: putative 3-beta hydroxysteroid
  misc_feature (24)..(136): Homolog of NCBI NO: 14719331 NR Description: putative 3-beta hydroxysteroid
  misc_feature (20)..(131): Homolog of NCBI NO: 11358410 NR Description: hypothetical protein T7H20.290 - Arabidopsis
  misc_feature (1)..(34): Homolog of NCBI NO: 11358410 NR Description: hypothetical protein T7H20.290 - Arabidopsis
  misc_feature (1)..(34): Homolog of NCBI NO: 18413869 NR Description: putative protein
  misc_feature (20)..(136): Homolog of NCBI NO: 18413869 NR Description: putative protein
MKPGFDPTKGGRPEFIFEDGQYPDHPLNKLGNGNILVWKRKAEQYLADSGTPYTIIRAGGLLDKEGGVQLLVGKDDELLQTDTKTVPRADVAEVCIQALLFEEAKNKAFDLGSKPEGTSTPTKDFKALFSQVTSRF

SEQ ID NO: 37001 - DNA, 1041 bp, Arabidopsis thaliana
  misc_feature (1)..(1041): Ceres Seq. ID no. 12420773
  misc_feature: MA Experiment ID: 108433 Result: Up-regulated in Transcription
  misc_feature: MA Experiment 108433 PARAMETER Experiment Name: At_rhl_Mutant2_cDNA_P Parameter: Age (day) Value: 7
  misc_feature: MA Experiment 108433 PARAMETER Experiment Name: At_rhl_Mutant2_cDNA_P Parameter: Organism Value: A. thaliana
  misc_feature: MA Experiment 108433 PARAMETER Experiment Name: At_rhl_Mutant2_cDNA_P Parameter: Plant Line Value: rhl Mutant vs. wt landsburg
  misc_feature: MA Experiment 108433 PARAMETER Experiment Name: At_rhl_Mutant2_cDNA_P Parameter: Tissue Value: Roots
  misc_feature: MA Experiment ID: 108595 Result: Up-regulated in Transcription
  misc_feature: MA Experiment 108595 PARAMETER Experiment Name: At_Ler-pi_Ovule_cDNA_P Parameter: Plant Line Value: null
  misc_feature: MA Experiment ID: 20000087 Result: Up-regulated in Transcription
  misc_feature: MA Experiment 20000087 PARAMETER Experiment Name: At_100uM_ABA_Mutants_cDNA_P Parameter: Plant Line Value: WS
  misc_feature: MA Experiment 20000087 PARAMETER Experiment Name: At_100uM_ABA_Mutants_cDNA_P Parameter: Timepoint (hr) Value: 6
  misc_feature: MA Experiment 20000087 PARAMETER Experiment Name: At_100uM_ABA_Mutants_cDNA_P Parameter: Tissue Value: Aerial
  misc_feature: MA Experiment 20000087 PARAMETER Experiment Name: At_100uM_ABA_Mutants_cDNA_P Parameter: Treatment Value: 100uM ABA vs. No Treatment
  misc_feature: MA Experiment ID: 20000234 Result: Up-regulated in Transcription
  misc_feature: MA Experiment 20000234 PARAMETER Experiment Name: At_Siliques_P Parameter: Age (day) Value: 21
  misc_feature: MA Experiment 20000234 PARAMETER Experiment Name: At_Siliques_P Parameter: Organism Value: A. thaliana
  misc_feature: MA Experiment 20000234 PARAMETER Experiment Name: At_Siliques_P Parameter: Plant Line Value: WS
  misc_feature: MA Experiment 20000234 PARAMETER Experiment Name: At_Siliques_P Parameter: Tissue Value: Less Than 5mm Siliques vs. Whole Plant
  misc_feature: MA Experiment ID: 20000235 Result: Up-regulated in Transcription
  misc_feature: MA Experiment 20000235 PARAMETER Experiment Name: At_Siliques_P Parameter: Age (day) Value: 21
  misc_feature: MA Experiment 20000235 PARAMETER Experiment Name: At_Siliques_P Parameter: Organism Value: A. thaliana
  misc_feature: MA Experiment 20000235 PARAMETER Experiment Name: At_Siliques_P Parameter: Plant Line Value: WS
  misc_feature: MA Experiment 20000235 PARAMETER Experiment Name: At_Siliques_P Parameter: Tissue Value: 5-10mm Siliques vs. Whole Plant
  misc_feature: MA Experiment ID: 20000264 Result: Up-regulated in Transcription
  misc_feature: MA Experiment 20000264 PARAMETER Experiment Name: At_Open_Flower_P Parameter: Age (day) Value: 21
  misc_feature: MA Experiment 20000264 PARAMETER Experiment Name: At_Open_Flower_P Parameter: Plant Line Value: WS
  misc_feature: MA Experiment 20000264 PARAMETER Experiment Name: At_Open_Flower_P Parameter: Tissue Value: Open Flower vs. Whole Plant
  misc_feature: MA Experiment ID: 20000265 Result: Up-regulated in Transcription
  misc_feature: MA Experiment 20000265 PARAMETER Experiment Name: At_Open_Flower_P Parameter: Age (day) Value: 21
  misc_feature: MA Experiment 20000265 PARAMETER Experiment Name: At_Open_Flower_P Parameter: Plant Line Value: WS
  misc_feature: MA Experiment 20000265 PARAMETER Experiment Name: At_Open_Flower_P Parameter: Tissue Value: Closed Flower vs. Whole Plant
  misc_feature: MA Experiment ID: 20000286 Result: Up-regulated in Transcription
  misc_feature: MA Experiment 20000286 PARAMETER Experiment Name: At_Open_Flower_P Parameter: Age (day) Value: 21
  misc_feature: MA Experiment 20000286 PARAMETER Experiment Name: At_Open_Flower_P Parameter: Plant Line Value: WS
  misc_feature: MA Experiment 20000286 PARAMETER Experiment Name: At_Open_Flower_P Parameter: Tissue Value: Half Open vs. Whole Plant
  misc_feature: MA Experiment ID: 20000451 Result: Down-regulated in Transcription
  misc_feature: MA Experiment 20000451 PARAMETER Experiment Name: At_CS6879_Shoots-Roots_P Parameter: Age (day) Value: 14
  misc_feature: MA Experiment 20000451 PARAMETER Experiment Name: At_CS6879_Shoots-Roots_P Parameter: Organism Value: A. thaliana
  misc_feature: MA Experiment 20000451 PARAMETER Experiment Name: At_CS6879_Shoots-Roots_P Parameter: Plant Line Value: CS6879 vs. WS
  misc_feature: MA Experiment 20000451 PARAMETER Experiment Name: At_CS6879_Shoots-Roots_P Parameter: Tissue Value: Roots
ctccgatttagatagaaacaacaatcctccggtggtcactcgctaatctccgtttgatctcgccgacactcgagccttttaccgatgaaggatggagattccttaccaataagcacttcttccgtcacggcgacgacggtgaccggaaagaaggaaaccggttattccgctctcttctcgaaaggccggtacaagttttgggccttagctgcgattctgttactcgctttctggtcaatgctcactggcacggtcaatctccgttggtctgccggtaacattaaccatttcaccgacgatctcgtctttcccatccacgaggatctcgatgttcttgtgagtcttcttcttcttcgcgatctgttttctgatttctgtgaattacgtttgttttgtgttgtgttgatgaggttattaggaaatggaggagagggagaaagtggtgaagcacatgtgggatgtgtataacaatggccgtcgtatcagattacctaggttttggcaagaggccttcgaggctgcttacgaggagcttaccagtgatgtacccgatgtggttgaggctgccatttccgagatcgctaggatgtctattcgctccattgttatagatccgcctccgcttcattccacgaatgtacgagaattgacaaagactctaaaacttgcggacaaaggaagagcaactcaaatatcaaaaccaagcagccgtcgattgaaatagctatggaggctttacgaaaaaggtagtgtagcagtcagccgtcgtggcgtgaccatacatatacttgatgtcagaaagatcaatcaacctcatccctagaatatatgtccatcattagtgttattttttcttccactaggggcattaatcctttcactatcatcatcatctcttctataaacaaaattttgaggaagctttttatccactccttattagctctgaacggtaatgtcttctattttggatttatgaaatatttcatatgtagttagcccatacatttaaataccttccaatgaattttctagttatat

SEQ ID NO: 37002 - protein, 127 aa, Arabidopsis thaliana
  peptide (1)..(127): Ceres Seq. ID no. 12420774
  misc_feature (36)..(84): Homolog of NCBI NO: 15222008 NR Description: hypothetical protein; protein id: At1g19380.1
  misc_feature (31)..(84): Homolog of NCBI NO: 28209490 NR Description: unknown protein [Oryza sativa (japonica
  misc_feature (1)..(84): Homolog of NCBI NO: 9858772 NR Description: BAC19.4 [Lycopersicon esculentum]
  misc_feature (1)..(84): Homolog of NCBI NO: 15234477 NR Description: hypothetical protein; protein id: At4g36660.1
  misc_feature (1)..(84): Homolog of NCBI NO: 18424975 NR Description: putative protein
MKDGDSLPISTSSVTATTVTGKKETGYSALFSKGRYKFWALAAILLLAFWSMLTGTVNLRWSAGNINHFTDDLVFPIHEDLDVLVSLLLLRDLFSDFCELRLFCVVLMRLLGNGGEGESGEAHVGCV

SEQ ID NO: 37003 - protein, 100 aa, Arabidopsis thaliana
  peptide (1)..(100): Ceres Seq. ID no. 12420775
  misc_feature (1)..(58): Homolog of NCBI NO: 15222008 NR Description: hypothetical protein; protein id: At1g19380.1
  misc_feature (1)..(66): Homolog of NCBI NO: 28209490 NR Description: unknown protein [Oryza sativa (japonica
  misc_feature (1)..(70): Homolog of NCBI NO: 15234477 NR Description: hypothetical protein; protein id: At4g36660.1
  misc_feature (1)..(71): Homolog of NCBI NO: 9858772 NR Description: BAC19.4 [Lycopersicon esculentum]
  misc_feature (1)..(100): Homolog of NCBI NO: 18424975 NR Description: putative protein
MEEREKVVKHMWDVYNNGRRIRLPRFWQEAFEAAYEELTSDVPDVVEAAISEIARMSIRSIVIDPPPLHSTNVRELTKTLKLADKGRATQISKPSSRRLK

SEQ ID NO: 37004 - protein, 90 aa, Arabidopsis thaliana
  peptide (1)..(90): Ceres Seq. ID no. 12420776
  misc_feature (1)..(48): Homolog of NCBI NO: 15222008 NR Description: hypothetical protein; protein id: At1g19380.1
  misc_feature (1)..(56): Homolog of NCBI NO: 28209490 NR Description: unknown protein [Oryza sativa (japonica
  misc_feature (1)..(60): Homolog of NCBI NO: 15234477 NR Description: hypothetical protein; protein id: At4g36660.1
  misc_feature (1)..(61): Homolog of NCBI NO: 9858772 NR Description: BAC19.4 [Lycopersicon esculentum]
  misc_feature (1)..(90): Homolog of NCBI NO: 18424975 NR Description: putative protein
MWDVYNNGRRIRLPRFWQEAFEAAYEELTSDVPDVVEAAISEIARMSIRSIVIDPPPLHSTNVRELTKTLKLADKGRATQISKPSSRRLK

SEQ ID NO: 37005 - DNA, 825 bp, Arabidopsis thaliana
  misc_feature (1)..(825): Ceres Seq. ID no. 12336410
  misc_feature: MA Experiment ID: 108434 Result: Down-regulated in Transcription
  misc_feature: MA Experiment 108434 PARAMETER Experiment Name: At_Root_Tips_cDNA_P Parameter: Tissue Value: Root Tips
  misc_feature: MA Experiment ID: 108462 Result: Down-regulated in Transcription
  misc_feature: MA Experiment 108462 PARAMETER Experiment Name: At_Germinating_Seeds_cDNA_P Parameter: Age (day) Value: 2 vs. 0
  misc_feature: MA Experiment 108462 PARAMETER Experiment Name: At_Germinating_Seeds_cDNA_P Parameter: Tissue Value: Germinating Seeds
  misc_feature: MA Experiment ID: 108463 Result: Down-regulated in Transcription
  misc_feature: MA Experiment 108463 PARAMETER Experiment Name: At_Germinating_Seeds_cDNA_P Parameter: Age (day) Value: 3 vs. 0
  misc_feature: MA Experiment 108463 PARAMETER Experiment Name: At_Germinating_Seeds_cDNA_P Parameter: Tissue Value: Germinating Seeds
  misc_feature: MA Experiment ID: 108501 Result: Up-regulated in Transcription
  misc_feature: MA Experiment 108501 PARAMETER Experiment Name: At_ap2_floral_buds_cDNA_P Parameter: Plant Line Value: ap2 (Ler.)
  misc_feature: MA Experiment 108501 PARAMETER Experiment Name: At_ap2_floral_buds_cDNA_P Parameter: Tissue Value: Closed Flower
  misc_feature: MA Experiment ID: 108576 Result: Up-regulated in Transcription
  misc_feature: MA Experiment 108576 PARAMETER Experiment Name: At_42deg_Heat_cDNA_P Parameter: Temperature (deg C) Value: 42 vs. 22
  misc_feature: MA Experiment 108576 PARAMETER Experiment Name: At_42deg_Heat_cDNA_P Parameter: Timepoint (hr) Value: 1
  misc_feature: MA Experiment 108576 PARAMETER Experiment Name: At_42deg_Heat_cDNA_P Parameter: Tissue Value: Aerial
  misc_feature: MA Experiment ID: 108595 Result: Up-regulated in Transcription
  misc_feature: MA Experiment 108595 PARAMETER Experiment Name: At_Ler-pi_Ovule_cDNA_P Parameter: Plant Line Value: null
  misc_feature: MA Experiment ID: 20000179 Result: Up-regulated in Transcription
  misc_feature: MA Experiment 20000179 PARAMETER Experiment Name: At_Germinating_Seeds_P Parameter: Age (hr) Value: 6 vs. 0
  misc_feature: MA Experiment 20000179 PARAMETER Experiment Name: At_Germinating_Seeds_P Parameter: Tissue Value: Germinating Seeds
  misc_feature: MA Experiment ID: 20000184 Result: Down-regulated in Transcription
  misc_feature: MA Experiment 20000184 PARAMETER Experiment Name: At_Shoots__P Parameter: Age (day) Value: 7
  misc_feature: MA Experiment 20000184 PARAMETER Experiment Name: At_Shoots__P Parameter: Tissue Value: Shoots vs. Whole Plant
  misc_feature: MA Experiment ID: 20000227 Result: Down-regulated in Transcription
  misc_feature: MA Experiment 20000227 PARAMETER Experiment Name: At_Root-Tips-vs-Tops_P Parameter: Tissue Value: Root Tips vs. Root Tops
  misc_feature: MA Experiment ID: 20000234 Result: Up-regulated in Transcription
  misc_feature: MA Experiment 20000234 PARAMETER Experiment Name: At_Siliques_P Parameter: Age (day) Value: 21
  misc_feature: MA Experiment 20000234 PARAMETER Experiment Name: At_Siliques_P Parameter: Organism Value: A. thaliana
  misc_feature: MA Experiment 20000234 PARAMETER Experiment Name: At_Siliques_P Parameter: Plant Line Value: WS
  misc_feature: MA Experiment 20000234 PARAMETER Experiment Name: At_Siliques_P Parameter: Tissue Value: Less Than 5mm Siliques vs. Whole Plant
  misc_feature: MA Experiment ID: 20000235 Result: Up-regulated in Transcription
  misc_feature: MA Experiment 20000235 PARAMETER Experiment Name: At_Siliques_P Parameter: Age (day) Value: 21
  misc_feature: MA Experiment 20000235 PARAMETER Experiment Name: At_Siliques_P Parameter: Organism Value: A. thaliana
  misc_feature: MA Experiment 20000235 PARAMETER Experiment Name: At_Siliques_P Parameter: Plant Line Value: WS
  misc_feature: MA Experiment 20000235 PARAMETER Experiment Name: At_Siliques_P Parameter: Tissue Value: 5-10mm Siliques vs. Whole Plant
  misc_feature: MA Experiment ID: 20000264 Result: Up-regulated in Transcription
  misc_feature: MA Experiment 20000264 PARAMETER Experiment Name: At_Open_Flower_P Parameter: Age (day) Value: 21
  misc_feature: MA Experiment 20000264 PARAMETER Experiment Name: At_Open_Flower_P Parameter: Plant Line Value: WS
  misc_feature: MA Experiment 20000264 PARAMETER Experiment Name: At_Open_Flower_P Parameter: Tissue Value: Open Flower vs. Whole Plant
  misc_feature: MA Experiment ID: 20000286 Result: Up-regulated in Transcription
  misc_feature: MA Experiment 20000286 PARAMETER Experiment Name: At_Open_Flower_P Parameter: Age (day) Value: 21
  misc_feature: MA Experiment 20000286 PARAMETER Experiment Name: At_Open_Flower_P Parameter: Plant Line Value: WS
  misc_feature: MA Experiment 20000286 PARAMETER Experiment Name: At_Open_Flower_P Parameter: Tissue Value: Half Open vs. Whole Plant
  misc_feature: MA Experiment ID: 20000438 Result: Down-regulated in Transcription
  misc_feature: MA Experiment 20000438 PARAMETER Experiment Name: At_Shoots__P Parameter: Age (day) Value: 14
  misc_feature: MA Experiment 20000438 PARAMETER Experiment Name: At_Shoots__P Parameter: Tissue Value: Shoots vs. Whole Plant
  misc_feature: MA Experiment ID: 20000495 Result: Up-regulated in Transcription
  misc_feature: MA Experiment 20000495 PARAMETER Experiment Name: At_Guard_Cells_P Parameter: Harvest Date Value: 8/2/2002
  misc_feature: MA Experiment 20000495 PARAMETER Experiment Name: At_Guard_Cells_P Parameter: Organism Value: A. thaliana
  misc_feature: MA Experiment 20000495 PARAMETER Experiment Name: At_Guard_Cells_P Parameter: Tissue Value: Guard Cells vs. Leaves
  misc_feature: MA Experiment ID: 20000794 Result: Up-regulated in Transcription
  misc_feature: MA Experiment 20000794 PARAMETER Experiment Name: At_Petals_P Parameter: Age (day) Value: 23-25 days
  misc_feature: MA Experiment 20000794 PARAMETER Experiment Name: At_Petals_P Parameter: Plant Line Value: WS
  misc_feature: MA Experiment 20000794 PARAMETER Experiment Name: At_Petals_P Parameter: Tissue Value: Petals vs. Whole plant
  misc_feature: MA Experiment ID: 20001555 Result: Up-regulated in Transcription
  misc_feature: MA Experiment 20001555 PARAMETER Experiment Name: At_Drought_Soil_Dry_P Parameter: Age (day) Value: 24
  misc_feature: MA Experiment 20001555 PARAMETER Experiment Name: At_Drought_Soil_Dry_P Parameter: Organism Value: A. thaliana
  misc_feature: MA Experiment 20001555 PARAMETER Experiment Name: At_Drought_Soil_Dry_P Parameter: Plant Line Value: WS
  misc_feature: MA Experiment 20001555 PARAMETER Experiment Name: At_Drought_Soil_Dry_P Parameter: Post Timepoint (hr) Value: None
  misc_feature: MA Experiment 20001555 PARAMETER Experiment Name: At_Drought_Soil_Dry_P Parameter: Post-Treatment Value: None
  misc_feature: MA Experiment 20001555 PARAMETER Experiment Name: At_Drought_Soil_Dry_P Parameter: Timepoint (day) Value: 10
  misc_feature: MA Experiment 20001555 PARAMETER Experiment Name: At_Drought_Soil_Dry_P Parameter: Treatment Value: Drought vs. No Drought
attaaaaagctaatatggctactagggaagagagagataagtatagatcagtccttgaagatgcatgacaggttcaatggaggtatgataaccctccagacttcaatagtgtgaaccagctctttgaagaaggccagactaaggtgtggccagaaggttcgttagaagagacagtgcaaaacgcgatcaagtcatgggagatggagttctcacataagatccgtttacaggacttcaagactataaaccctgagaagtttaagctctttgtcaatggtttatcagctgaagagacgcttaggcttgggagttacaatgctttgctcaagaactctttgcctgaagagtttcagtactataagcccgaggaagagagctttgagtcatcacatgacgcctttagatctgctttaccacgcgggtttgcgtgggaaatactctctgtgtactcggggccgcctgttatagccttcaaatttagacactggggatactttgaaggaactttcaaaggtcatgctcctactggggaaatggttcaattcctgggtctaggagttctaaaggttgacgaatcacttagagcagaggagattgagatttactatgatccaggagagctgttcgggggactactcaagggacctcctatatcagagaccaaaaccacagacagtggagacaacactgcagagaaacaaagctgcccattcacacactaagataataagaaaagcagaagtgtatttgaccctttaaagaatatattgtaacagtctcttggttattgatgcatggaataaattataagttatgttaggcgcc

SEQ ID NO: 37006 - protein, 173 aa, Arabidopsis thaliana
  peptide (1)..(173): Ceres Seq. ID no. 12336411
  misc_feature (1)..(148): Homolog of NCBI NO: 17227713 NR Description: similar to pathogenesis related protein [Nostoc
  misc_feature (1)..(173): Homolog of NCBI NO: 23129762 NR Description: hypothetical protein [Nostoc punctiforme]
  misc_feature (1)..(152): Homolog of NCBI NO: 1346809 NR Description: Pathogen-related protein
  misc_feature (1)..(154): Homolog of NCBI NO: 34904652 NR Description: putative pathogenesis related protein
  misc_feature (1)..(160): Homolog of NCBI NO: 34904656 NR Description: putative pathogenesis related protein
  misc_feature (1)..(149): Homolog of NCBI NO: 34910862 NR Description: putative pathogenesis related protein
  misc_feature (1)..(166): Homolog of NCBI NO: 34910864 NR Description: putative pathogenesis related protein
  misc_feature (1)..(173): Homolog of NCBI NO: 30699354 NR Description: expressed protein [Arabidopsis thaliana]
  misc_feature (1)..(173): Homolog of NCBI NO: 25372796 NR Description: hypothetical protein F9K20.18 [imported] -
  misc_feature (1)..(173): Homolog of NCBI NO: 18412106 NR Description: expressed protein
MEFSHKIRLQDFKTINPEKFKLFVNGLSAEETLRLGSYNALLKNSLPEEFQYYKPEEESFESSHDAFRSALPRGFAWEILSVYSGPPVIAFKFRHWGYFEGTFKGHAPTGEMVQFLGLGVLKVDESLRAEEIEIYYDPGELFGGLLKGPPISETKTTDSGDNTAEKQSCPFTH

SEQ ID NO: 37007 - DNA, 1977 bp, Arabidopsis thaliana
  misc_feature (1)..(1977): Ceres Seq. ID no. 13497255
  misc_feature: MA Experiment ID: 20000286 Result: Down-regulated in Transcription
  misc_feature: MA Experiment 20000286 PARAMETER Experiment Name: At_Open_Flower_P Parameter: Age (day) Value: 21
  misc_feature: MA Experiment 20000286 PARAMETER Experiment Name: At_Open_Flower_P Parameter: Plant Line Value: WS
  misc_feature: MA Experiment 20000286 PARAMETER Experiment Name: At_Open_Flower_P Parameter: Tissue Value: Half Open vs. Whole Plant
  misc_feature: MA Experiment ID: 20001248 Result: Down-regulated in Transcription
  misc_feature: MA Experiment 20001248 PARAMETER Experiment Name: At_Far-red-induction_P Parameter: Age (day) Value: 7
  misc_feature: MA Experiment 20001248 PARAMETER Experiment Name: At_Far-red-induction_P Parameter: Light Value: Far-red vs. White
  misc_feature: MA Experiment 20001248 PARAMETER Experiment Name: At_Far-red-induction_P Parameter: Organism Value: A. thaliana
  misc_feature: MA Experiment 20001248 PARAMETER Experiment Name: At_Far-red-induction_P Parameter: Plant Line Value: Columbia
  misc_feature: MA Experiment 20001248 PARAMETER Experiment Name: At_Far-red-induction_P Parameter: Timepoint (hr) Value: 4
  misc_feature: MA Experiment 20001248 PARAMETER Experiment Name: At_Far-red-induction_P Parameter: Tissue Value: Whole Plant
  misc_feature: MA Experiment ID: 20001451 Result: Up-regulated in Transcription
  misc_feature: MA Experiment 20001451 PARAMETER Experiment Name: At_Far-red-induction_P Parameter: Age (day) Value: 7
  misc_feature: MA Experiment 20001451 PARAMETER Experiment Name: At_Far-red-induction_P Parameter: Light Value: Far-red vs. White
  misc_feature: MA Experiment 20001451 PARAMETER Experiment Name: At_Far-red-induction_P Parameter: Organism Value: A. thaliana
  misc_feature: MA Experiment 20001451 PARAMETER Experiment Name: At_Far-red-induction_P Parameter: Plant Line Value: Columbia
  misc_feature: MA Experiment 20001451 PARAMETER Experiment Name: At_Far-red-induction_P Parameter: Timepoint (hr) Value: 24
  misc_feature: MA Experiment 20001451 PARAMETER Experiment Name: At_Far-red-induction_P Parameter: Tissue Value: Whole Plant
acaaaattcctctttttttttatttaattaaaattgcatcaaaatgtttgttttcttgagccgaattattctattaagcgcattaaaaaagaaaaaaaaaaaagaaataggagctaatgtaatttagagaaactctatcaaagacttataataaccaaaacgaagacctattgtgaccaaatacaaagggtggggcagatcgtttctttgaatactatgatgtcttttagtttatgagttgctttatttctgatacttctcctccccattctcttatcctatcctcagccattgaagcctctgtgtcccaatttgttttgcagatcatccatgttaaaactattgtctgaaccacggtccccgtcaacattccacaccagattcccattacaccatagttaagcttgtaccccaataatagaccaaatgggattccaaacacgtaatagcaggcgatgttaacgtaggccaccactgcttgccatccagctcccacagccacactgataagacaggttggacattgttgatgacaatggaaagtgcaagtattggtgtgagttctttaacaagaatgatgactttttcgtctttcacaaaaagtgatggatattgatctctaaagatgagtagaatcattgatacaatgaatccgattagcgtcgatgttatcactgccacaagtagtgagaatttcgcggttcttggatggttagctcctaattcattagacactctcacacttacggctgtgttcatcccaatagcaatcatagcagtccatcccaaaatattcatgcagatggagagggcagctacagagatttcagcattcttcaaatatccagcaaataatatgattgccataaaataccaaacctccaaacagagcataacagcagaagccaaagataatctaacgaaactccacaaattatgaaaagcctcccacgagaaaccagaccaagcctcaccacacgtaccactaaatatgtacacaagctgagccatgtcaatgaagcaccacgacgcgttaagcactacggctagacctggcataccccactggagcttcacaatgacaaaccacgtgagaggcacgtgtataacaagtgcaacagccgatatcacggccatgaccattatcttgctttgcgattgcaaaaatttagcggttggaaaattgatggcgtaggcaaagatttgagggatcatgtagatggaaaatattccggccgcgctagagattgccgccgtttgaccaatggacgcgaggataggggcggcgaaaatgtaaaggagagagaggataagagcagtcacgtttagtatcacccatgatcgttgcaagtaaacgccaagcattgacaattttcctgctccaaacgcttgtccacatagcgtttctaacgcacttcccattccaagcatgatgccgaatgagaagccggcaacgacggagttttcgacggagacagcggcaagagcgatggtgctgatgtgaccggcgaagacctgagtaatagcgccgagagaatattggttcacggatgtgaaaatggcgggaccggccaagtaccatagctttttggtttccacgttgaattccctaacgaagccaccgacggtggtgatcggaggaatatcgtcgacggataagaaaggaagatcagaacgttcttccgccgcagtgagaagcgtctccgttatatctttgtcttttgccatcttaaggagaaagagatggagagattaaaggaggtcgaagactaaggaccaacgagtgaggatcttgggtttaatcattcatgaattatataggaaaaaaaaatgttaatacgtgcgaccaaaaaaattgtttttatgatataaaggaaaaaatagctaatatagcaactagcatttaataaaatggctaaatgtagacaaaatcattgttgtattaatcaaattatggtatatattatggatggattc

SEQ ID NO: 37008 - protein, 104 aa, Arabidopsis thaliana
  peptide (1)..(104): Ceres Seq. ID no. 13497256
MSRIIDTMNPISVDVITATSSENFAVLGWLAPNSLDTLTLTAVFIPIAIIAVHPKIFMQMERAATEISAFFKYPANNMIAIKYQTSKQSITAEAKDNLTKLHKL

SEQ ID NO: 37009 - protein, 97 aa, Arabidopsis thaliana
  peptide (1)..(97): Ceres Seq. ID no. 13497257
MNPISVDVITATSSENFAVLGWLAPNSLDTLTLTAVFIPIAIIAVHPKIFMQMERAATEISAFFKYPANNMIAIKYQTSKQSITAEAKDNLTKLHKL

SEQ ID NO: 37010 - protein, 65 aa, Arabidopsis thaliana
  peptide (1)..(65): Ceres Seq. ID no. 13497258
  misc_feature (1)..(61): Homolog of NCBI NO: 18405005 NR Description: expressed protein [Arabidopsis thaliana]
MAGPAKYHSFLVSTLNSLTKPPTVVIGGISSTDKKGRSERSSAAVRSVSVISLSFAILRRKRWRD

SEQ ID NO: 37011 - DNA, 924 bp, Arabidopsis thaliana
  misc_feature (1)..(924): Ceres Seq. ID no. 12421272
  misc_feature: MA Experiment ID: 108434 Result: Down-regulated in Transcription
  misc_feature: MA Experiment 108434 PARAMETER Experiment Name: At_Root_Tips_cDNA_P Parameter: Tissue Value: Root Tips
  misc_feature: MA Experiment ID: 108435 Result: Down-regulated in Transcription
  misc_feature: MA Experiment 108435 PARAMETER Experiment Name: At_stm_Mutants_cDNA_P Parameter: Plant Line Value: wt Landsburg vs stm
  misc_feature: MA Experiment 108435 PARAMETER Experiment Name: At_stm_Mutants_cDNA_P Parameter: Tissue Value: Shoot Apical Meristem Region
  misc_feature: MA Experiment ID: 108462 Result: Up-regulated in Transcription
  misc_feature: MA Experiment 108462 PARAMETER Experiment Name: At_Germinating_Seeds_cDNA_P Parameter: Age (day) Value: 2 vs. 0
  misc_feature: MA Experiment 108462 PARAMETER Experiment Name: At_Germinating_Seeds_cDNA_P Parameter: Tissue Value: Germinating Seeds
  misc_feature: MA Experiment ID: 108463 Result: Up-regulated in Transcription
  misc_feature: MA Experiment 108463 PARAMETER Experiment Name: At_Germinating_Seeds_cDNA_P Parameter: Age (day) Value: 3 vs. 0
  misc_feature: MA Experiment 108463 PARAMETER Experiment Name: At_Germinating_Seeds_cDNA_P Parameter: Tissue Value: Germinating Seeds
  misc_feature: MA Experiment ID: 108464 Result: Up-regulated in Transcription
  misc_feature: MA Experiment 108464 PARAMETER Experiment Name: At_Germinating_Seeds_cDNA_P Parameter: Age (day) Value: 4 vs. 0
  misc_feature: MA Experiment 108464 PARAMETER Experiment Name: At_Germinating_Seeds_cDNA_P Parameter: Tissue Value: Germinating Seeds
  misc_feature: MA Experiment ID: 108595 Result: Down-regulated in Transcription
  misc_feature: MA Experiment 108595 PARAMETER Experiment Name: At_Ler-pi_Ovule_cDNA_P Parameter: Plant Line Value: null
  misc_feature: MA Experiment ID: 20000071 Result: Down-regulated in Transcription
  misc_feature: MA Experiment 20000071 PARAMETER Experiment Name: At_100uM_ABA_Mutants_cDNA_P Parameter: Plant Line Value: CS8104
  misc_feature: MA Experiment 20000071 PARAMETER Experiment Name: At_100uM_ABA_Mutants_cDNA_P Parameter: Timepoint (hr) Value: 6
  misc_feature: MA Experiment 20000071 PARAMETER Experiment Name: At_100uM_ABA_Mutants_cDNA_P Parameter: Tissue Value: Aerial
  misc_feature: MA Experiment 20000071 PARAMETER Experiment Name: At_100uM_ABA_Mutants_cDNA_P Parameter: Treatment Value: 100uM ABA vs. No Treatment
  misc_feature: MA Experiment ID: 20000117 Result: Down-regulated in Transcription
  misc_feature: MA Experiment 20000117 PARAMETER Experiment Name: At_100uM_ABA_Mutants_cDNA_P Parameter: Plant Line Value: Columbia
  misc_feature: MA Experiment 20000117 PARAMETER Experiment Name: At_100uM_ABA_Mutants_cDNA_P Parameter: Timepoint (hr) Value: 6
  misc_feature: MA Experiment 20000117 PARAMETER Experiment Name: At_100uM_ABA_Mutants_cDNA_P Parameter: Tissue Value: Aerial
  misc_feature: MA Experiment 20000117 PARAMETER Experiment Name: At_100uM_ABA_Mutants_cDNA_P Parameter: Treatment Value: 100uM ABA vs. No Treatment
  misc_feature: MA Experiment ID: 20000179 Result: Up-regulated in Transcription
  misc_feature: MA Experiment 20000179 PARAMETER Experiment Name: At_Germinating_Seeds_P Parameter: Age (hr) Value: 6 vs. 0
  misc_feature: MA Experiment 20000179 PARAMETER Experiment Name: At_Germinating_Seeds_P Parameter: Tissue Value: Germinating Seeds
  misc_feature: MA Experiment ID: 20000180 Result: Up-regulated in Transcription
  misc_feature: MA Experiment 20000180 PARAMETER Experiment Name: At_Germinating_Seeds_P Parameter: Age (hr) Value: 24 vs. 0
  misc_feature: MA Experiment 20000180 PARAMETER Experiment Name: At_Germinating_Seeds_P Parameter: Tissue Value: Germinating Seeds
  misc_feature: MA Experiment ID: 20000185 Result: Down-regulated in Transcription
  misc_feature: MA Experiment 20000185 PARAMETER Experiment Name: At_Roots__P Parameter: Age (day) Value: 7 vs. 21
  misc_feature: MA Experiment 20000185 PARAMETER Experiment Name: At_Roots__P Parameter: Organism Value: A. thaliana
  misc_feature: MA Experiment 20000185 PARAMETER Experiment Name: At_Roots__P Parameter: Tissue Value: Roots vs. Whole Plant
  misc_feature: MA Experiment ID: 20000224 Result: Up-regulated in Transcription
  misc_feature: MA Experiment ID: 20000234 Result: Down-regulated in Transcription
  misc_feature: MA Experiment 20000234 PARAMETER Experiment Name: At_Siliques_P Parameter: Age (day) Value: 21
  misc_feature: MA Experiment 20000234 PARAMETER Experiment Name: At_Siliques_P Parameter: Organism Value: A. thaliana
  misc_feature: MA Experiment 20000234 PARAMETER Experiment Name: At_Siliques_P Parameter: Plant Line Value: WS
  misc_feature: MA Experiment 20000234 PARAMETER Experiment Name: At_Siliques_P Parameter: Tissue Value: Less Than 5mm Siliques vs. Whole Plant
  misc_feature: MA Experiment ID: 20000235 Result: Down-regulated in Transcription
  misc_feature: MA Experiment 20000235 PARAMETER Experiment Name: At_Siliques_P Parameter: Age (day) Value: 21
  misc_feature: MA Experiment 20000235 PARAMETER Experiment Name: At_Siliques_P Parameter: Organism Value: A. thaliana
  misc_feature: MA Experiment 20000235 PARAMETER Experiment Name: At_Siliques_P Parameter: Plant Line Value: WS
  misc_feature: MA Experiment 20000235 PARAMETER Experiment Name: At_Siliques_P Parameter: Tissue Value: 5-10mm Siliques vs. Whole Plant
  misc_feature: MA Experiment ID: 20000264 Result: Down-regulated in Transcription
  misc_feature: MA Experiment 20000264 PARAMETER Experiment Name: At_Open_Flower_P Parameter: Age (day) Value: 21
  misc_feature: MA Experiment 20000264 PARAMETER Experiment Name: At_Open_Flower_P Parameter: Plant Line Value: WS
  misc_feature: MA Experiment 20000264 PARAMETER Experiment Name: At_Open_Flower_P Parameter: Tissue Value: Open Flower vs. Whole Plant
  misc_feature: MA Experiment ID: 20000265 Result: Down-regulated in Transcription
  misc_feature: MA Experiment 20000265 PARAMETER Experiment Name: At_Open_Flower_P Parameter: Age (day) Value: 21
  misc_feature: MA Experiment 20000265 PARAMETER Experiment Name: At_Open_Flower_P Parameter: Plant Line Value: WS
  misc_feature: MA Experiment 20000265 PARAMETER Experiment Name: At_Open_Flower_P Parameter: Tissue Value: Closed Flower vs. Whole Plant
  misc_feature: MA Experiment ID: 20000286 Result: Down-regulated in Transcription
  misc_feature: MA Experiment 20000286 PARAMETER Experiment Name: At_Open_Flower_P Parameter: Age (day) Value: 21
  misc_feature: MA Experiment 20000286 PARAMETER Experiment Name: At_Open_Flower_P Parameter: Plant Line Value: WS
  misc_feature: MA Experiment 20000286 PARAMETER Experiment Name: At_Open_Flower_P Parameter: Tissue Value: Half Open vs. Whole Plant
  misc_feature: MA Experiment ID: 20000436 Result: Down-regulated in Transcription
  misc_feature: MA Experiment 20000436 PARAMETER Experiment Name: At_Drought_P Parameter: Age (day) Value: 7
  misc_feature: MA Experiment 20000436 PARAMETER Experiment Name: At_Drought_P Parameter: Organism Value: A. thaliana
  misc_feature: MA Experiment 20000436 PARAMETER Experiment Name: At_Drought_P Parameter: Plant Line Value: WS
  misc_feature: MA Experiment 20000436 PARAMETER Experiment Name: At_Drought_P Parameter: Timepoint (hr) Value: 12
  misc_feature: MA Experiment 20000436 PARAMETER Experiment Name: At_Drought_P Parameter: Tissue Value: Whole Plant
  misc_feature: MA Experiment 20000436 PARAMETER Experiment Name: At_Drought_P Parameter: Treatment Value: Drought vs. No Drought
  misc_feature: MA Experiment ID: 20000437 Result: Down-regulated in Transcription
  misc_feature: MA Experiment 20000437 PARAMETER Experiment Name: At_Drought_P Parameter: Age (day) Value: 8
  misc_feature: MA Experiment 20000437 PARAMETER Experiment Name: At_Drought_P Parameter: Organism Value: A. thaliana
  misc_feature: MA Experiment 20000437 PARAMETER Experiment Name: At_Drought_P Parameter: Plant Line Value: WS
  misc_feature: MA Experiment 20000437 PARAMETER Experiment Name: At_Drought_P Parameter: Timepoint (hr) Value: 24
  misc_feature: MA Experiment 20000437 PARAMETER Experiment Name: At_Drought_P Parameter: Tissue Value: Whole Plant
  misc_feature: MA Experiment 20000437 PARAMETER Experiment Name: At_Drought_P Parameter: Treatment Value: Drought vs. No Drought
  misc_feature: MA Experiment ID: 20000439 Result: Down-regulated in Transcription
  misc_feature: MA Experiment 20000439 PARAMETER Experiment Name: At_Roots__P Parameter: Age (day) Value: 14 vs. 21
  misc_feature: MA Experiment 20000439 PARAMETER Experiment Name: At_Roots__P Parameter: Organism Value: A. thaliana
  misc_feature: MA Experiment 20000439 PARAMETER Experiment Name: At_Roots__P Parameter: Tissue Value: Roots vs. Whole Plant
  misc_feature: MA Experiment ID: 20000794 Result: Down-regulated in Transcription
  misc_feature: MA Experiment 20000794 PARAMETER Experiment Name: At_Petals_P Parameter: Age (day) Value: 23-25 days
  misc_feature: MA Experiment 20000794 PARAMETER Experiment Name: At_Petals_P Parameter: Plant Line Value: WS
  misc_feature: MA Experiment 20000794 PARAMETER Experiment Name: At_Petals_P Parameter: Tissue Value: Petals vs. Whole plant
  misc_feature: MA Experiment ID: 20001248 Result: Down-regulated in Transcription
  misc_feature: MA Experiment 20001248 PARAMETER Experiment Name: At_Far-red-induction_P Parameter: Age (day) Value: 7
  misc_feature: MA Experiment 20001248 PARAMETER Experiment Name: At_Far-red-induction_P Parameter: Light Value: Far-red vs. White
  misc_feature: MA Experiment 20001248 PARAMETER Experiment Name: At_Far-red-induction_P Parameter: Organism Value: A. thaliana
  misc_feature: MA Experiment 20001248 PARAMETER Experiment Name: At_Far-red-induction_P Parameter: Plant Line Value: Columbia
  misc_feature: MA Experiment 20001248 PARAMETER Experiment Name: At_Far-red-induction_P Parameter: Timepoint (hr) Value: 4
  misc_feature: MA Experiment 20001248 PARAMETER Experiment Name: At_Far-red-induction_P Parameter: Tissue Value: Whole Plant
  misc_feature: MA Experiment ID: 20001904 Result: Down-regulated in Transcription
  misc_feature: MA Experiment 20001904 PARAMETER Experiment Name: At_Drought_Reproduction_P Parameter: Age (day) Value: 37
  misc_feature: MA Experiment 20001904 PARAMETER Experiment Name: At_Drought_Reproduction_P Parameter: Organism Value: A. thaliana
  misc_feature: MA Experiment 20001904 PARAMETER Experiment Name: At_Drought_Reproduction_P Parameter: Plant Line Value: WS
  misc_feature: MA Experiment 20001904 PARAMETER Experiment Name: At_Drought_Reproduction_P Parameter: Timepoint (day) Value: 7
  misc_feature: MA Experiment 20001904 PARAMETER Experiment Name: At_Drought_Reproduction_P Parameter: Tissue Value: Rosettes
  misc_feature: MA Experiment 20001904 PARAMETER Experiment Name: At_Drought_Reproduction_P Parameter: Treatment Value: Drought vs. No Drought
  misc_feature: MA Experiment ID: 20001905 Result: Down-regulated in Transcription
  misc_feature: MA Experiment 20001905 PARAMETER Experiment Name: At_Drought_Reproduction_P Parameter: Age (day) Value: 40
  misc_feature: MA Experiment 20001905 PARAMETER Experiment Name: At_Drought_Reproduction_P Parameter: Organism Value: A. thaliana
  misc_feature: MA Experiment 20001905 PARAMETER Experiment Name: At_Drought_Reproduction_P Parameter: Plant Line Value: WS
  misc_feature: MA Experiment 20001905 PARAMETER Experiment Name: At_Drought_Reproduction_P Parameter: Timepoint (day) Value: 10
  misc_feature: MA Experiment 20001905 PARAMETER Experiment Name: At_Drought_Reproduction_P Parameter: Tissue Value: Rosettes
  misc_feature: MA Experiment 20001905 PARAMETER Experiment Name: At_Drought_Reproduction_P Parameter: Treatment Value: Drought vs. No Drought
  misc_feature: MA Experiment ID: 20001906 Result: Down-regulated in Transcription
  misc_feature: MA Experiment 20001906 PARAMETER Experiment Name: At_Drought_Reproduction_P Parameter: Age (day) Value: 35
  misc_feature: MA Experiment 20001906 PARAMETER Experiment Name: At_Drought_Reproduction_P Parameter: Organism Value: A. thaliana
  misc_feature: MA Experiment 20001906 PARAMETER Experiment Name: At_Drought_Reproduction_P Parameter: Plant Line Value: WS
  misc_feature: MA Experiment 20001906 PARAMETER Experiment Name: At_Drought_Reproduction_P Parameter: Timepoint (day) Value: 5
  misc_feature: MA Experiment 20001906 PARAMETER Experiment Name: At_Drought_Reproduction_P Parameter: Tissue Value: Siliques
  misc_feature: MA Experiment 20001906 PARAMETER Experiment Name: At_Drought_Reproduction_P Parameter: Treatment Value: Drought vs. No Drought
aaggagacccaaatttcctgcaacaaacaaagtaaaaaagttgagaatggattcatcgcagggaagtacacaacagaagactgtgattctgaacagccacaatgagaacctggtgggtctgcttcatgaaactggttctacagaaattgtagtcttgtgtcatggctttcgatcaaacaagaacttcgaaattatgaaaaatgtggctgttgctatagagagagaagggattagtgctttccgttttgatttctccgggaatggagagagtgaaggcagtttctattatggtaactacaattacgaagctgatgatctacattctgttatccaatacttctctaacttgaaccgtgttgttactataattctcggtcacagtaaaggaggtgatgtggtcctcctctatgcctccaagtatcacgatatccccaatgtgatcaatctctcgggacgttatgatctgaagaaaggcataggagaacgtcttggtgaagattttttggaaagaattaagcaacaaggatacatcgatgttaaagatggagattctggttaccgtgttaccgaggagagtttgatggaccggttaaacacagatatgcatgaagcttgcctcaagattgacaaagaatgcagggtcttgacggtccatggatcgggtgacgagacagtaccagtggaagatgcaaaggagtttgcaaagataataccgaaccacgagctacagattgtggaaggagctgatcattgttataccaattatcaaagtcaattggttttaacggttatggagttcataaagagtcattgtgaagaaaaaaacgacaagacttgtaattgaccctccaatattgcattggacatttatttatgtttggttgaccaaataaatttataaaaggtaaataaaaatataatact

SEQ ID NO: 37012 - protein, 280 aa, Arabidopsis thaliana
  peptide (1)..(280): Ceres Seq. ID no. 12421273
  misc_feature (25)..(278): Homolog of NCBI NO: 18416707 NR Description: putative esterase - like protein
  misc_feature (25)..(278): Homolog of NCBI NO: 11358640 NR Description: probable esterase-like protein - Arabidopsis
  misc_feature (18)..(269): Homolog of NCBI NO: 34913064 NR Description: P0013G02.24 [Oryza sativa (japonica
  misc_feature (24)..(270): Homolog of NCBI NO: 34913068 NR Description: P0013G02.26 [Oryza sativa (japonica
  misc_feature (26)..(276): Homolog of NCBI NO: 15224799 NR Description: putative esterase; protein id: At2g19550.1
  misc_feature (9)..(275): Homolog of NCBI NO: 15228202 NR Description: putative protein; protein id: At3g47590.1
  misc_feature (16)..(275): Homolog of NCBI NO: 15220578 NR Description: hypothetical protein; protein id: At1g29840.1
  misc_feature (16)..(280): Homolog of NCBI NO: 21554728 NR Description: putative esterase [Arabidopsis thaliana]
  misc_feature (16)..(280): Homolog of NCBI NO: 15232826 NR Description: putative protein
  misc_feature (16)..(280): Homolog of NCBI NO: 22135864 NR Description: putative protein [Arabidopsis thaliana]
RRPKFPATNKVKKLRMDSSQGSTQQKTVILNSHNENLVGLLHETGSTEIVVLCHGFRSNKNFEIMKNVAVAIEREGISAFRFDFSGNGESEGSFYYGNYNYEADDLHSVIQYFSNLNRVVTIILGHSKGGDVVLLYASKYHDIPNVINLSGRYDLKKGIGERLGEDFLERIKQQGYIDVKDGDSGYRVTEESLMDRLNTDMHEACLKIDKECRVLTVHGSGDETVPVEDAKEFAKIIPNHELQIVEGADHCYTNYQSQLVLTVMEFIKSHCEEKNDKTCN

SEQ ID NO: 37013 - protein, 265 aa, Arabidopsis thaliana
  peptide (1)..(265): Ceres Seq. ID no. 12421274
  misc_feature (10)..(263): Homolog of NCBI NO: 18416707 NR Description: putative esterase - like protein
  misc_feature (10)..(263): Homolog of NCBI NO: 11358640 NR Description: probable esterase-like protein - Arabidopsis
  misc_feature (3)..(254): Homolog of NCBI NO: 34913064 NR Description: P0013G02.24 [Oryza sativa (japonica
  misc_feature (9)..(255): Homolog of NCBI NO: 34913068 NR Description: P0013G02.26 [Oryza sativa (japonica
  misc_feature (11)..(261): Homolog of NCBI NO: 15224799 NR Description: putative esterase; protein id: At2g19550.1
  misc_feature (1)..(260): Homolog of NCBI NO: 15228202 NR Description: putative protein; protein id: At3g47590.1
  misc_feature (1)..(260): Homolog of NCBI NO: 15220578 NR Description: hypothetical protein; protein id: At1g29840.1
  misc_feature (1)..(265): Homolog of NCBI NO: 21554728 NR Description: putative esterase [Arabidopsis thaliana]
  misc_feature (1)..(265): Homolog of NCBI NO: 15232826 NR Description: putative protein
  misc_feature (1)..(265): Homolog of NCBI NO: 22135864 NR Description: putative protein [Arabidopsis thaliana]
MDSSQGSTQQKTVILNSHNENLVGLLHETGSTEIVVLCHGFRSNKNFEIMKNVAVAIEREGISAFRFDFSGNGESEGSFYYGNYNYEADDLHSVIQYFSNLNRVVTIILGHSKGGDVVLLYASKYHDIPNVINLSGRYDLKKGIGERLGEDFLERIKQQGYIDVKDGDSGYRVTEESLMDRLNTDMHEACLKIDKECRVLTVHGSGDETVPVEDAKEFAKIIPNHELQIVEGADHCYTNYQSQLVLTVMEFIKSHCEEKNDKTCN

SEQ ID NO: 37014 - protein, 216 aa, Arabidopsis thaliana
  peptide (1)..(216): Ceres Seq. ID no. 12421275
  misc_feature (1)..(214): Homolog of NCBI NO: 18416707 NR Description: putative esterase - like protein
  misc_feature (1)..(214): Homolog of NCBI NO: 11358640 NR Description: probable esterase-like protein - Arabidopsis
  misc_feature (1)..(205): Homolog of NCBI NO: 34913064 NR Description: P0013G02.24 [Oryza sativa (japonica
  misc_feature (1)..(206): Homolog of NCBI NO: 34913068 NR Description: P0013G02.26 [Oryza sativa (japonica
  misc_feature (1)..(212): Homolog of NCBI NO: 15224799 NR Description: putative esterase; protein id: At2g19550.1
  misc_feature (1)..(211): Homolog of NCBI NO: 15228202 NR Description: putative protein; protein id: At3g47590.1
  misc_feature (1)..(211): Homolog of NCBI NO: 15220578 NR Description: hypothetical protein; protein id: At1g29840.1
  misc_feature (1)..(216): Homolog of NCBI NO: 21554728 NR Description: putative esterase [Arabidopsis thaliana]
  misc_feature (1)..(216): Homolog of NCBI NO: 15232826 NR Description: putative protein
  misc_feature (1)..(216): Homolog of NCBI NO: 22135864 NR Description: putative protein [Arabidopsis thaliana]
MKNVAVAIEREGISAFRFDFSGNGESEGSFYYGNYNYEADDLHSVIQYFSNLNRVVTIILGHSKGGDVVLLYASKYHDIPNVINLSGRYDLKKGIGERLGEDFLERIKQQGYIDVKDGDSGYRVTEESLMDRLNTDMHEACLKIDKECRVLTVHGSGDETVPVEDAKEFAKIIPNHELQIVEGADHCYTNYQSQLVLTVMEFIKSHCEEKNDKTCN

SEQ ID NO: 37015 - DNA, 1546 bp, Arabidopsis thaliana
  misc_feature (1)..(1546): Ceres Seq. ID no. 12712755
  misc_feature: MA Experiment ID: 108462 Result: Up-regulated in Transcription
  misc_feature: MA Experiment 108462 PARAMETER Experiment Name: At_Germinating_Seeds_cDNA_P Parameter: Age (day) Value: 2 vs. 0
  misc_feature: MA Experiment 108462 PARAMETER Experiment Name: At_Germinating_Seeds_cDNA_P Parameter: Tissue Value: Germinating Seeds
  misc_feature: MA Experiment ID: 108488 Result: Down-regulated in Transcription
  misc_feature: MA Experiment ID: 108573 Result: Up-regulated in Transcription
  misc_feature: MA Experiment 108573 PARAMETER Experiment Name: At_Drought_cDNA_P Parameter: Timepoint (hr) Value: 6
  misc_feature: MA Experiment 108573 PARAMETER Experiment Name: At_Drought_cDNA_P Parameter: Tissue Value: Aerial
  misc_feature: MA Experiment 108573 PARAMETER Experiment Name: At_Drought_cDNA_P Parameter: Treatment Value: Drought vs. No Drought
  misc_feature: MA Experiment ID: 108577 Result: Down-regulated in Transcription
  misc_feature: MA Experiment 108577 PARAMETER Experiment Name: At_42deg_Heat_cDNA_P Parameter: Temperature (deg C) Value: 42 vs. 22
  misc_feature: MA Experiment 108577 PARAMETER Experiment Name: At_42deg_Heat_cDNA_P Parameter: Timepoint (hr) Value: 6
  misc_feature: MA Experiment 108577 PARAMETER Experiment Name: At_42deg_Heat_cDNA_P Parameter: Tissue Value: Aerial
  misc_feature: MA Experiment ID: 108585 Result: Up-regulated in Transcription
  misc_feature: MA Experiment 108585 PARAMETER Experiment Name: At_5mM_NaNP_cDNA_P Parameter: Timepoint (hr) Value: 6
  misc_feature: MA Experiment 108585 PARAMETER Experiment Name: At_5mM_NaNP_cDNA_P Parameter: Tissue Value: Aerial
  misc_feature: MA Experiment 108585 PARAMETER Experiment Name: At_5mM_NaNP_cDNA_P Parameter: Treatment Value: null
  misc_feature: MA Experiment ID: 108595 Result: Down-regulated in Transcription
  misc_feature: MA Experiment 108595 PARAMETER Experiment Name: At_Ler-pi_Ovule_cDNA_P Parameter: Plant Line Value: null
  misc_feature: MA Experiment ID: 20000224 Result: Down-regulated in Transcription
  misc_feature: MA Experiment ID: 20000307 Result: Up-regulated in Transcription
  misc_feature: MA Experiment 20000307 PARAMETER Experiment Name: At_Germinating_Seeds_Sub_P Parameter: Age (hr) Value: 24 vs. 0
  misc_feature: MA Experiment 20000307 PARAMETER Experiment Name: At_Germinating_Seeds_Sub_P Parameter: Organism Value: A. thaliana
  misc_feature: MA Experiment 20000307 PARAMETER Experiment Name: At_Germinating_Seeds_Sub_P Parameter: Plant Line Value: WS
  misc_feature: MA Experiment 20000307 PARAMETER Experiment Name: At_Germinating_Seeds_Sub_P Parameter: Tissue Value: Germinating Seeds
  misc_feature: MA Experiment ID: 20000327 Result: Down-regulated in Transcription
  misc_feature: MA Experiment 20000327 PARAMETER Experiment Name: At_42deg_Heat_Sub_P Parameter: Age (day) Value: 14
  misc_feature: MA Experiment 20000327 PARAMETER Experiment Name: At_42deg_Heat_Sub_P Parameter: Organism Value: A. thaliana
  misc_feature: MA Experiment 20000327 PARAMETER Experiment Name: At_42deg_Heat_Sub_P Parameter: Plant Line Value: WS
  misc_feature: MA Experiment 20000327 PARAMETER Experiment Name: At_42deg_Heat_Sub_P Parameter: Temperature (deg C) Value: 42 vs. 22
  misc_feature: MA Experiment 20000327 PARAMETER Experiment Name: At_42deg_Heat_Sub_P Parameter: Timepoint (hr) Value: 1
  misc_feature: MA Experiment 20000327 PARAMETER Experiment Name: At_42deg_Heat_Sub_P Parameter: Tissue Value: Aerial
  misc_feature: MA Experiment ID: 20000328 Result: Down-regulated in Transcription
  misc_feature: MA Experiment 20000328 PARAMETER Experiment Name: At_42deg_Heat_Sub_P Parameter: Age (day) Value: 14
  misc_feature: MA Experiment 20000328 PARAMETER Experiment Name: At_42deg_Heat_Sub_P Parameter: Organism Value: A. thaliana
  misc_feature: MA Experiment 20000328 PARAMETER Experiment Name: At_42deg_Heat_Sub_P Parameter: Plant Line Value: WS
  misc_feature: MA Experiment 20000328 PARAMETER Experiment Name: At_42deg_Heat_Sub_P Parameter: Temperature (deg C) Value: 42 vs. 22
  misc_feature: MA Experiment 20000328 PARAMETER Experiment Name: At_42deg_Heat_Sub_P Parameter: Timepoint (hr) Value: 6
  misc_feature: MA Experiment 20000328 PARAMETER Experiment Name: At_42deg_Heat_Sub_P Parameter: Tissue Value: Aerial
agagcttccacttccatcgtcgtcttctattttttcttctttcttcgatttcataccaaaacaagaactctctgttttcgacaaaaacgaaaccttgagatctattttgattgacttttaagaaagagagagatctttcttagaagattttgtctcgtcggcattgaagatccagggtttgtctttcgaaattcagagagaaaatgggtgatgaggcagagatcaaggaacatttaaagccacaagcttcatctgaaacaatggacaagaaacataatgtgaaagggaagaggttatggcagaaagtcaagtatcaattggtggagtttcattcattgcctgcttatttaagagacaatgagtacatcattggtcattaccgatccgaatggccgatcaaacagattcttctcagcatctttaccattcataatgagactttgaatgtttggacgcacttgattgggtttttcctgtttttggcgctcactatatacactgcaacgaaagtaccgagtgtcgtggatcttcattcgcttcaacaccgtttacccgatttgttgaggaaaacagatctccacaaacttcattctgagctcatggctcgccttccttctagtccatctagttggcatgtgatggaccttctttataactgtttgcctgaaagattttctcatggcaactacactgacatgtgtgttctgcattctgtgagggaagatcttgcaaacttgatagctcctttgatcttcaggccaattactcgatggccgttttatgcatttctaggtggtgctatgttctgtctattagcaagcagcacgtgccacctcctctcatgtcactccgagcgagtctcctacataatgcttaggcttgattacgccggcatcgcagctctaatagcgacttccttctaccctccggtttattactccttcatgtgtgatcctttcttctgcaacctctacttaggattcataaccatcttaggaatcgccactgtgcttgtttctctcctcccggttttccaaagcccggagtttcgggtggtgagggcgtctctgttctttggaatgggattctctggcttagctccgattcttcacaagctgataatcttttgggaccaacctgaagcccttcacacgacaggttatgagattttgatgggtttgctttatgggttaggagctctggtttatgcaactaggatcccagagagatggatgccgggtaaattcgatatagcaggacatagccatcagttgtttcatgttctggttgttgctggtgcgttcacgcactatagagctgggctagtgtatcttaagtggagagatattgaaggatgttgaagatgaagattgaagattagatggaatctttgaatcttgtttgtagtagcttcatataaaagttggattatgtaaagtcttatatgtaatcaaacgtttaattgtttcctttattcaacaaaggatttatattgttaatccacatatgtattactggttaaagaagctgaaggattcatattttt

SEQ ID NO: 37016 - protein, 385 aa, Arabidopsis thaliana
  peptide (1)..(385): Ceres Seq. ID no. 12712756
  misc_feature (73)..(374): Pfam Name: Uncharacterised protein family (Hly-III / UPF0073) Pfam Description: Uncharacterised protein family (Hly-III /
  misc_feature (34)..(106): Homolog of NCBI NO: 13272399 NR Description: hypothetical protein [Arabidopsis thaliana]
  misc_feature (22)..(100): Homolog of NCBI NO: 18377749 NR Description: unknown protein [Arabidopsis thaliana]
  misc_feature (187)..(369): Homolog of NCBI NO: 18400468 NR Description: expressed protein
  misc_feature (187)..(369): Homolog of NCBI NO: 13272399 NR Description: hypothetical protein [Arabidopsis thaliana]
  misc_feature (164)..(380): Homolog of NCBI NO: 18377749 NR Description: unknown protein [Arabidopsis thaliana]
  misc_feature (9)..(97): Homolog of NCBI NO: 15241302 NR Description: putative protein
  misc_feature (187)..(385): Homolog of NCBI NO: 15241302 NR Description: putative protein
  misc_feature (108)..(334): Homolog of NCBI NO: 20330770 NR Description: Hypothetical protein [Oryza sativa (japonica
  misc_feature (1)..(374): Homolog of NCBI NO: 15233813 NR Description: putative protein; protein id: At4g38320.1
  misc_feature (1)..(385): Homolog of NCBI NO: 15235657 NR Description: expressed protein
MGDEAEIKEHLKPQASSETMDKKHNVKGKRLWQKVKYQLVEFHSLPAYLRDNEYIIGHYRSEWPIKQILLSIFTIHNETLNVWTHLIGFFLFLALTIYTATKVPSVVDLHSLQHRLPDLLRKTDLHKLHSELMARLPSSPSSWHVMDLLYNCLPERFSHGNYTDMCVLHSVREDLANLIAPLIFRPITRWPFYAFLGGAMFCLLASSTCHLLSCHSERVSYIMLRLDYAGIAALIATSFYPPVYYSFMCDPFFCNLYLGFITILGIATVLVSLLPVFQSPEFRVVRASLFFGMGFSGLAPILHKLIIFWDQPEALHTTGYEILMGLLYGLGALVYATRIPERWMPGKFDIAGHSHQLFHVLVVAGAFTHYRAGLVYLKWRDIEGC

SEQ ID NO: 37017 - protein, 366 aa, Arabidopsis thaliana
  peptide (1)..(366): Ceres Seq. ID no. 12712757
  misc_feature (54)..(355): Pfam Name: Uncharacterised protein family (Hly-III / UPF0073) Pfam Description: Uncharacterised protein family (Hly-III /
  misc_feature (15)..(87): Homolog of NCBI NO: 13272399 NR Description: hypothetical protein [Arabidopsis thaliana]
  misc_feature (3)..(81): Homolog of NCBI NO: 18377749 NR Description: unknown protein [Arabidopsis thaliana]
  misc_feature (168)..(350): Homolog of NCBI NO: 18400468 NR Description: expressed protein
  misc_feature (168)..(350): Homolog of NCBI NO: 13272399 NR Description: hypothetical protein [Arabidopsis thaliana]
  misc_feature (145)..(361): Homolog of NCBI NO: 18377749 NR Description: unknown protein [Arabidopsis thaliana]
  misc_feature (1)..(78): Homolog of NCBI NO: 15241302 NR Description: putative protein
  misc_feature (168)..(366): Homolog of NCBI NO: 15241302 NR Description: putative protein
  misc_feature (89)..(315): Homolog of NCBI NO: 20330770 NR Description: Hypothetical protein [Oryza sativa (japonica
  misc_feature (1)..(355): Homolog of NCBI NO: 15233813 NR Description: putative protein; protein id: At4g38320.1
  misc_feature (1)..(366): Homolog of NCBI NO: 15235657 NR Description: expressed protein
MDKKHNVKGKRLWQKVKYQLVEFHSLPAYLRDNEYIIGHYRSEWPIKQILLSIFTIHNETLNVWTHLIGFFLFLALTIYTATKVPSVVDLHSLQHRLPDLLRKTDLHKLHSELMARLPSSPSSWHVMDLLYNCLPERFSHGNYTDMCVLHSVREDLANLIAPLIFRPITRWPFYAFLGGAMFCLLASSTCHLLSCHSERVSYIMLRLDYAGIAALIATSFYPPVYYSFMCDPFFCNLYLGFITILGIATVLVSLLPVFQSPEFRVVRASLFFGMGFSGLAPILHKLIIFWDQPEALHTTGYEILMGLLYGLGALVYATRIPERWMPGKFDIAGHSHQLFHVLVVAGAFTHYRAGLVYLKWRDIEGC

SEQ ID NO: 37018 - protein, 253 aa, Arabidopsis thaliana
  peptide (1)..(253): Ceres Seq. ID no. 12712758
  misc_feature (1)..(242): Pfam Name: Uncharacterised protein family (Hly-III / UPF0073) Pfam Description: Uncharacterised protein family (Hly-III /
  misc_feature (74)..(237): Homolog of NCBI NO: 25309925 NR Description: hypothetical protein At2g24150 [imported] -
  misc_feature (71)..(248): Homolog of NCBI NO: 25407688 NR Description: hypothetical protein AT4g30850 [imported] -
  misc_feature (32)..(248): Homolog of NCBI NO: 30688829 NR Description: expressed protein [Arabidopsis thaliana]
  misc_feature (55)..(237): Homolog of NCBI NO: 18400468 NR Description: expressed protein
  misc_feature (55)..(237): Homolog of NCBI NO: 13272399 NR Description: hypothetical protein [Arabidopsis thaliana]
  misc_feature (32)..(248): Homolog of NCBI NO: 18377749 NR Description: unknown protein [Arabidopsis thaliana]
  misc_feature (55)..(253): Homolog of NCBI NO: 15241302 NR Description: putative protein
  misc_feature (1)..(202): Homolog of NCBI NO: 20330770 NR Description: Hypothetical protein [Oryza sativa (japonica
  misc_feature (1)..(242): Homolog of NCBI NO: 15233813 NR Description: putative protein; protein id: At4g38320.1
  misc_feature (1)..(253): Homolog of NCBI NO: 15235657 NR Description: expressed protein
MARLPSSPSSWHVMDLLYNCLPERFSHGNYTDMCVLHSVREDLANLIAPLIFRPITRWPFYAFLGGAMFCLLASSTCHLLSCHSERVSYIMLRLDYAGIAALIATSFYPPVYYSFMCDPFFCNLYLGFITILGIATVLVSLLPVFQSPEFRVVRASLFFGMGFSGLAPILHKLIIFWDQPEALHTTGYEILMGLLYGLGALVYATRIPERWMPGKFDIAGHSHQLFHVLVVAGAFTHYRAGLVYLKWRDIEGC

SEQ ID NO: 37019 - DNA, 910 bp, Arabidopsis thaliana
  misc_feature (1)..(910): Ceres Seq. ID no. 13489408
  misc_feature: MA Experiment ID: 108474 Result: Down-regulated in Transcription
  misc_feature: MA Experiment 108474 PARAMETER Experiment Name: At_Drought_Flowers_cDNA_P Parameter: Timepoint (hr) Value: null
  misc_feature: MA Experiment 108474 PARAMETER Experiment Name: At_Drought_Flowers_cDNA_P Parameter: Treatment Value: Drought vs. No Drought
  misc_feature: MA Experiment ID: 20000264 Result: Up-regulated in Transcription
  misc_feature: MA Experiment 20000264 PARAMETER Experiment Name: At_Open_Flower_P Parameter: Age (day) Value: 21
  misc_feature: MA Experiment 20000264 PARAMETER Experiment Name: At_Open_Flower_P Parameter: Plant Line Value: WS
  misc_feature: MA Experiment 20000264 PARAMETER Experiment Name: At_Open_Flower_P Parameter: Tissue Value: Open Flower vs. Whole Plant
  misc_feature: MA Experiment ID: 20000265 Result: Up-regulated in Transcription
  misc_feature: MA Experiment 20000265 PARAMETER Experiment Name: At_Open_Flower_P Parameter: Age (day) Value: 21
  misc_feature: MA Experiment 20000265 PARAMETER Experiment Name: At_Open_Flower_P Parameter: Plant Line Value: WS
  misc_feature: MA Experiment 20000265 PARAMETER Experiment Name: At_Open_Flower_P Parameter: Tissue Value: Closed Flower vs. Whole Plant
  misc_feature: MA Experiment ID: 20000286 Result: Up-regulated in Transcription
  misc_feature: MA Experiment 20000286 PARAMETER Experiment Name: At_Open_Flower_P Parameter: Age (day) Value: 21
  misc_feature: MA Experiment 20000286 PARAMETER Experiment Name: At_Open_Flower_P Parameter: Plant Line Value: WS
  misc_feature: MA Experiment 20000286 PARAMETER Experiment Name: At_Open_Flower_P Parameter: Tissue Value: Half Open vs. Whole Plant
  misc_feature: MA Experiment ID: 20000439 Result: Down-regulated in Transcription
  misc_feature: MA Experiment 20000439 PARAMETER Experiment Name: At_Roots__P Parameter: Age (day) Value: 14 vs. 21
  misc_feature: MA Experiment 20000439 PARAMETER Experiment Name: At_Roots__P Parameter: Organism Value: A. thaliana
  misc_feature: MA Experiment 20000439 PARAMETER Experiment Name: At_Roots__P Parameter: Tissue Value: Roots vs. Whole Plant
  misc_feature: MA Experiment ID: 20000443 Result: Down-regulated in Transcription
  misc_feature: MA Experiment 20000443 PARAMETER Experiment Name: At_1uM_BR-BRZ__P Parameter: Tissue Value: Shoot Apices
  misc_feature: MA Experiment 20000443 PARAMETER Experiment Name: At_1uM_BR-BRZ__P Parameter: Treatment Value: 1uM BRZ vs. No Treatment
  misc_feature: MA Experiment ID: 20000794 Result: Up-regulated in Transcription
  misc_feature: MA Experiment 20000794 PARAMETER Experiment Name: At_Petals_P Parameter: Age (day) Value: 23-25 days
  misc_feature: MA Experiment 20000794 PARAMETER Experiment Name: At_Petals_P Parameter: Plant Line Value: WS
  misc_feature: MA Experiment 20000794 PARAMETER Experiment Name: At_Petals_P Parameter: Tissue Value: Petals vs. Whole plant
  misc_feature: MA Experiment ID: 20001911 Result: Down-regulated in Transcription
  misc_feature: MA Experiment 20001911 PARAMETER Experiment Name: At_Drought_Reproduction_P Parameter: Age (day) Value: 40
  misc_feature: MA Experiment 20001911 PARAMETER Experiment Name: At_Drought_Reproduction_P Parameter: Organism Value: A. thaliana
  misc_feature: MA Experiment 20001911 PARAMETER Experiment Name: At_Drought_Reproduction_P Parameter: Plant Line Value: WS
  misc_feature: MA Experiment 20001911 PARAMETER Experiment Name: At_Drought_Reproduction_P Parameter: Timepoint (day) Value: 10
  misc_feature: MA Experiment 20001911 PARAMETER Experiment Name: At_Drought_Reproduction_P Parameter: Tissue Value: Flowers
  misc_feature: MA Experiment 20001911 PARAMETER Experiment Name: At_Drought_Reproduction_P Parameter: Treatment Value: Drought vs. No Drought
  misc_feature: Phenotype: ROSETTE LEAVES Curled-Cup-shaped
  misc_feature: Phenotype: ROSETTE LEAVES Disorganized Rosette-Disorganized Rosette
  misc_feature: Phenotype: ROSETTE LEAVES Shape-Lanceolate
  misc_feature: Phenotype: ROSETTE LEAVES Shape-Lanceolate
  misc_feature: Phenotype: ROSETTE LEAVES Other
  misc_feature: Phenotype: WHOLE PLANT Size-Small
  misc_feature: Phenotype: WHOLE PLANT Size-Small
  misc_feature: Phenotype: WHOLE PLANT Other
  misc_feature: Phenotype: INFLORESCENCE Flowering Time-Late Flowering
  misc_feature: Phenotype: INFLORESCENCE Height-Short
  misc_feature: Phenotype: ROSETTE LEAVES Curled-Cup-shaped
  misc_feature: Phenotype: ROSETTE LEAVES Disorganized Rosette-Disorganized Rosette
  misc_feature: Phenotype: ROSETTE LEAVES Shape-Lanceolate
  misc_feature: Phenotype: ROSETTE LEAVES Shape-Lanceolate
  misc_feature: Phenotype: ROSETTE LEAVES Other
  misc_feature: Phenotype: WHOLE PLANT Size-Small
  misc_feature: Phenotype: WHOLE PLANT Size-Small
  misc_feature: Phenotype: WHOLE PLANT Other
  misc_feature: Phenotype: INFLORESCENCE Flowering Time-Late Flowering
  misc_feature: Phenotype: INFLORESCENCE Height-Short
  misc_feature: Phenotype: ROSETTE LEAVES Curled-Cup-shaped
  misc_feature: Phenotype: ROSETTE LEAVES Disorganized Rosette-Disorganized Rosette
  misc_feature: Phenotype: ROSETTE LEAVES Shape-Lanceolate
  misc_feature: Phenotype: ROSETTE LEAVES Shape-Lanceolate
  misc_feature: Phenotype: ROSETTE LEAVES Other
  misc_feature: Phenotype: WHOLE PLANT Size-Small
  misc_feature: Phenotype: WHOLE PLANT Size-Small
  misc_feature: Phenotype: WHOLE PLANT Other
  misc_feature: Phenotype: INFLORESCENCE Flowering Time-Late Flowering
  misc_feature: Phenotype: INFLORESCENCE Height-Short
  misc_feature: Phenotype: ROSETTE LEAVES Curled-Cup-shaped
  misc_feature: Phenotype: ROSETTE LEAVES Disorganized Rosette-Disorganized Rosette
  misc_feature: Phenotype: ROSETTE LEAVES Shape-Lanceolate
  misc_feature: Phenotype: ROSETTE LEAVES Shape-Lanceolate
  misc_feature: Phenotype: ROSETTE LEAVES Other
  misc_feature: Phenotype: WHOLE PLANT Size-Small
  misc_feature: Phenotype: WHOLE PLANT Size-Small
  misc_feature: Phenotype: WHOLE PLANT Other
  misc_feature: Phenotype: INFLORESCENCE Flowering Time-Late Flowering
  misc_feature: Phenotype: INFLORESCENCE Height-Short
  misc_feature: Phenotype: ROSETTE LEAVES Curled-Cup-shaped
  misc_feature: Phenotype: ROSETTE LEAVES Shape-Lanceolate
  misc_feature: Phenotype: WHOLE PLANT Size-Small
  misc_feature: Phenotype: WHOLE PLANT Other
  misc_feature: Phenotype: ROSETTE LEAVES Curled-Cup-shaped
  misc_feature: Phenotype: ROSETTE LEAVES Disorganized Rosette-Disorganized Rosette
  misc_feature: Phenotype: ROSETTE LEAVES Shape-Lanceolate
  misc_feature: Phenotype: ROSETTE LEAVES Shape-Lanceolate
  misc_feature: Phenotype: ROSETTE LEAVES Other
  misc_feature: Phenotype: WHOLE PLANT Size-Small
  misc_feature: Phenotype: WHOLE PLANT Size-Small
  misc_feature: Phenotype: WHOLE PLANT Other
  misc_feature: Phenotype: INFLORESCENCE Flowering Time-Late Flowering
  misc_feature: Phenotype: INFLORESCENCE Height-Short
atcaactctctctctcactttcacaactctccctttctatttctctctctagaaaaatatcatcatctatcaattatatagagtacttatttagattcatttcataaaaatggagaaaagagaaagtagtggtggttctggatcaggagatgcagaggtgagaaaagggccatggacgatggaagaagatttgattctcatcaattatatcgccaatcatggtgaaggtgtttggaactctctcgccaaatctgcaggactaaaacgcaccgggaaaagttgccggctccggtggctgaactacctccgacctgatgtgcgacggggaaatatcacaccagaagaacagctcaccatcatggaacttcatgcaaaatggggaaataggtggtcaaaaattgcaaagcatttaccaggaaggaccgacaatgagataaagaacttttggaggactaagatccagaaatacatcatcaagagcggagaaacgacgaccgttggatcacaaagctccgagtttataaaccatcatgcgacaacgagccatgtcatgaatgatactcaagaaaccatggatatgtattctccaacgacgtcgtatcaacatgccagcaatattaatcagcagcttaattatggtaattatgtgcctgaatccagttcgatcatgatgccattatctgttgatcaatccgaacaaaactattggagcgtcgatgatctttggcccatgaatatatataatggtaattaataaataagttcgttaaaacttatatatatttacggtccaaagagggttctatataaacagagtactgtatgggtttgcctcattgtttagaggtaggtacttaatataaggttggagatcttatatgaattaataaataactcgtatttactagat

SEQ ID NO: 37020 - protein, 214 aa, Arabidopsis thaliana
  peptide (1)..(214): Ceres Seq. ID no. 13489409
  misc_feature (19)..(66): Pfam Name: Myb-like DNA-binding domain Pfam Description: Myb-like DNA-binding domain
  misc_feature (14)..(179): Homolog of NCBI NO: 15232137 NR Description: myb family transcription factor [Arabidopsis
  misc_feature (14)..(171): Homolog of NCBI NO: 13537530 NR Description: LhMyb [Lilium hybrid division I]
  misc_feature (1)..(168): Homolog of NCBI NO: 40643882 NR Description: MYB8 protein [Gerbera hybrid cv. 'Terra Regina']
  misc_feature (12)..(212): Homolog of NCBI NO: 82311 NR Description: myb-related protein 340 - garden snapdragon
  misc_feature (12)..(214): Homolog of NCBI NO: 82306 NR Description: myb-related protein 305 - garden snapdragon
  misc_feature (10)..(214): Homolog of NCBI NO: 7438338 NR Description: Myb26 protein - garden pea
  misc_feature (1)..(214): Homolog of NCBI NO: 2280528 NR Description: ATMYB3 [Arabidopsis thaliana]
  misc_feature (1)..(214): Homolog of NCBI NO: 30688935 NR Description: myb family transcription factor (ATMYB3)
  misc_feature (1)..(214): Homolog of NCBI NO: 15242669 NR Description: myb family transcription factor [Arabidopsis
  misc_feature (1)..(214): Homolog of NCBI NO: 21554734 NR Description: putative transcription factor MYB24 [Arabidopsis
MEKRESSGGSGSGDAEVRKGPWTMEEDLILINYIANHGEGVWNSLAKSAGLKRTGKSCRLRWLNYLRPDVRRGNITPEEQLTIMELHAKWGNRWSKIAKHLPGRTDNEIKNFWRTKIQKYIIKSGETTTVGSQSSEFINHHATTSHVMNDTQETMDMYSPTTSYQHASNINQQLNYGNYVPESSSIMMPLSVDQSEQNYWSVDDLWPMNIYNGN

SEQ ID NO: 37021 - protein, 191 aa, Arabidopsis thaliana
  peptide (1)..(191): Ceres Seq. ID no. 13489410
  misc_feature (1)..(43): Pfam Name: Myb-like DNA-binding domain Pfam Description: Myb-like DNA-binding domain
  misc_feature (1)..(156): Homolog of NCBI NO: 15232137 NR Description: myb family transcription factor [Arabidopsis
  misc_feature (1)..(148): Homolog of NCBI NO: 13537530 NR Description: LhMyb [Lilium hybrid division I]
  misc_feature (1)..(145): Homolog of NCBI NO: 40643882 NR Description: MYB8 protein [Gerbera hybrid cv. 'Terra Regina']
  misc_feature (1)..(189): Homolog of NCBI NO: 82311 NR Description: myb-related protein 340 - garden snapdragon
  misc_feature (1)..(191): Homolog of NCBI NO: 82306 NR Description: myb-related protein 305 - garden snapdragon
  misc_feature (1)..(191): Homolog of NCBI NO: 7438338 NR Description: Myb26 protein - garden pea
  misc_feature (1)..(191): Homolog of NCBI NO: 2280528 NR Description: ATMYB3 [Arabidopsis thaliana]
  misc_feature (1)..(191): Homolog of NCBI NO: 30688935 NR Description: myb family transcription factor (ATMYB3)
  misc_feature (1)..(191): Homolog of NCBI NO: 15242669 NR Description: myb family transcription factor [Arabidopsis
  misc_feature (1)..(191): Homolog of NCBI NO: 21554734 NR Description: putative transcription factor MYB24 [Arabidopsis
MEEDLILINYIANHGEGVWNSLAKSAGLKRTGKSCRLRWLNYLRPDVRRGNITPEEQLTIMELHAKWGNRWSKIAKHLPGRTDNEIKNFWRTKIQKYIIKSGETTTVGSQSSEFINHHATTSHVMNDTQETMDMYSPTTSYQHASNINQQLNYGNYVPESSSIMMPLSVDQSEQNYWSVDDLWPMNIYNGN

SEQ ID NO: 37022 - protein, 131 aa, Arabidopsis thaliana
  peptide (1)..(131): Ceres Seq. ID no. 13489411
  misc_feature (1)..(96): Homolog of NCBI NO: 15232137 NR Description: myb family transcription factor [Arabidopsis
  misc_feature (1)..(88): Homolog of NCBI NO: 13537530 NR Description: LhMyb [Lilium hybrid division I]
  misc_feature (1)..(85): Homolog of NCBI NO: 40643882 NR Description: MYB8 protein [Gerbera hybrid cv. 'Terra Regina']
  misc_feature (1)..(129): Homolog of NCBI NO: 82311 NR Description: myb-related protein 340 - garden snapdragon
  misc_feature (1)..(131): Homolog of NCBI NO: 82306 NR Description: myb-related protein 305 - garden snapdragon
  misc_feature (1)..(131): Homolog of NCBI NO: 7438338 NR Description: Myb26 protein - garden pea
  misc_feature (1)..(131): Homolog of NCBI NO: 2280528 NR Description: ATMYB3 [Arabidopsis thaliana]
  misc_feature (1)..(131): Homolog of NCBI NO: 30688935 NR Description: myb family transcription factor (ATMYB3)
  misc_feature (1)..(131): Homolog of NCBI NO: 15242669 NR Description: myb family transcription factor [Arabidopsis
  misc_feature (1)..(131): Homolog of NCBI NO: 21554734 NR Description: putative transcription factor MYB24 [Arabidopsis
MELHAKWGNRWSKIAKHLPGRTDNEIKNFWRTKIQKYIIKSGETTTVGSQSSEFINHHATTSHVMNDTQETMDMYSPTTSYQHASNINQQLNYGNYVPESSSIMMPLSVDQSEQNYWSVDDLWPMNIYNGN

SEQ ID NO: 37023 - DNA, 712 bp, Arabidopsis thaliana
  misc_feature (1)..(712): Ceres Seq. ID no. 12329505
  misc_feature: MA Experiment ID: 108595 Result: Up-regulated in Transcription
  misc_feature: MA Experiment 108595 PARAMETER Experiment Name: At_Ler-pi_Ovule_cDNA_P Parameter: Plant Line Value: null
  misc_feature: MA Experiment ID: 108668 Result: Up-regulated in Transcription
  misc_feature: MA Experiment 108668 PARAMETER Experiment Name: At_2mM_SA_cDNA_P Parameter: Plant Line Value: WS
  misc_feature: MA Experiment 108668 PARAMETER Experiment Name: At_2mM_SA_cDNA_P Parameter: Timepoint (hr) Value: 6
  misc_feature: MA Experiment 108668 PARAMETER Experiment Name: At_2mM_SA_cDNA_P Parameter: Treatment Value: 2mM SA vs. No Treatment
  misc_feature: MA Experiment ID: 20000182 Result: Up-regulated in Transcription
  misc_feature: MA Experiment 20000182 PARAMETER Experiment Name: At_2mM_SA_P Parameter: Age (day) Value: 14
  misc_feature: MA Experiment 20000182 PARAMETER Experiment Name: At_2mM_SA_P Parameter: Organism Value: A. thaliana
  misc_feature: MA Experiment 20000182 PARAMETER Experiment Name: At_2mM_SA_P Parameter: Plant Line Value: WS
  misc_feature: MA Experiment 20000182 PARAMETER Experiment Name: At_2mM_SA_P Parameter: Timepoint (hr) Value: 6
  misc_feature: MA Experiment 20000182 PARAMETER Experiment Name: At_2mM_SA_P Parameter: Tissue Value: Aerial
  misc_feature: MA Experiment 20000182 PARAMETER Experiment Name: At_2mM_SA_P Parameter: Treatment Value: 2mM SA vs. No Treatment
  misc_feature: MA Experiment ID: 20000227 Result: Down-regulated in Transcription
  misc_feature: MA Experiment 20000227 PARAMETER Experiment Name: At_Root-Tips-vs-Tops_P Parameter: Tissue Value: Root Tips vs. Root Tops
  misc_feature: MA Experiment ID: 20000460 Result: Up-regulated in Transcription
  misc_feature: MA Experiment 20000460 PARAMETER Experiment Name: At_10percent_PEG_P Parameter: Age (day) Value: 12
  misc_feature: MA Experiment 20000460 PARAMETER Experiment Name: At_10percent_PEG_P Parameter: Organism Value: A. thaliana
  misc_feature: MA Experiment 20000460 PARAMETER Experiment Name: At_10percent_PEG_P Parameter: Plant Line Value: WS
  misc_feature: MA Experiment 20000460 PARAMETER Experiment Name: At_10percent_PEG_P Parameter: Timepoint (day) Value: 12
  misc_feature: MA Experiment 20000460 PARAMETER Experiment Name: At_10percent_PEG_P Parameter: Tissue Value: Whole Plant
  misc_feature: MA Experiment 20000460 PARAMETER Experiment Name: At_10percent_PEG_P Parameter: Treatment Value: 10percent PEG vs. No Treatment
  misc_feature: MA Experiment ID: 20000527 Result: Up-regulated in Transcription
  misc_feature: MA Experiment 20000527 PARAMETER Experiment Name: At_10percent_PEG_P Parameter: Age (day) Value: 20
  misc_feature: MA Experiment 20000527 PARAMETER Experiment Name: At_10percent_PEG_P Parameter: Organism Value: A. thaliana
  misc_feature: MA Experiment 20000527 PARAMETER Experiment Name: At_10percent_PEG_P Parameter: Plant Line Value: WS
  misc_feature: MA Experiment 20000527 PARAMETER Experiment Name: At_10percent_PEG_P Parameter: Timepoint (day) Value: 20
  misc_feature: MA Experiment 20000527 PARAMETER Experiment Name: At_10percent_PEG_P Parameter: Tissue Value: Whole Plant
  misc_feature: MA Experiment 20000527 PARAMETER Experiment Name: At_10percent_PEG_P Parameter: Treatment Value: 10percent PEG vs. No Treatment
  misc_feature: MA Experiment ID: 20000794 Result: Down-regulated in Transcription
  misc_feature: MA Experiment 20000794 PARAMETER Experiment Name: At_Petals_P Parameter: Age (day) Value: 23-25 days
  misc_feature: MA Experiment 20000794 PARAMETER Experiment Name: At_Petals_P Parameter: Plant Line Value: WS
  misc_feature: MA Experiment 20000794 PARAMETER Experiment Name: At_Petals_P Parameter: Tissue Value: Petals vs. Whole plant
agacaaatctccattccaactgtaaccaaaaaaagagaaaagcaaaaaaacactctctgcgattcacactaagtatctaatgtatcaagatcgtcaaggcgttgtaggaggcggaggcggtggcggttctgcgccacacggaatcatactcgccgtcgttgttgcattagtggtgcttgttccgttcttcatcggagacagtggtgaagccattacagatgcgatcgcagagcttcttagtccggtgggacttctattgcttcctatcatcctcctcctcactatacagtttctctcgtcggaacgtggttccttcgtgtcggccattttctccaccggagaacccgaatcgattcacagggttagcggatctcccgtgggtgttgctctcttcctcgtactgatcttgttcttactctactaccgcttctctatcttcggcggagatgatggttccgatgactgatgcgacgtcgtattttcagatctagttttttccctctttttcttttttagggaaaacaatatatttatgtctttattcgattttcgtttttattttattttgtttgacagttgaaagtcaaactatatacagcagttgcatttcatgtaggtacgcacgtgtgagtcacgtgagtgatgagtgtactgaggttgtataatttagtaaacatgatgtgattacgattaatatgaatcccgaactttt

SEQ ID NO: 37024 - protein, 128 aa, Arabidopsis thaliana
  peptide (1)..(128): Ceres Seq. ID no. 12329506
  misc_feature (16)..(116): Homolog of NCBI NO: 18402822 NR Description: hypothetical protein; protein id: At2g31940.1
  misc_feature (10)..(126): Homolog of NCBI NO: 22831149 NR Description: hypothetical protein~similar to Arabidopsis
  misc_feature (1)..(128): Homolog of NCBI NO: 18397751 NR Description: expressed protein
MYQDRQGVVGGGGGGGSAPHGIILAVVVALVVLVPFFIGDSGEAITDAIAELLSPVGLLLLPIILLLTIQFLSSERGSFVSAIFSTGEPESIHRVSGSPVGVALFLVLILFLLYYRFSIFGGDDGSDD

SEQ ID NO: 37025 - DNA, 700 bp, Arabidopsis thaliana
  misc_feature (1)..(700): Ceres Seq. ID no. 12393963
  misc_feature: MA Experiment ID: 108577 Result: Down-regulated in Transcription
  misc_feature: MA Experiment 108577 PARAMETER Experiment Name: At_42deg_Heat_cDNA_P Parameter: Temperature (deg C) Value: 42 vs. 22
  misc_feature: MA Experiment 108577 PARAMETER Experiment Name: At_42deg_Heat_cDNA_P Parameter: Timepoint (hr) Value: 6
  misc_feature: MA Experiment 108577 PARAMETER Experiment Name: At_42deg_Heat_cDNA_P Parameter: Tissue Value: Aerial
  misc_feature: MA Experiment ID: 20000439 Result: Up-regulated in Transcription
  misc_feature: MA Experiment 20000439 PARAMETER Experiment Name: At_Roots__P Parameter: Age (day) Value: 14 vs. 21
  misc_feature: MA Experiment 20000439 PARAMETER Experiment Name: At_Roots__P Parameter: Organism Value: A. thaliana
  misc_feature: MA Experiment 20000439 PARAMETER Experiment Name: At_Roots__P Parameter: Tissue Value: Roots vs. Whole Plant
gtgccgctttgttcctaaacgattttctgtctgttctctctttgctctctcgccctctcttgctcttctgggttcgccttcctcggctagggtttatcagtggtttgtcaatggaggcttcatcatctcaaccatccgattcttctgatcaaactgcttccaagttcctttctgacctcccgtctcgaggtttcttgtcttctaccgtcgtctcttccaatccgggaagcttgcgggtctacatttgtgagcatgacacatctcccccagaaggacagcttatcaaaacaaaccagcaaaatatactaatcagatctctcttgttaaagaagcaaaaaggcgaatctagttctaaagactcaaaaggaactgctgaagatggtcctaaaaagagggctgcaaatagagctctggacgacagaagctcagctaaaagagctgctaatgcatctagacaagaaggatcaagcagtcgcacaggcgaaagagactttcagtctttgaccgttgagaagctccgcgccatgctcaaggagaagggccttccaacaaaaggaagaaaggatgagctcattgcgcgtctgaagagtgccaactgaaatgaagttgagaagggtgctctggtgaatatatgtatctttagaggtttcccaaataggagagaattgttgttgttcttgatcaaatacaaatccttttg

SEQ ID NO: 37026 - protein, 198 aa, Arabidopsis thaliana
  peptide (1)..(198): Ceres Seq. ID no. 12393964
  misc_feature (37)..(187): Homolog of NCBI NO: 15242782 NR Description: unknown protein; protein id: At5g63460.1
AALFLNDFLSVLSLLSRPLLLFWVRLPRLGFISGLSMEASSSQPSDSSDQTASKFLSDLPSRGFLSSTVVSSNPGSLRVYICEHDTSPPEGQLIKTNQQNILIRSLLLKKQKGESSSKDSKGTAEDGPKKRAANRALDDRSSAKRAANASRQEGSSSRTGERDFQSLTVEKLRAMLKEKGLPTKGRKDELIARLKSAN

SEQ ID NO: 37027 - protein, 162 aa, Arabidopsis thaliana
  peptide (1)..(162): Ceres Seq. ID no. 12393965
  misc_feature (1)..(151): Homolog of NCBI NO: 15242782 NR Description: unknown protein; protein id: At5g63460.1
MEASSSQPSDSSDQTASKFLSDLPSRGFLSSTVVSSNPGSLRVYICEHDTSPPEGQLIKTNQQNILIRSLLLKKQKGESSSKDSKGTAEDGPKKRAANRALDDRSSAKRAANASRQEGSSSRTGERDFQSLTVEKLRAMLKEKGLPTKGRKDELIARLKSAN

SEQ ID NO: 37028 - DNA, 697 bp, Arabidopsis thaliana
  misc_feature (1)..(697): Ceres Seq. ID no. 12604897
  misc_feature: MA Experiment ID: 20000180 Result: Down-regulated in Transcription
  misc_feature: MA Experiment 20000180 PARAMETER Experiment Name: At_Germinating_Seeds_P Parameter: Age (hr) Value: 24 vs. 0
  misc_feature: MA Experiment 20000180 PARAMETER Experiment Name: At_Germinating_Seeds_P Parameter: Tissue Value: Germinating Seeds
  misc_feature: MA Experiment ID: 20000495 Result: Up-regulated in Transcription
  misc_feature: MA Experiment 20000495 PARAMETER Experiment Name: At_Guard_Cells_P Parameter: Harvest Date Value: 8/2/2002
  misc_feature: MA Experiment 20000495 PARAMETER Experiment Name: At_Guard_Cells_P Parameter: Organism Value: A. thaliana
  misc_feature: MA Experiment 20000495 PARAMETER Experiment Name: At_Guard_Cells_P Parameter: Tissue Value: Guard Cells vs. Leaves
  misc_feature: MA Experiment ID: 20001557 Result: Up-regulated in Transcription
  misc_feature: MA Experiment 20001557 PARAMETER Experiment Name: At_Drought_Soil_Dry_P Parameter: Age (day) Value: 27
  misc_feature: MA Experiment 20001557 PARAMETER Experiment Name: At_Drought_Soil_Dry_P Parameter: Organism Value: A. thaliana
  misc_feature: MA Experiment 20001557 PARAMETER Experiment Name: At_Drought_Soil_Dry_P Parameter: Plant Line Value: WS
  misc_feature: MA Experiment 20001557 PARAMETER Experiment Name: At_Drought_Soil_Dry_P Parameter: Post Timepoint (hr) Value: 3
  misc_feature: MA Experiment 20001557 PARAMETER Experiment Name: At_Drought_Soil_Dry_P Parameter: Post-Treatment Value: Re-Water vs. No Drought
  misc_feature: MA Experiment 20001557 PARAMETER Experiment Name: At_Drought_Soil_Dry_P Parameter: Timepoint (day) Value: 13
  misc_feature: MA Experiment 20001557 PARAMETER Experiment Name: At_Drought_Soil_Dry_P Parameter: Treatment Value: Drought vs. No Drought
  misc_feature: MA Experiment ID: 20001558 Result: Up-regulated in Transcription
  misc_feature: MA Experiment 20001558 PARAMETER Experiment Name: At_Drought_Soil_Dry_P Parameter: Age (day) Value: 27
  misc_feature: MA Experiment 20001558 PARAMETER Experiment Name: At_Drought_Soil_Dry_P Parameter: Organism Value: A. thaliana
  misc_feature: MA Experiment 20001558 PARAMETER Experiment Name: At_Drought_Soil_Dry_P Parameter: Plant Line Value: WS
  misc_feature: MA Experiment 20001558 PARAMETER Experiment Name: At_Drought_Soil_Dry_P Parameter: Post Timepoint (hr) Value: 6
  misc_feature: MA Experiment 20001558 PARAMETER Experiment Name: At_Drought_Soil_Dry_P Parameter: Post-Treatment Value: Re-Water vs. No Drought
  misc_feature: MA Experiment 20001558 PARAMETER Experiment Name: At_Drought_Soil_Dry_P Parameter: Timepoint (day) Value: 13
  misc_feature: MA Experiment 20001558 PARAMETER Experiment Name: At_Drought_Soil_Dry_P Parameter: Treatment Value: Drought vs. No Drought
  misc_feature: MA Experiment ID: 20001560 Result: Up-regulated in Transcription
  misc_feature: MA Experiment 20001560 PARAMETER Experiment Name: At_Drought_Soil_Dry_P Parameter: Age (day) Value: 28
  misc_feature: MA Experiment 20001560 PARAMETER Experiment Name: At_Drought_Soil_Dry_P Parameter: Organism Value: A. thaliana
  misc_feature: MA Experiment 20001560 PARAMETER Experiment Name: At_Drought_Soil_Dry_P Parameter: Plant Line Value: WS
  misc_feature: MA Experiment 20001560 PARAMETER Experiment Name: At_Drought_Soil_Dry_P Parameter: Post Timepoint (hr) Value: None
  misc_feature: MA Experiment 20001560 PARAMETER Experiment Name: At_Drought_Soil_Dry_P Parameter: Post-Treatment Value: None
  misc_feature: MA Experiment 20001560 PARAMETER Experiment Name: At_Drought_Soil_Dry_P Parameter: Timepoint (day) Value: 14
  misc_feature: MA Experiment 20001560 PARAMETER Experiment Name: At_Drought_Soil_Dry_P Parameter: Treatment Value: Drought vs. No Drought
atctttagccgcctacttggtatcatcaaatcgaggagattcgaagaagcatggtgggatttaagaacagatacatgttaatggaagtttttctggatccggacaaggatcttctcggagaaggaacaccgatcattcttacacaattcaatctctcgaaagcaatcaaagacagtatcctcgtcaatttcggcgagtgtggtctaggttcgtctctcggttccttccaagtgaaatatgtgaatccaatcacgaagctgtgcattgtaagatcatcaagagaagaacacagacaagtttggttagcaatcacattggtcaaaagcatcggaaactgtccggtgatcttaaacttgctcgatatcagcggttgcatcagagcgtgtagagacacagccttgaagtgcgacaaggagaagtttgagcagtgtagcaaaagcttgtctgaagaggagattaggcagatgaatactttctctttgagaagatcaaacctattggaaacttgaaccttttctnanccntttttccnttcgatttngccccttaantttngaaatggtccantcttggnntttttnttanttttgaaatccaaagggntaagaaccanctncattccctgaaaagatngtttncgatttgaancnntgggtttttatatgtnggaattaaaataagagggtgtgaattgttg

SEQ ID NO: 37029 - protein, 152 aa, Arabidopsis thaliana
  peptide (1)..(152): Ceres Seq. ID no. 12604898
  misc_feature (7)..(97): Pfam Name: Rpp14 family Pfam Description: Rpp14 family
  misc_feature (1)..(151): Homolog of NCBI NO: 20270249 NR Description: RNase MRP/RNase P protein-like [Homo sapiens]
  misc_feature (1)..(136): Homolog of NCBI NO: 19075979 NR Description: putative pre-tRNA/pre-rRNA processing protein
  misc_feature (1)..(125): Homolog of NCBI NO: 38568007 NR Description: OSJNBb0068N06.26 [Oryza sativa (japonica
  misc_feature (1)..(125): Homolog of NCBI NO: 38343977 NR Description: OSJNBa0041M21.1 [Oryza sativa (japonica
  misc_feature (1)..(97): Homolog of NCBI NO: 3122357 NR Description: Probable lipoate-protein ligase (Lipoate
  misc_feature (1)..(151): Homolog of NCBI NO: 22329330 NR Description: similar to Probable lipoate-protein ligase B
MVGFKNRYMLMEVFLDPDKDLLGEGTPIILTQFNLSKAIKDSILVNFGECGLGSSLGSFQVKYVNPITKLCIVRSSREEHRQVWLAITLVKSIGNCPVILNLLDISGCIRACRDTALKCDKEKFEQCSKSLSEEEIRQMNTFSLRRSNLLET

SEQ ID NO: 37030 - protein, 144 aa, Arabidopsis thaliana
  peptide (1)..(144): Ceres Seq. ID no. 12604899
  misc_feature (1)..(89): Pfam Name: Rpp14 family Pfam Description: Rpp14 family
  misc_feature (1)..(143): Homolog of NCBI NO: 20270249 NR Description: RNase MRP/RNase P protein-like [Homo sapiens]
  misc_feature (1)..(128): Homolog of NCBI NO: 19075979 NR Description: putative pre-tRNA/pre-rRNA processing protein
  misc_feature (1)..(117): Homolog of NCBI NO: 38568007 NR Description: OSJNBb0068N06.26 [Oryza sativa (japonica
  misc_feature (1)..(117): Homolog of NCBI NO: 38343977 NR Description: OSJNBa0041M21.1 [Oryza sativa (japonica
  misc_feature (1)..(89): Homolog of NCBI NO: 3122357 NR Description: Probable lipoate-protein ligase (Lipoate
  misc_feature (1)..(143): Homolog of NCBI NO: 22329330 NR Description: similar to Probable lipoate-protein ligase B
MLMEVFLDPDKDLLGEGTPIILTQFNLSKAIKDSILVNFGECGLGSSLGSFQVKYVNPITKLCIVRSSREEHRQVWLAITLVKSIGNCPVILNLLDISGCIRACRDTALKCDKEKFEQCSKSLSEEEIRQMNTFSLRRSNLLET

SEQ ID NO: 37031 - protein, 142 aa, Arabidopsis thaliana
  peptide (1)..(142): Ceres Seq. ID no. 12604900
  misc_feature (1)..(87): Pfam Name: Rpp14 family Pfam Description: Rpp14 family
  misc_feature (1)..(141): Homolog of NCBI NO: 20270249 NR Description: RNase MRP/RNase P protein-like [Homo sapiens]
  misc_feature (1)..(126): Homolog of NCBI NO: 19075979 NR Description: putative pre-tRNA/pre-rRNA processing protein
  misc_feature (1)..(115): Homolog of NCBI NO: 38568007 NR Description: OSJNBb0068N06.26 [Oryza sativa (japonica
  misc_feature (1)..(115): Homolog of NCBI NO: 38343977 NR Description: OSJNBa0041M21.1 [Oryza sativa (japonica
  misc_feature (1)..(87): Homolog of NCBI NO: 3122357 NR Description: Probable lipoate-protein ligase (Lipoate
  misc_feature (1)..(141): Homolog of NCBI NO: 22329330 NR Description: similar to Probable lipoate-protein ligase B
MEVFLDPDKDLLGEGTPIILTQFNLSKAIKDSILVNFGECGLGSSLGSFQVKYVNPITKLCIVRSSREEHRQVWLAITLVKSIGNCPVILNLLDISGCIRACRDTALKCDKEKFEQCSKSLSEEEIRQMNTFSLRRSNLLET

SEQ ID NO: 37032 - DNA, 1637 bp, Arabidopsis thaliana
  misc_feature (1)..(1637): Ceres Seq. ID no. 13497284
  misc_feature: MA Experiment ID: 108434 Result: Down-regulated in Transcription
  misc_feature: MA Experiment 108434 PARAMETER Experiment Name: At_Root_Tips_cDNA_P Parameter: Tissue Value: Root Tips
  misc_feature: MA Experiment ID: 108463 Result: Up-regulated in Transcription
  misc_feature: MA Experiment 108463 PARAMETER Experiment Name: At_Germinating_Seeds_cDNA_P Parameter: Age (day) Value: 3 vs. 0
  misc_feature: MA Experiment 108463 PARAMETER Experiment Name: At_Germinating_Seeds_cDNA_P Parameter: Tissue Value: Germinating Seeds
  misc_feature: MA Experiment ID: 108464 Result: Up-regulated in Transcription
  misc_feature: MA Experiment 108464 PARAMETER Experiment Name: At_Germinating_Seeds_cDNA_P Parameter: Age (day) Value: 4 vs. 0
  misc_feature: MA Experiment 108464 PARAMETER Experiment Name: At_Germinating_Seeds_cDNA_P Parameter: Tissue Value: Germinating Seeds
  misc_feature: MA Experiment ID: 108577 Result: Down-regulated in Transcription
  misc_feature: MA Experiment 108577 PARAMETER Experiment Name: At_42deg_Heat_cDNA_P Parameter: Temperature (deg C) Value: 42 vs. 22
  misc_feature: MA Experiment 108577 PARAMETER Experiment Name: At_42deg_Heat_cDNA_P Parameter: Timepoint (hr) Value: 6
  misc_feature: MA Experiment 108577 PARAMETER Experiment Name: At_42deg_Heat_cDNA_P Parameter: Tissue Value: Aerial
  misc_feature: MA Experiment ID: 20000030 Result: Up-regulated in Transcription
  misc_feature: MA Experiment 20000030 PARAMETER Experiment Name: At_CS6630_Roots_cDNA_P Parameter: Plant Line Value: CS6630 vs. WS
  misc_feature: MA Experiment 20000030 PARAMETER Experiment Name: At_CS6630_Roots_cDNA_P Parameter: Tissue Value: Roots
  misc_feature: MA Experiment ID: 20000069 Result: Up-regulated in Transcription
  misc_feature: MA Experiment 20000069 PARAMETER Experiment Name: At_100uM_ABA_Mutants_cDNA_P Parameter: Plant Line Value: CS23
  misc_feature: MA Experiment 20000069 PARAMETER Experiment Name: At_100uM_ABA_Mutants_cDNA_P Parameter: Timepoint (hr) Value: 6
  misc_feature: MA Experiment 20000069 PARAMETER Experiment Name: At_100uM_ABA_Mutants_cDNA_P Parameter: Tissue Value: Aerial
  misc_feature: MA Experiment 20000069 PARAMETER Experiment Name: At_100uM_ABA_Mutants_cDNA_P Parameter: Treatment Value: 100uM ABA vs. No Treatment
  misc_feature: MA Experiment ID: 20000071 Result: Up-regulated in Transcription
  misc_feature: MA Experiment 20000071 PARAMETER Experiment Name: At_100uM_ABA_Mutants_cDNA_P Parameter: Plant Line Value: CS8104
  misc_feature: MA Experiment 20000071 PARAMETER Experiment Name: At_100uM_ABA_Mutants_cDNA_P Parameter: Timepoint (hr) Value: 6
  misc_feature: MA Experiment 20000071 PARAMETER Experiment Name: At_100uM_ABA_Mutants_cDNA_P Parameter: Tissue Value: Aerial
  misc_feature: MA Experiment 20000071 PARAMETER Experiment Name: At_100uM_ABA_Mutants_cDNA_P Parameter: Treatment Value: 100uM ABA vs. No Treatment
  misc_feature: MA Experiment ID: 20000072 Result: Up-regulated in Transcription
  misc_feature: MA Experiment 20000072 PARAMETER Experiment Name: At_100uM_ABA_Mutants_cDNA_P Parameter: Plant Line Value: CS8105
  misc_feature: MA Experiment 20000072 PARAMETER Experiment Name: At_100uM_ABA_Mutants_cDNA_P Parameter: Timepoint (hr) Value: 6
  misc_feature: MA Experiment 20000072 PARAMETER Experiment Name: At_100uM_ABA_Mutants_cDNA_P Parameter: Tissue Value: Aerial
  misc_feature: MA Experiment 20000072 PARAMETER Experiment Name: At_100uM_ABA_Mutants_cDNA_P Parameter: Treatment Value: 100uM ABA vs. No Treatment
  misc_feature: MA Experiment ID: 20000111 Result: Down-regulated in Transcription
  misc_feature: MA Experiment 20000111 PARAMETER Experiment Name: At_42deg_Heat_cDNA_P Parameter: Temperature (deg C) Value: 42 vs. 22
  misc_feature: MA Experiment 20000111 PARAMETER Experiment Name: At_42deg_Heat_cDNA_P Parameter: Timepoint (hr) Value: 6
  misc_feature: MA Experiment 20000111 PARAMETER Experiment Name: At_42deg_Heat_cDNA_P Parameter: Tissue Value: Aerial
  misc_feature: MA Experiment ID: 20000171 Result: Down-regulated in Transcription
  misc_feature: MA Experiment 20000171 PARAMETER Experiment Name: At_42deg_Heat_P Parameter: Age (day) Value: 14
  misc_feature: MA Experiment 20000171 PARAMETER Experiment Name: At_42deg_Heat_P Parameter: Organism Value: A. thaliana
  misc_feature: MA Experiment 20000171 PARAMETER Experiment Name: At_42deg_Heat_P Parameter: Plant Line Value: WS
  misc_feature: MA Experiment 20000171 PARAMETER Experiment Name: At_42deg_Heat_P Parameter: Temperature (deg C) Value: 42 vs. 22
  misc_feature: MA Experiment 20000171 PARAMETER Experiment Name: At_42deg_Heat_P Parameter: Timepoint (hr) Value: 1
  misc_feature: MA Experiment 20000171 PARAMETER Experiment Name: At_42deg_Heat_P Parameter: Tissue Value: Aerial
  misc_feature: MA Experiment ID: 20000173 Result: Down-regulated in Transcription
  misc_feature: MA Experiment 20000173 PARAMETER Experiment Name: At_42deg_Heat_P Parameter: Age (day) Value: 14
  misc_feature: MA Experiment 20000173 PARAMETER Experiment Name: At_42deg_Heat_P Parameter: Organism Value: A. thaliana
  misc_feature: MA Experiment 20000173 PARAMETER Experiment Name: At_42deg_Heat_P Parameter: Plant Line Value: WS
  misc_feature: MA Experiment 20000173 PARAMETER Experiment Name: At_42deg_Heat_P Parameter: Temperature (deg C) Value: 42 vs. 22
  misc_feature: MA Experiment 20000173 PARAMETER Experiment Name: At_42deg_Heat_P Parameter: Timepoint (hr) Value: 6
  misc_feature: MA Experiment 20000173 PARAMETER Experiment Name: At_42deg_Heat_P Parameter: Tissue Value: Aerial
  misc_feature: MA Experiment ID: 20000180 Result: Up-regulated in Transcription
  misc_feature: MA Experiment 20000180 PARAMETER Experiment Name: At_Germinating_Seeds_P Parameter: Age (hr) Value: 24 vs. 0
  misc_feature: MA Experiment 20000180 PARAMETER Experiment Name: At_Germinating_Seeds_P Parameter: Tissue Value: Germinating Seeds
  misc_feature: MA Experiment ID: 20000184 Result: Down-regulated in Transcription
  misc_feature: MA Experiment 20000184 PARAMETER Experiment Name: At_Shoots__P Parameter: Age (day) Value: 7
  misc_feature: MA Experiment 20000184 PARAMETER Experiment Name: At_Shoots__P Parameter: Tissue Value: Shoots vs. Whole Plant
  misc_feature: MA Experiment ID: 20000185 Result: Down-regulated in Transcription
  misc_feature: MA Experiment 20000185 PARAMETER Experiment Name: At_Roots__P Parameter: Age (day) Value: 7 vs. 21
  misc_feature: MA Experiment 20000185 PARAMETER Experiment Name: At_Roots__P Parameter: Organism Value: A. thaliana
  misc_feature: MA Experiment 20000185 PARAMETER Experiment Name: At_Roots__P Parameter: Tissue Value: Roots vs. Whole Plant
  misc_feature: MA Experiment ID: 20000234 Result: Down-regulated in Transcription
  misc_feature: MA Experiment 20000234 PARAMETER Experiment Name: At_Siliques_P Parameter: Age (day) Value: 21
  misc_feature: MA Experiment 20000234 PARAMETER Experiment Name: At_Siliques_P Parameter: Organism Value: A. thaliana
  misc_feature: MA Experiment 20000234 PARAMETER Experiment Name: At_Siliques_P Parameter: Plant Line Value: WS
  misc_feature: MA Experiment 20000234 PARAMETER Experiment Name: At_Siliques_P Parameter: Tissue Value: Less Than 5mm Siliques vs. Whole Plant
  misc_feature: MA Experiment ID: 20000235 Result: Down-regulated in Transcription
  misc_feature: MA Experiment 20000235 PARAMETER Experiment Name: At_Siliques_P Parameter: Age (day) Value: 21
  misc_feature: MA Experiment 20000235 PARAMETER Experiment Name: At_Siliques_P Parameter: Organism Value: A. thaliana
  misc_feature: MA Experiment 20000235 PARAMETER Experiment Name: At_Siliques_P Parameter: Plant Line Value: WS
  misc_feature: MA Experiment 20000235 PARAMETER Experiment Name: At_Siliques_P Parameter: Tissue Value: 5-10mm Siliques vs. Whole Plant
  misc_feature: MA Experiment ID: 20000265 Result: Down-regulated in Transcription
  misc_feature: MA Experiment 20000265 PARAMETER Experiment Name: At_Open_Flower_P Parameter: Age (day) Value: 21
  misc_feature: MA Experiment 20000265 PARAMETER Experiment Name: At_Open_Flower_P Parameter: Plant Line Value: WS
  misc_feature: MA Experiment 20000265 PARAMETER Experiment Name: At_Open_Flower_P Parameter: Tissue Value: Closed Flower vs. Whole Plant
  misc_feature: MA Experiment ID: 20000438 Result: Down-regulated in Transcription
  misc_feature: MA Experiment 20000438 PARAMETER Experiment Name: At_Shoots__P Parameter: Age (day) Value: 14
  misc_feature: MA Experiment 20000438 PARAMETER Experiment Name: At_Shoots__P Parameter: Tissue Value: Shoots vs. Whole Plant
  misc_feature: MA Experiment ID: 20000439 Result: Down-regulated in Transcription
  misc_feature: MA Experiment 20000439 PARAMETER Experiment Name: At_Roots__P Parameter: Age (day) Value: 14 vs. 21
  misc_feature: MA Experiment 20000439 PARAMETER Experiment Name: At_Roots__P Parameter: Organism Value: A. thaliana
  misc_feature: MA Experiment 20000439 PARAMETER Experiment Name: At_Roots__P Parameter: Tissue Value: Roots vs. Whole Plant
  misc_feature: MA Experiment ID: 20000455 Result: Up-regulated in Transcription
  misc_feature: MA Experiment 20000455 PARAMETER Experiment Name: At_100uM_ABA_P Parameter: Age (day) Value: 16
  misc_feature: MA Experiment 20000455 PARAMETER Experiment Name: At_100uM_ABA_P Parameter: Organism Value: A. thaliana
  misc_feature: MA Experiment 20000455 PARAMETER Experiment Name: At_100uM_ABA_P Parameter: Plant Line Value: WS
  misc_feature: MA Experiment 20000455 PARAMETER Experiment Name: At_100uM_ABA_P Parameter: Timepoint (hr) Value: 48
  misc_feature: MA Experiment 20000455 PARAMETER Experiment Name: At_100uM_ABA_P Parameter: Tissue Value: Aerial
  misc_feature: MA Experiment 20000455 PARAMETER Experiment Name: At_100uM_ABA_P Parameter: Treatment Value: 100uM ABA vs. No Treatment
  misc_feature: MA Experiment ID: 20000495 Result: Down-regulated in Transcription
  misc_feature: MA Experiment 20000495 PARAMETER Experiment Name: At_Guard_Cells_P Parameter: Harvest Date Value: 8/2/2002
  misc_feature: MA Experiment 20000495 PARAMETER Experiment Name: At_Guard_Cells_P Parameter: Organism Value: A. thaliana
  misc_feature: MA Experiment 20000495 PARAMETER Experiment Name: At_Guard_Cells_P Parameter: Tissue Value: Guard Cells vs. Leaves
  misc_feature: MA Experiment ID: 20000496 Result: Down-regulated in Transcription
  misc_feature: MA Experiment 20000496 PARAMETER Experiment Name: At_Guard_Cells_P Parameter: Harvest Date Value: 7/19/2002
  misc_feature: MA Experiment 20000496 PARAMETER Experiment Name: At_Guard_Cells_P Parameter: Organism Value: Canola
  misc_feature: MA Experiment 20000496 PARAMETER Experiment Name: At_Guard_Cells_P Parameter: Tissue Value: Guard Cells vs. Leaves
  misc_feature: MA Experiment ID: 20001248 Result: Down-regulated in Transcription
  misc_feature: MA Experiment 20001248 PARAMETER Experiment Name: At_Far-red-induction_P Parameter: Age (day) Value: 7
  misc_feature: MA Experiment 20001248 PARAMETER Experiment Name: At_Far-red-induction_P Parameter: Light Value: Far-red vs. White
  misc_feature: MA Experiment 20001248 PARAMETER Experiment Name: At_Far-red-induction_P Parameter: Organism Value: A. thaliana
  misc_feature: MA Experiment 20001248 PARAMETER Experiment Name: At_Far-red-induction_P Parameter: Plant Line Value: Columbia
  misc_feature: MA Experiment 20001248 PARAMETER Experiment Name: At_Far-red-induction_P Parameter: Timepoint (hr) Value: 4
  misc_feature: MA Experiment 20001248 PARAMETER Experiment Name: At_Far-red-induction_P Parameter: Tissue Value: Whole Plant
  misc_feature: MA Experiment ID: 20001451 Result: Down-regulated in Transcription
  misc_feature: MA Experiment 20001451 PARAMETER Experiment Name: At_Far-red-induction_P Parameter: Age (day) Value: 7
  misc_feature: MA Experiment 20001451 PARAMETER Experiment Name: At_Far-red-induction_P Parameter: Light Value: Far-red vs. White
  misc_feature: MA Experiment 20001451 PARAMETER Experiment Name: At_Far-red-induction_P Parameter: Organism Value: A. thaliana
  misc_feature: MA Experiment 20001451 PARAMETER Experiment Name: At_Far-red-induction_P Parameter: Plant Line Value: Columbia
  misc_feature: MA Experiment 20001451 PARAMETER Experiment Name: At_Far-red-induction_P Parameter: Timepoint (hr) Value: 24
  misc_feature: MA Experiment 20001451 PARAMETER Experiment Name: At_Far-red-induction_P Parameter: Tissue Value: Whole Plant
  misc_feature: MA Experiment ID: 20001560 Result: Down-regulated in Transcription
  misc_feature: MA Experiment 20001560 PARAMETER Experiment Name: At_Drought_Soil_Dry_P Parameter: Age (day) Value: 28
  misc_feature: MA Experiment 20001560 PARAMETER Experiment Name: At_Drought_Soil_Dry_P Parameter: Organism Value: A. thaliana
  misc_feature: MA Experiment 20001560 PARAMETER Experiment Name: At_Drought_Soil_Dry_P Parameter: Plant Line Value: WS
  misc_feature: MA Experiment 20001560 PARAMETER Experiment Name: At_Drought_Soil_Dry_P Parameter: Post Timepoint (hr) Value: None
  misc_feature: MA Experiment 20001560 PARAMETER Experiment Name: At_Drought_Soil_Dry_P Parameter: Post-Treatment Value: None
  misc_feature: MA Experiment 20001560 PARAMETER Experiment Name: At_Drought_Soil_Dry_P Parameter: Timepoint (day) Value: 14
  misc_feature: MA Experiment 20001560 PARAMETER Experiment Name: At_Drought_Soil_Dry_P Parameter: Treatment Value: Drought vs. No Drought
atcgataaccaaataaaaaatggcgatctctttcctctgtgtttttctcatcaccttcgtttcgttaatcttttttgccaagaaaatcaaacgatcaaaatggaatcttcctccaagccctcccaagtttccggtcatcgggaacttacatcagattggagaattgcctcacaggtcacttcaacatctcgccgaaagatacggacctgtgatgcttcttcactttgggtttgtccctataactgtggtctcatcgagagaagccgctgaagaagtgcttagaactcatgacctagactgttgcagcaggcctaagcttgtcgggacaaggttactctcgcgggattttaaagatatcggttttacgccatacggtaacgagtggaaggcgcggcgtaagtttgccctgcgtgagcttttctgtttgaaaaaggttcagtcctttaggcatatccgagaggaagaatgtaactttctggtcaagcaactgtcggaatctgcggttgatcgctctccggtcgatttgagcaaatcccttttctggctaaccgctagtatcctttttagagttgccttaggacagaattttcacgagagcgattttatcgataaagaaaagatcgaagagctcgtgttcgaagctgagactgccctagcaagtttcacttgttctgatttcttccctgttgccggacttggatggctcgttgattggttttccggacaacacaagagactcaacgatgttttttacaagctcgatgctctgtttcaacatgtcatagatgatcatttaaatcctggaagatcaaaagagcacgaagacatcatcgattcaatgttggatgtgattcataaacaaggagaggacagttccttagagctcacaatagatcatatcaaggggtttctcgcgaatatatttcttgcagggatagacacaggggccatcaccatgatatgggcagtgacggagctcgttaaaaacccgaaactgataaagaaagttcaaggcgatatccgagaacaacttggcagcaataaggagagaatcaccgaggaagatatcgagaaagttccttacttgaagatggtaatcaaagaaacattcaggttacacccagcagctcctcttatacttccaagggaaacaatggctcacatcaaagttcaagggtatgatattcctcccaagaggaggatcttggtcaatgtttcggcaataggaagagatcccaaactctggacaaacccgaaagagtttgaccctgagaggtttatggatagctttgttgattataggggacaacattacgagctcttaccatttgggtccggtcgaaggatatgtcccgggatgccaatggggattgctgccgtcgaattgggactcttgaacttactttacttcttcgattggaagttgcctgatgggatgacacataaagatatcgatactgaagaagctggtactcttacaatagtcaagaaagtacctctcaagctcgttccagttcgagttcagtgatcagaccaaactccaaaccttttgaataaatatatcatgcaaatcatgtaagcttctctgatgatgtatgaagtatatttttcagtaaaatactaagttgaaatttcat

SEQ ID NO: 37033 - protein, 502 aa, Arabidopsis thaliana
  peptide (1)..(502): Ceres Seq. ID no. 13497285
  misc_feature (31)..(496): Pfam Name: Cytochrome P450 Pfam Description: Cytochrome P450
  misc_feature (6)..(500): Homolog of NCBI NO: 15222174 NR Description: cytochrome P450 family [Arabidopsis thaliana]
  misc_feature (1)..(498): Homolog of NCBI NO: 15231525 NR Description: cytochrome P450 71B22 [Arabidopsis thaliana]
  misc_feature (300)..(502): Homolog of NCBI NO: 11994435 NR Description: cytochrome P450 [Arabidopsis thaliana]
  misc_feature (34)..(252): Homolog of NCBI NO: 11994435 NR Description: cytochrome P450 [Arabidopsis thaliana]
  misc_feature (1)..(502): Homolog of NCBI NO: 15231516 NR Description: cytochrome P450 71B16 [Arabidopsis thaliana]
  misc_feature (1)..(501): Homolog of NCBI NO: 15231517 NR Description: cytochrome p450 family [Arabidopsis thaliana]
  misc_feature (1)..(502): Homolog of NCBI NO: 16226474 NR Description: AT3g26180/MTC11_8 [Arabidopsis thaliana]
  misc_feature (1)..(502): Homolog of NCBI NO: 15231522 NR Description: cytochrome P450 71B20 [Arabidopsis thaliana]
  misc_feature (1)..(502): Homolog of NCBI NO: 21554748 NR Description: cytochrome P450, putative [Arabidopsis thaliana]
  misc_feature (1)..(502): Homolog of NCBI NO: 15231520 NR Description: cytochrome P450 71B19 [Arabidopsis thaliana]
MAISFLCVFLITFVSLIFFAKKIKRSKWNLPPSPPKFPVIGNLHQIGELPHRSLQHLAERYGPVMLLHFGFVPITVVSSREAAEEVLRTHDLDCCSRPKLVGTRLLSRDFKDIGFTPYGNEWKARRKFALRELFCLKKVQSFRHIREEECNFLVKQLSESAVDRSPVDLSKSLFWLTASILFRVALGQNFHESDFIDKEKIEELVFEAETALASFTCSDFFPVAGLGWLVDWFSGQHKRLNDVFYKLDALFQHVIDDHLNPGRSKEHEDIIDSMLDVIHKQGEDSSLELTIDHIKGFLANIFLAGIDTGAITMIWAVTELVKNPKLIKKVQGDIREQLGSNKERITEEDIEKVPYLKMVIKETFRLHPAAPLILPRETMAHIKVQGYDIPPKRRILVNVSAIGRDPKLWTNPKEFDPERFMDSFVDYRGQHYELLPFGSGRRICPGMPMGIAAVELGLLNLLYFFDWKLPDGMTHKDIDTEEAGTLTIVKKVPLKLVPVRVQ

SEQ ID NO: 37034 - protein, 438 aa, Arabidopsis thaliana
  peptide (1)..(438): Ceres Seq. ID no. 13497286
  misc_feature (1)..(432): Pfam Name: Cytochrome P450 Pfam Description: Cytochrome P450
  misc_feature (1)..(436): Homolog of NCBI NO: 15222174 NR Description: cytochrome P450 family [Arabidopsis thaliana]
  misc_feature (1)..(434): Homolog of NCBI NO: 15231525 NR Description: cytochrome P450 71B22 [Arabidopsis thaliana]
  misc_feature (236)..(438): Homolog of NCBI NO: 11994435 NR Description: cytochrome P450 [Arabidopsis thaliana]
  misc_feature (1)..(188): Homolog of NCBI NO: 11994435 NR Description: cytochrome P450 [Arabidopsis thaliana]
  misc_feature (1)..(438): Homolog of NCBI NO: 15231516 NR Description: cytochrome P450 71B16 [Arabidopsis thaliana]
  misc_feature (1)..(437): Homolog of NCBI NO: 15231517 NR Description: cytochrome p450 family [Arabidopsis thaliana]
  misc_feature (1)..(438): Homolog of NCBI NO: 16226474 NR Description: AT3g26180/MTC11_8 [Arabidopsis thaliana]
  misc_feature (1)..(438): Homolog of NCBI NO: 15231522 NR Description: cytochrome P450 71B20 [Arabidopsis thaliana]
  misc_feature (1)..(438): Homolog of NCBI NO: 21554748 NR Description: cytochrome P450, putative [Arabidopsis thaliana]
  misc_feature (1)..(438): Homolog of NCBI NO: 15231520 NR Description: cytochrome P450 71B19 [Arabidopsis thaliana]
MLLHFGFVPITVVSSREAAEEVLRTHDLDCCSRPKLVGTRLLSRDFKDIGFTPYGNEWKARRKFALRELFCLKKVQSFRHIREEECNFLVKQLSESAVDRSPVDLSKSLFWLTASILFRVALGQNFHESDFIDKEKIEELVFEAETALASFTCSDFFPVAGLGWLVDWFSGQHKRLNDVFYKLDALFQHVIDDHLNPGRSKEHEDIIDSMLDVIHKQGEDSSLELTIDHIKGFLANIFLAGIDTGAITMIWAVTELVKNPKLIKKVQGDIREQLGSNKERITEEDIEKVPYLKMVIKETFRLHPAAPLILPRETMAHIKVQGYDIPPKRRILVNVSAIGRDPKLWTNPKEFDPERFMDSFVDYRGQHYELLPFGSGRRICPGMPMGIAAVELGLLNLLYFFDWKLPDGMTHKDIDTEEAGTLTIVKKVPLKLVPVRVQ

SEQ ID NO: 37035 - DNA, 1674 bp, Arabidopsis thaliana
  misc_feature (1)..(1674): Ceres Seq. ID no. 12731360
  misc_feature: MA Experiment ID: 20000184 Result: Up-regulated in Transcription
  misc_feature: MA Experiment 20000184 PARAMETER Experiment Name: At_Shoots__P Parameter: Age (day) Value: 7
  misc_feature: MA Experiment 20000184 PARAMETER Experiment Name: At_Shoots__P Parameter: Tissue Value: Shoots vs. Whole Plant
  misc_feature: MA Experiment ID: 20000185 Result: Up-regulated in Transcription
  misc_feature: MA Experiment 20000185 PARAMETER Experiment Name: At_Roots__P Parameter: Age (day) Value: 7 vs. 21
  misc_feature: MA Experiment 20000185 PARAMETER Experiment Name: At_Roots__P Parameter: Organism Value: A. thaliana
  misc_feature: MA Experiment 20000185 PARAMETER Experiment Name: At_Roots__P Parameter: Tissue Value: Roots vs. Whole Plant
  misc_feature: MA Experiment ID: 20000227 Result: Up-regulated in Transcription
  misc_feature: MA Experiment 20000227 PARAMETER Experiment Name: At_Root-Tips-vs-Tops_P Parameter: Tissue Value: Root Tips vs. Root Tops
  misc_feature: MA Experiment ID: 20000437 Result: Down-regulated in Transcription
  misc_feature: MA Experiment 20000437 PARAMETER Experiment Name: At_Drought_P Parameter: Age (day) Value: 8
  misc_feature: MA Experiment 20000437 PARAMETER Experiment Name: At_Drought_P Parameter: Organism Value: A. thaliana
  misc_feature: MA Experiment 20000437 PARAMETER Experiment Name: At_Drought_P Parameter: Plant Line Value: WS
  misc_feature: MA Experiment 20000437 PARAMETER Experiment Name: At_Drought_P Parameter: Timepoint (hr) Value: 24
  misc_feature: MA Experiment 20000437 PARAMETER Experiment Name: At_Drought_P Parameter: Tissue Value: Whole Plant
  misc_feature: MA Experiment 20000437 PARAMETER Experiment Name: At_Drought_P Parameter: Treatment Value: Drought vs. No Drought
  misc_feature: MA Experiment ID: 20000439 Result: Up-regulated in Transcription
  misc_feature: MA Experiment 20000439 PARAMETER Experiment Name: At_Roots__P Parameter: Age (day) Value: 14 vs. 21
  misc_feature: MA Experiment 20000439 PARAMETER Experiment Name: At_Roots__P Parameter: Organism Value: A. thaliana
  misc_feature: MA Experiment 20000439 PARAMETER Experiment Name: At_Roots__P Parameter: Tissue Value: Roots vs. Whole Plant
  misc_feature: MA Experiment ID: 20000451 Result: Down-regulated in Transcription
  misc_feature: MA Experiment 20000451 PARAMETER Experiment Name: At_CS6879_Shoots-Roots_P Parameter: Age (day) Value: 14
  misc_feature: MA Experiment 20000451 PARAMETER Experiment Name: At_CS6879_Shoots-Roots_P Parameter: Organism Value: A. thaliana
  misc_feature: MA Experiment 20000451 PARAMETER Experiment Name: At_CS6879_Shoots-Roots_P Parameter: Plant Line Value: CS6879 vs. WS
  misc_feature: MA Experiment 20000451 PARAMETER Experiment Name: At_CS6879_Shoots-Roots_P Parameter: Tissue Value: Roots
acaccaaaaaacacagaaacattttgagaaaccaaagaagaagaagaagaagaagaacaagcagaagctaaagaagaagacttgaacttgagagatggagcgcagacagtcatatgtgcttgtcgcgctcattggattgcttctcttgacagatattgtcattgcacagagcgatggcggcaaaggcaacggtaacaatggcaaggggaacgaggtacaagtagacaagggtaaaggagataatggcaaaagtaacggtaacggtccaaaggataaagaacaggagaagaaggacaaggagaaggcagccaaggacaagaaggagaaggagaaaaaggataaggaggaaaaggagaagaaggataaggaaaggaaggaaaaggagaagaaggataaactggaaaaggaaaagaaggataaggaaaggaaggagaaggagaggaaggagaaagagagaaaggcgaaggagaagaaagacaaagaggagagtgaagcagctgcgagatacagaatattatcaccgttgcctacaggacaagagcaggccatgtgccaaggtcggggatcatgttactacaagactcttgtttgccctggtgagtgtcccaagaggaagcccacgaagaacaagaacaccaaaggttgcttcattgactgcactaacaaatgtgaagctacctgcaaatggagaaaaacgaactgcaatggttacggatctctgtgctacgaccctcgatttgtgggaggagacggtgtgatgttctatttccacggatccaaaggaggaaactttgcgattgtttcagacaacaatctccaaattaacgctcacttcatcggtacaagacccgttgggagaaccagagacttcacatgggttcaggccctaaatgtcatgttcgaaaaccacaagctcgtgatcacagccaacagagtgaatcaatgggatgaaacatctgacgcctttaccatcagatatgatggagaactcatcacactccctgaagacgaacaatcagaatggagggaaatttcaggacaaaagaaggatatcatcatcgaaagaactgatgagagaaacagcgtaagagtacttgtctctgatcttgttcagatggacatcagagtgagacctatagggaaagaagagaacagagttcacaactatcagttgccgcaggatgacgcttttgcccatctcgagactcagttcaagttcttagacctaagtgagctcgtcgagggtgttttggggaaaacctaccgtcctgattacgtcagctctgccaagactggagtcccaatgcctgtattgggaggagaagacaaataccaaacgccttctctgttctcgccgacttgcagactgtgcaggttcaagcctcaagaagaatcactttctgctgatatctaatgagaagaaggagaaagatggaaacttctttgatttttaaataaattcatggaaatttcgtgtttgtaactgttttgtttctggaaatattttatattcataaaaagtgatgtaataaaagccaaaaagataacatttggcctgtttgtgatgtttttgagggtttaagaaatgtaaaacatttcttgtgcaagaagcaaccccttgatttcttatcgttcctttgctgtattttgtgtacctatccgtttatcgaacaa

SEQ ID NO: 37036 - protein, 439 aa, Arabidopsis thaliana
  peptide (1)..(439): Ceres Seq. ID no. 12731361
  misc_feature (63)..(157): Pfam Name: Caldesmon Pfam Description: Caldesmon
  misc_feature (136)..(428): Homolog of NCBI NO: 34905930 NR Description: similar to root cap protein
  misc_feature (184)..(428): Homolog of NCBI NO: 7484468 NR Description: late embryonic abundant protein EMB7 - white
  misc_feature (147)..(434): Homolog of NCBI NO: 30685319 NR Description: late embryogenesis abundant protein -related
  misc_feature (147)..(434): Homolog of NCBI NO: 11994465 NR Description: contains similarity to late embryogenesis
  misc_feature (140)..(435): Homolog of NCBI NO: 15221921 NR Description: late embryogenesis protein, putative; protein id:
  misc_feature (150)..(439): Homolog of NCBI NO: 15234120 NR Description: putative protein; protein id: At4g27400.1
  misc_feature (159)..(437): Homolog of NCBI NO: 15239629 NR Description: root cap protein 2-like protein; protein id:
  misc_feature (122)..(429): Homolog of NCBI NO: 15239359 NR Description: late embryonic abundant protein - like; protein
  misc_feature (1)..(439): Homolog of NCBI NO: 15809990 NR Description: AT5g60530/muf9_180 [Arabidopsis thaliana]
  misc_feature (1)..(439): Homolog of NCBI NO: 15239360 NR Description: late embryonic abundant protein - like
MERRQSYVLVALIGLLLLTDIVIAQSDGGKGNGNNGKGNEVQVDKGKGDNGKSNGNGPKDKEQEKKDKEKAAKDKKEKEKKDKEEKEKKDKERKEKEKKDKLEKEKKDKERKEKERKEKERKAKEKKDKEESEAAARYRILSPLPTGQEQAMCQGRGSCYYKTLVCPGECPKRKPTKNKNTKGCFIDCTNKCEATCKWRKTNCNGYGSLCYDPRFVGGDGVMFYFHGSKGGNFAIVSDNNLQINAHFIGTRPVGRTRDFTWVQALNVMFENHKLVITANRVNQWDETSDAFTIRYDGELITLPEDEQSEWREISGQKKDIIIERTDERNSVRVLVSDLVQMDIRVRPIGKEENRVHNYQLPQDDAFAHLETQFKFLDLSELVEGVLGKTYRPDYVSSAKTGVPMPVLGGEDKYQTPSLFSPTCRLCRFKPQEESLSADI

SEQ ID NO: 37037 - protein, 288 aa, Arabidopsis thaliana
  peptide (1)..(288): Ceres Seq. ID no. 12731362
  misc_feature (1)..(277): Homolog of NCBI NO: 34905930 NR Description: similar to root cap protein
  misc_feature (33)..(277): Homolog of NCBI NO: 7484468 NR Description: late embryonic abundant protein EMB7 - white
  misc_feature (1)..(283): Homolog of NCBI NO: 30685319 NR Description: late embryogenesis abundant protein -related
  misc_feature (1)..(283): Homolog of NCBI NO: 11994465 NR Description: contains similarity to late embryogenesis
  misc_feature (1)..(284): Homolog of NCBI NO: 15221921 NR Description: late embryogenesis protein, putative; protein id:
  misc_feature (1)..(288): Homolog of NCBI NO: 15234120 NR Description: putative protein; protein id: At4g27400.1
  misc_feature (8)..(286): Homolog of NCBI NO: 15239629 NR Description: root cap protein 2-like protein; protein id:
  misc_feature (1)..(278): Homolog of NCBI NO: 15239359 NR Description: late embryonic abundant protein - like; protein
  misc_feature (1)..(288): Homolog of NCBI NO: 15809990 NR Description: AT5g60530/muf9_180 [Arabidopsis thaliana]
  misc_feature (1)..(288): Homolog of NCBI NO: 15239360 NR Description: late embryonic abundant protein - like
MCQGRGSCYYKTLVCPGECPKRKPTKNKNTKGCFIDCTNKCEATCKWRKTNCNGYGSLCYDPRFVGGDGVMFYFHGSKGGNFAIVSDNNLQINAHFIGTRPVGRTRDFTWVQALNVMFENHKLVITANRVNQWDETSDAFTIRYDGELITLPEDEQSEWREISGQKKDIIIERTDERNSVRVLVSDLVQMDIRVRPIGKEENRVHNYQLPQDDAFAHLETQFKFLDLSELVEGVLGKTYRPDYVSSAKTGVPMPVLGGEDKYQTPSLFSPTCRLCRFKPQEESLSADI

SEQ ID NO: 37038 - DNA, 861 bp, Arabidopsis thaliana
  misc_feature (1)..(861): Ceres Seq. ID no. 12489501
  misc_feature: MA Experiment ID: 20000179 Result: Up-regulated in Transcription
  misc_feature: MA Experiment 20000179 PARAMETER Experiment Name: At_Germinating_Seeds_P Parameter: Age (hr) Value: 6 vs. 0
  misc_feature: MA Experiment 20000179 PARAMETER Experiment Name: At_Germinating_Seeds_P Parameter: Tissue Value: Germinating Seeds
  misc_feature: MA Experiment ID: 20000180 Result: Up-regulated in Transcription
  misc_feature: MA Experiment 20000180 PARAMETER Experiment Name: At_Germinating_Seeds_P Parameter: Age (hr) Value: 24 vs. 0
  misc_feature: MA Experiment 20000180 PARAMETER Experiment Name: At_Germinating_Seeds_P Parameter: Tissue Value: Germinating Seeds
  misc_feature: MA Experiment ID: 20000184 Result: Up-regulated in Transcription
  misc_feature: MA Experiment 20000184 PARAMETER Experiment Name: At_Shoots__P Parameter: Age (day) Value: 7
  misc_feature: MA Experiment 20000184 PARAMETER Experiment Name: At_Shoots__P Parameter: Tissue Value: Shoots vs. Whole Plant
  misc_feature: MA Experiment ID: 20000234 Result: Down-regulated in Transcription
  misc_feature: MA Experiment 20000234 PARAMETER Experiment Name: At_Siliques_P Parameter: Age (day) Value: 21
  misc_feature: MA Experiment 20000234 PARAMETER Experiment Name: At_Siliques_P Parameter: Organism Value: A. thaliana
  misc_feature: MA Experiment 20000234 PARAMETER Experiment Name: At_Siliques_P Parameter: Plant Line Value: WS
  misc_feature: MA Experiment 20000234 PARAMETER Experiment Name: At_Siliques_P Parameter: Tissue Value: Less Than 5mm Siliques vs. Whole Plant
  misc_feature: MA Experiment ID: 20000235 Result: Down-regulated in Transcription
  misc_feature: MA Experiment 20000235 PARAMETER Experiment Name: At_Siliques_P Parameter: Age (day) Value: 21
  misc_feature: MA Experiment 20000235 PARAMETER Experiment Name: At_Siliques_P Parameter: Organism Value: A. thaliana
  misc_feature: MA Experiment 20000235 PARAMETER Experiment Name: At_Siliques_P Parameter: Plant Line Value: WS
  misc_feature: MA Experiment 20000235 PARAMETER Experiment Name: At_Siliques_P Parameter: Tissue Value: 5-10mm Siliques vs. Whole Plant
  misc_feature: MA Experiment ID: 20000495 Result: Up-regulated in Transcription
  misc_feature: MA Experiment 20000495 PARAMETER Experiment Name: At_Guard_Cells_P Parameter: Harvest Date Value: 8/2/2002
  misc_feature: MA Experiment 20000495 PARAMETER Experiment Name: At_Guard_Cells_P Parameter: Organism Value: A. thaliana
  misc_feature: MA Experiment 20000495 PARAMETER Experiment Name: At_Guard_Cells_P Parameter: Tissue Value: Guard Cells vs. Leaves
  misc_feature: MA Experiment ID: 20000794 Result: Down-regulated in Transcription
  misc_feature: MA Experiment 20000794 PARAMETER Experiment Name: At_Petals_P Parameter: Age (day) Value: 23-25 days
  misc_feature: MA Experiment 20000794 PARAMETER Experiment Name: At_Petals_P Parameter: Plant Line Value: WS
  misc_feature: MA Experiment 20000794 PARAMETER Experiment Name: At_Petals_P Parameter: Tissue Value: Petals vs. Whole plant
  misc_feature: MA Experiment ID: 20001451 Result: Up-regulated in Transcription
  misc_feature: MA Experiment 20001451 PARAMETER Experiment Name: At_Far-red-induction_P Parameter: Age (day) Value: 7
  misc_feature: MA Experiment 20001451 PARAMETER Experiment Name: At_Far-red-induction_P Parameter: Light Value: Far-red vs. White
  misc_feature: MA Experiment 20001451 PARAMETER Experiment Name: At_Far-red-induction_P Parameter: Organism Value: A. thaliana
  misc_feature: MA Experiment 20001451 PARAMETER Experiment Name: At_Far-red-induction_P Parameter: Plant Line Value: Columbia
  misc_feature: MA Experiment 20001451 PARAMETER Experiment Name: At_Far-red-induction_P Parameter: Timepoint (hr) Value: 24
  misc_feature: MA Experiment 20001451 PARAMETER Experiment Name: At_Far-red-induction_P Parameter: Tissue Value: Whole Plant
aacaacgggtccactctgcatctctctctctctctctagatttgatttctttgcgggcttgttaatggcgaacccagggcaatcaaagggatggataaagaaatggacgtctatggcttcatcggtttacttcgtcttgatcttattccagatccctctcttcagagttccatgtagatctggtatgtgttcatcgccaatccatgtgacatcgtctcagttgatttctagtgagatctttcctgttccgatgattaaggctctcttataccctggtgctgtagtcaatggccttgccatcaacatgacatttccaaagtgggaaaatgtgttagatatctacaatctcaccaatgtgaaagaagcttctgcagtgaccgatcttcaacgcctagaggttcttgcagggagctacttttctgtagctggggcgtttgtgggtttgctaaagcctggaaggatgagcatgtttgggtcattgctactagtatggggtcttgttaaagaagggatcttagggaagccagtaaatactgacccagccaaaactgtttatgtgtacccaactatggtgcttgcgatgatctgcgctttctctatgataaagtatgacttgaggaaagccacgagggcagctccagctcgtcccattgctaaacctctaatgagctcttcaaaatctaagctgaagtgagttttttgagacttaatagggcttgtgtcctgtctttgtaccaacacccgggaaaggaaaatgtcccggaaaatggcattgtcactatattttgctctcagttaccttatgtttcatgaattgtctattttctaggacactgctcagtagtcaatatcttccaatat

SEQ ID NO: 37039 - protein, 230 aa, Arabidopsis thaliana
  peptide (1)..(230): Ceres Seq. ID no. 12489502
  misc_feature (56)..(219): Homolog of NCBI NO: 15220078 NR Description: hypothetical protein; protein id: At1g80200.1
  misc_feature (34)..(230): Homolog of NCBI NO: 34913974 NR Description: B1110C07.25 [Oryza sativa (japonica
  misc_feature (22)..(54): Homolog of NCBI NO: 8953390 NR Description: putative protein [Arabidopsis thaliana]
  misc_feature (77)..(230): Homolog of NCBI NO: 8953390 NR Description: putative protein [Arabidopsis thaliana]
  misc_feature (22)..(230): Homolog of NCBI NO: 17064978 NR Description: putative protein [Arabidopsis thaliana]
  misc_feature (22)..(230): Homolog of NCBI NO: 18416514 NR Description: putative protein
TTGPLCISLSLSRFDFFAGLLMANPGQSKGWIKKWTSMASSVYFVLILFQIPLFRVPCRSGMCSSPIHVTSSQLISSEIFPVPMIKALLYPGAVVNGLAINMTFPKWENVLDIYNLTNVKEASAVTDLQRLEVLAGSYFSVAGAFVGLLKPGRMSMFGSLLLVWGLVKEGILGKPVNTDPAKTVYVYPTMVLAMICAFSMIKYDLRKATRAAPARPIAKPLMSSSKSKLK

SEQ ID NO: 37040 - protein, 209 aa, Arabidopsis thaliana
  peptide (1)..(209): Ceres Seq. ID no. 12489503
  misc_feature (35)..(198): Homolog of NCBI NO: 15220078 NR Description: hypothetical protein; protein id: At1g80200.1
  misc_feature (13)..(209): Homolog of NCBI NO: 34913974 NR Description: B1110C07.25 [Oryza sativa (japonica
  misc_feature (1)..(33): Homolog of NCBI NO: 8953390 NR Description: putative protein [Arabidopsis thaliana]
  misc_feature (56)..(209): Homolog of NCBI NO: 8953390 NR Description: putative protein [Arabidopsis thaliana]
  misc_feature (1)..(209): Homolog of NCBI NO: 17064978 NR Description: putative protein [Arabidopsis thaliana]
  misc_feature (1)..(209): Homolog of NCBI NO: 18416514 NR Description: putative protein
MANPGQSKGWIKKWTSMASSVYFVLILFQIPLFRVPCRSGMCSSPIHVTSSQLISSEIFPVPMIKALLYPGAVVNGLAINMTFPKWENVLDIYNLTNVKEASAVTDLQRLEVLAGSYFSVAGAFVGLLKPGRMSMFGSLLLVWGLVKEGILGKPVNTDPAKTVYVYPTMVLAMICAFSMIKYDLRKATRAAPARPIAKPLMSSSKSKLK

SEQ ID NO: 37041 - protein, 193 aa, Arabidopsis thaliana
  peptide (1)..(193): Ceres Seq. ID no. 12489504
  misc_feature (19)..(182): Homolog of NCBI NO: 15220078 NR Description: hypothetical protein; protein id: At1g80200.1
  misc_feature (1)..(193): Homolog of NCBI NO: 34913974 NR Description: B1110C07.25 [Oryza sativa (japonica
  misc_feature (1)..(17): Homolog of NCBI NO: 8953390 NR Description: putative protein [Arabidopsis thaliana]
  misc_feature (40)..(193): Homolog of NCBI NO: 8953390 NR Description: putative protein [Arabidopsis thaliana]
  misc_feature (1)..(193): Homolog of NCBI NO: 17064978 NR Description: putative protein [Arabidopsis thaliana]
  misc_feature (1)..(193): Homolog of NCBI NO: 18416514 NR Description: putative protein
MASSVYFVLILFQIPLFRVPCRSGMCSSPIHVTSSQLISSEIFPVPMIKALLYPGAVVNGLAINMTFPKWENVLDIYNLTNVKEASAVTDLQRLEVLAGSYFSVAGAFVGLLKPGRMSMFGSLLLVWGLVKEGILGKPVNTDPAKTVYVYPTMVLAMICAFSMIKYDLRKATRAAPARPIAKPLMSSSKSKLK

SEQ ID NO: 37042 - DNA, 1057 bp, Arabidopsis thaliana
  misc_feature (1)..(1057): Ceres Seq. ID no. 12558683
agtgaattcgtctgagaaaacaaaagaaatcgaacgaagagtgtgtgcacttgaggatcgaattaaggtgagaacaaagaagagagaagaatcgaaatagcaaatctcttgatggtcttgatgatcattaaaggtatatttcggagatatgaaaaatggaatcctgtgcatcctacttatggagcattttggggaatggggattgggattggttgtggcgtcggatggggacctggttttggccctgaggtcattggttatgtcggtgctggctgcggtgttggttttagtgttggtataacacttgctggtctcggcattggtcttcccacaaattttcttcttgcagctccttataacactgtggaagcaactagaaagggtgcttttaatttctttggtaaaaacctctcaaccaatggttggagtgatttgatgcctcaaatcgcggggttgcagagacaagtcagtgagatatgctctggttttaacaagaagcctcatttaaataatgccattgacctaaaaagttttcctttgttcatttcacatgattgtggcaaatttggaagtcatcttctccatgtgcgcaaaggttcggaggacaataaatcatcagctatgtaatgctacccaccacgaggatcttaagcatctgagacgcatttcgagatagttactttgatggaatttgtgaatgtgactgaaatattcagcacaaatcagaacatggttcctgtcttgtttggagaagcactatgaaccaaacctgaagcccttgtgatttagagttacagagatacattaaaagggttcgggatttcacagtagcattcatagacagttcaggttagttaaacgtgcttcacaaaaagaaaaaaaacagaagtgtagttgaggtcacaccacaggtttatgctttgctcttaatcaaatatttatctttctcttttttgttatttgtcctttttaattccatttgctttattccttacttgtggggattaaatgtttgcagagaaagataattcgactgaataaatacacttttacctgt

SEQ ID NO: 37043 - protein, 171 aa, Arabidopsis thaliana
  peptide (1)..(171): Ceres Seq. ID no. 12558684
  misc_feature (4)..(138): Homolog of NCBI NO: 34899622 NR Description: cadmium-induced protein-like
  misc_feature (1)..(171): Homolog of NCBI NO: 15234117 NR Description: cadmium-induced protein
  misc_feature (4)..(138): Homolog of NCBI NO: 34899622 NR Description: cadmium-induced protein-like
  misc_feature (1)..(171): Homolog of NCBI NO: 15234117 NR Description: cadmium-induced protein
MVLMIIKGIFRRYEKWNPVHPTYGAFWGMGIGIGCGVGWGPGFGPEVIGYVGAGCGVGFSVGITLAGLGIGLPTNFLLAAPYNTVEATRKGAFNFFGKNLSTNGWSDLMPQIAGLQRQVSEICSGFNKKPHLNNAIDLKSFPLFISHDCGKFGSHLLHVRKGSEDNKSSAM

SEQ ID NO: 37044 - protein, 168 aa, Arabidopsis thaliana
  peptide (1)..(168): Ceres Seq. ID no. 12558685
  misc_feature (1)..(135): Homolog of NCBI NO: 34899622 NR Description: cadmium-induced protein-like
  misc_feature (1)..(168): Homolog of NCBI NO: 15234117 NR Description: cadmium-induced protein
  misc_feature (1)..(135): Homolog of NCBI NO: 34899622 NR Description: cadmium-induced protein-like
  misc_feature (1)..(168): Homolog of NCBI NO: 15234117 NR Description: cadmium-induced protein
MIIKGIFRRYEKWNPVHPTYGAFWGMGIGIGCGVGWGPGFGPEVIGYVGAGCGVGFSVGITLAGLGIGLPTNFLLAAPYNTVEATRKGAFNFFGKNLSTNGWSDLMPQIAGLQRQVSEICSGFNKKPHLNNAIDLKSFPLFISHDCGKFGSHLLHVRKGSEDNKSSAM

SEQ ID NO: 37045 - protein, 143 aa, Arabidopsis thaliana
  peptide (1)..(143): Ceres Seq. ID no. 12558686
  misc_feature (1)..(110): Homolog of NCBI NO: 34899622 NR Description: cadmium-induced protein-like
  misc_feature (1)..(143): Homolog of NCBI NO: 15234117 NR Description: cadmium-induced protein
  misc_feature (1)..(110): Homolog of NCBI NO: 34899622 NR Description: cadmium-induced protein-like
  misc_feature (1)..(143): Homolog of NCBI NO: 15234117 NR Description: cadmium-induced protein
MGIGIGCGVGWGPGFGPEVIGYVGAGCGVGFSVGITLAGLGIGLPTNFLLAAPYNTVEATRKGAFNFFGKNLSTNGWSDLMPQIAGLQRQVSEICSGFNKKPHLNNAIDLKSFPLFISHDCGKFGSHLLHVRKGSEDNKSSAM

SEQ ID NO: 37046 - DNA, 1393 bp, Arabidopsis thaliana
  misc_feature (1)..(1393): Ceres Seq. ID no. 13499692
  misc_feature: MA Experiment ID: 108434 Result: Down-regulated in Transcription
  misc_feature: MA Experiment 108434 PARAMETER Experiment Name: At_Root_Tips_cDNA_P Parameter: Tissue Value: Root Tips
  misc_feature: MA Experiment ID: 108577 Result: Down-regulated in Transcription
  misc_feature: MA Experiment 108577 PARAMETER Experiment Name: At_42deg_Heat_cDNA_P Parameter: Temperature (deg C) Value: 42 vs. 22
  misc_feature: MA Experiment 108577 PARAMETER Experiment Name: At_42deg_Heat_cDNA_P Parameter: Timepoint (hr) Value: 6
  misc_feature: MA Experiment 108577 PARAMETER Experiment Name: At_42deg_Heat_cDNA_P Parameter: Tissue Value: Aerial
  misc_feature: MA Experiment ID: 20000111 Result: Down-regulated in Transcription
  misc_feature: MA Experiment 20000111 PARAMETER Experiment Name: At_42deg_Heat_cDNA_P Parameter: Temperature (deg C) Value: 42 vs. 22
  misc_feature: MA Experiment 20000111 PARAMETER Experiment Name: At_42deg_Heat_cDNA_P Parameter: Timepoint (hr) Value: 6
  misc_feature: MA Experiment 20000111 PARAMETER Experiment Name: At_42deg_Heat_cDNA_P Parameter: Tissue Value: Aerial
  misc_feature: MA Experiment ID: 20000113 Result: Down-regulated in Transcription
  misc_feature: MA Experiment 20000113 PARAMETER Experiment Name: At_42deg_Heat_cDNA_P Parameter: Temperature (deg C) Value: 42 vs. 22
  misc_feature: MA Experiment 20000113 PARAMETER Experiment Name: At_42deg_Heat_cDNA_P Parameter: Timepoint (hr) Value: 8
  misc_feature: MA Experiment 20000113 PARAMETER Experiment Name: At_42deg_Heat_cDNA_P Parameter: Tissue Value: Aerial
  misc_feature: MA Experiment ID: 20000264 Result: Down-regulated in Transcription
  misc_feature: MA Experiment 20000264 PARAMETER Experiment Name: At_Open_Flower_P Parameter: Age (day) Value: 21
  misc_feature: MA Experiment 20000264 PARAMETER Experiment Name: At_Open_Flower_P Parameter: Plant Line Value: WS
  misc_feature: MA Experiment 20000264 PARAMETER Experiment Name: At_Open_Flower_P Parameter: Tissue Value: Open Flower vs. Whole Plant
  misc_feature: MA Experiment ID: 20000265 Result: Down-regulated in Transcription
  misc_feature: MA Experiment 20000265 PARAMETER Experiment Name: At_Open_Flower_P Parameter: Age (day) Value: 21
  misc_feature: MA Experiment 20000265 PARAMETER Experiment Name: At_Open_Flower_P Parameter: Plant Line Value: WS
  misc_feature: MA Experiment 20000265 PARAMETER Experiment Name: At_Open_Flower_P Parameter: Tissue Value: Closed Flower vs. Whole Plant
  misc_feature: MA Experiment ID: 20000286 Result: Down-regulated in Transcription
  misc_feature: MA Experiment 20000286 PARAMETER Experiment Name: At_Open_Flower_P Parameter: Age (day) Value: 21
  misc_feature: MA Experiment 20000286 PARAMETER Experiment Name: At_Open_Flower_P Parameter: Plant Line Value: WS
  misc_feature: MA Experiment 20000286 PARAMETER Experiment Name: At_Open_Flower_P Parameter: Tissue Value: Half Open vs. Whole Plant
  misc_feature: MA Experiment ID: 20000438 Result: Down-regulated in Transcription
  misc_feature: MA Experiment 20000438 PARAMETER Experiment Name: At_Shoots__P Parameter: Age (day) Value: 14
  misc_feature: MA Experiment 20000438 PARAMETER Experiment Name: At_Shoots__P Parameter: Tissue Value: Shoots vs. Whole Plant
  misc_feature: MA Experiment ID: 20001451 Result: Up-regulated in Transcription
  misc_feature: MA Experiment 20001451 PARAMETER Experiment Name: At_Far-red-induction_P Parameter: Age (day) Value: 7
  misc_feature: MA Experiment 20001451 PARAMETER Experiment Name: At_Far-red-induction_P Parameter: Light Value: Far-red vs. White
  misc_feature: MA Experiment 20001451 PARAMETER Experiment Name: At_Far-red-induction_P Parameter: Organism Value: A. thaliana
  misc_feature: MA Experiment 20001451 PARAMETER Experiment Name: At_Far-red-induction_P Parameter: Plant Line Value: Columbia
  misc_feature: MA Experiment 20001451 PARAMETER Experiment Name: At_Far-red-induction_P Parameter: Timepoint (hr) Value: 24
  misc_feature: MA Experiment 20001451 PARAMETER Experiment Name: At_Far-red-induction_P Parameter: Tissue Value: Whole Plant
  misc_feature: MA Experiment ID: 20001557 Result: Up-regulated in Transcription
  misc_feature: MA Experiment 20001557 PARAMETER Experiment Name: At_Drought_Soil_Dry_P Parameter: Age (day) Value: 27
  misc_feature: MA Experiment 20001557 PARAMETER Experiment Name: At_Drought_Soil_Dry_P Parameter: Organism Value: A. thaliana
  misc_feature: MA Experiment 20001557 PARAMETER Experiment Name: At_Drought_Soil_Dry_P Parameter: Plant Line Value: WS
  misc_feature: MA Experiment 20001557 PARAMETER Experiment Name: At_Drought_Soil_Dry_P Parameter: Post Timepoint (hr) Value: 3
  misc_feature: MA Experiment 20001557 PARAMETER Experiment Name: At_Drought_Soil_Dry_P Parameter: Post-Treatment Value: Re-Water vs. No Drought
  misc_feature: MA Experiment 20001557 PARAMETER Experiment Name: At_Drought_Soil_Dry_P Parameter: Timepoint (day) Value: 13
  misc_feature: MA Experiment 20001557 PARAMETER Experiment Name: At_Drought_Soil_Dry_P Parameter: Treatment Value: Drought vs. No Drought
  misc_feature: MA Experiment ID: 20001911 Result: Down-regulated in Transcription
  misc_feature: MA Experiment 20001911 PARAMETER Experiment Name: At_Drought_Reproduction_P Parameter: Age (day) Value: 40
  misc_feature: MA Experiment 20001911 PARAMETER Experiment Name: At_Drought_Reproduction_P Parameter: Organism Value: A. thaliana
  misc_feature: MA Experiment 20001911 PARAMETER Experiment Name: At_Drought_Reproduction_P Parameter: Plant Line Value: WS
  misc_feature: MA Experiment 20001911 PARAMETER Experiment Name: At_Drought_Reproduction_P Parameter: Timepoint (day) Value: 10
  misc_feature: MA Experiment 20001911 PARAMETER Experiment Name: At_Drought_Reproduction_P Parameter: Tissue Value: Flowers
  misc_feature: MA Experiment 20001911 PARAMETER Experiment Name: At_Drought_Reproduction_P Parameter: Treatment Value: Drought vs. No Drought
cccaaatacaaaactcccgaaaatctctctcttttattctttctttcttcttcttcttccccaacttgaaaaaaaaaagtaaacacgaaaatgtctccgtcttggctccgcccaaccgccgatcacaatcatcctccaccgcaaccgccgtcgcaatcaccgtcccctctatcttccggtgatccgaatctcacaacatgtctctaccaaacagatcacggcgtcttctatctaacatggtcccgaactttcttaggaggccactctgtgaatctcttcctccattcacaagattactacaaccactcttcgccactctctttctcctccgctgatctctctctttcctccgccgtctctttccatctcaacttaaacacattagctttctggaaaaaacgtggatccagattcgtttctcccaaaatccaagtcttctgggacttaagcaaagccaaattcgactctggatccgaacctagatccggattctacatcgctgtagttgttgacggagagatgggactattagtcggagattcagtcaaagaagcttacgctcgtgctaaatcggcgaaacctccgacgaatccgcaagctcttctgttgaggaaagagcacgtgtttggagctagggttttcacaacgaaagcgagatttggagggaagaacagagagatttctattgattgtcgtgttgatgaagacgctaagctctgttttagcgttgattcgaaacaggttctgcagatcaagagacttagatggaaatttagaggaaatgagaaagttgaaatcgatggagttcatgttcagatctcttgggatgtatacaattggttgtttcagagtaaaagttccggtgacggcggaggaggaggaggacacgccgtgtttatgtttagattcgagagtgatccagaagcagaggaggtttgtgaaacgaagaggaaagaagaagaagatgagaaaaatcgaaacggtatcgttttatggaagccgaagaagcaatgtggaaatagttttgggattaaagggattgttgagtggaggaagatgaggaagagatttgttaagagtaagagaagttcttcgtcgtcttcgatttcgatgtcgtcggcttcttcggcgtgtagctcgtcggttatggaatgggctagtagtgctgatgaggcggagtacggcggaggaggttgttctggttccggttccggcaatggtcttggattctcattactggtttacgcttggattaagtgaaaatattctttttcgagggaaataagaagttactgttttcggttaatttttttttttaatatgttcttctttcttttttatattaattttccctctgaaatcacgtacggacgagaagatataaaaatnntgg

SEQ ID NO: 37047 - protein, 389 aa, Arabidopsis thaliana
  peptide (1)..(389): Ceres Seq. ID no. 13499693
  misc_feature (28)..(389): Pfam Name: Plant protein of unknown function (DUF868) Pfam Description: Plant protein of unknown function (DUF868)
  misc_feature (93)..(272): Homolog of NCBI NO: 25334990 NR Description: hypothetical protein At2g04220 [imported] -
  misc_feature (36)..(272): Homolog of NCBI NO: 15228105 NR Description: hypothetical protein [Arabidopsis thaliana]
  misc_feature (52)..(254): Homolog of NCBI NO: 14719318 NR Description: hypothetical protein [Oryza sativa]
  misc_feature (36)..(286): Homolog of NCBI NO: 15235452 NR Description: expressed protein [Arabidopsis thaliana]
  misc_feature (100)..(272): Homolog of NCBI NO: 21593854 NR Description: unknown [Arabidopsis thaliana]
  misc_feature (100)..(272): Homolog of NCBI NO: 18397034 NR Description: expressed protein [Arabidopsis thaliana]
  misc_feature (21)..(272): Homolog of NCBI NO: 15241702 NR Description: expressed protein [Arabidopsis thaliana]
  misc_feature (21)..(278): Homolog of NCBI NO: 30102999 NR Description: hypothetical protein [Oryza sativa (japonica
  misc_feature (9)..(339): Homolog of NCBI NO: 30682687 NR Description: expressed protein [Arabidopsis thaliana]
  misc_feature (1)..(389): Homolog of NCBI NO: 15238921 NR Description: expressed protein [Arabidopsis thaliana]
MSPSWLRPTADHNHPPPQPPSQSPSPLSSGDPNLTTCLYQTDHGVFYLTWSRTFLGGHSVNLFLHSQDYYNHSSPLSFSSADLSLSSAVSFHLNLNTLAFWKKRGSRFVSPKIQVFWDLSKAKFDSGSEPRSGFYIAVVVDGEMGLLVGDSVKEAYARAKSAKPPTNPQALLLRKEHVFGARVFTTKARFGGKNREISIDCRVDEDAKLCFSVDSKQVLQIKRLRWKFRGNEKVEIDGVHVQISWDVYNWLFQSKSSGDGGGGGGHAVFMFRFESDPEAEEVCETKRKEEEDEKNRNGIVLWKPKKQCGNSFGIKGIVEWRKMRKRFVKSKRSSSSSSISMSSASSACSSSVMEWASSADEAEYGGGGCSGSGSGNGLGFSLLVYAWIK

SEQ ID NO: 37048 - protein, 246 aa, Arabidopsis thaliana
  peptide (1)..(246): Ceres Seq. ID no. 13499694
  misc_feature (1)..(246): Pfam Name: Plant protein of unknown function (DUF868) Pfam Description: Plant protein of unknown function (DUF868)
  misc_feature (1)..(129): Homolog of NCBI NO: 25334990 NR Description: hypothetical protein At2g04220 [imported] -
  misc_feature (1)..(129): Homolog of NCBI NO: 15228105 NR Description: hypothetical protein [Arabidopsis thaliana]
  misc_feature (1)..(111): Homolog of NCBI NO: 14719318 NR Description: hypothetical protein [Oryza sativa]
  misc_feature (1)..(143): Homolog of NCBI NO: 15235452 NR Description: expressed protein [Arabidopsis thaliana]
  misc_feature (1)..(129): Homolog of NCBI NO: 21593854 NR Description: unknown [Arabidopsis thaliana]
  misc_feature (1)..(129): Homolog of NCBI NO: 18397034 NR Description: expressed protein [Arabidopsis thaliana]
  misc_feature (1)..(129): Homolog of NCBI NO: 15241702 NR Description: expressed protein [Arabidopsis thaliana]
  misc_feature (1)..(135): Homolog of NCBI NO: 30102999 NR Description: hypothetical protein [Oryza sativa (japonica
  misc_feature (1)..(196): Homolog of NCBI NO: 30682687 NR Description: expressed protein [Arabidopsis thaliana]
  misc_feature (1)..(246): Homolog of NCBI NO: 15238921 NR Description: expressed protein [Arabidopsis thaliana]
MGLLVGDSVKEAYARAKSAKPPTNPQALLLRKEHVFGARVFTTKARFGGKNREISIDCRVDEDAKLCFSVDSKQVLQIKRLRWKFRGNEKVEIDGVHVQISWDVYNWLFQSKSSGDGGGGGGHAVFMFRFESDPEAEEVCETKRKEEEDEKNRNGIVLWKPKKQCGNSFGIKGIVEWRKMRKRFVKSKRSSSSSSISMSSASSACSSSVMEWASSADEAEYGGGGCSGSGSGNGLGFSLLVYAWIK

SEQ ID NO: 37049 - DNA, 1353 bp, Arabidopsis thaliana
  misc_feature (1)..(1353): Ceres Seq. ID no. 13600835
  misc_feature: MA Experiment ID: 20000171 Result: Up-regulated in Transcription
  misc_feature: MA Experiment 20000171 PARAMETER Experiment Name: At_42deg_Heat_P Parameter: Age (day) Value: 14
  misc_feature: MA Experiment 20000171 PARAMETER Experiment Name: At_42deg_Heat_P Parameter: Organism Value: A. thaliana
  misc_feature: MA Experiment 20000171 PARAMETER Experiment Name: At_42deg_Heat_P Parameter: Plant Line Value: WS
  misc_feature: MA Experiment 20000171 PARAMETER Experiment Name: At_42deg_Heat_P Parameter: Temperature (deg C) Value: 42 vs. 22
  misc_feature: MA Experiment 20000171 PARAMETER Experiment Name: At_42deg_Heat_P Parameter: Timepoint (hr) Value: 1
  misc_feature: MA Experiment 20000171 PARAMETER Experiment Name: At_42deg_Heat_P Parameter: Tissue Value: Aerial
  misc_feature: MA Experiment ID: 20000173 Result: Up-regulated in Transcription
  misc_feature: MA Experiment 20000173 PARAMETER Experiment Name: At_42deg_Heat_P Parameter: Age (day) Value: 14
  misc_feature: MA Experiment 20000173 PARAMETER Experiment Name: At_42deg_Heat_P Parameter: Organism Value: A. thaliana
  misc_feature: MA Experiment 20000173 PARAMETER Experiment Name: At_42deg_Heat_P Parameter: Plant Line Value: WS
  misc_feature: MA Experiment 20000173 PARAMETER Experiment Name: At_42deg_Heat_P Parameter: Temperature (deg C) Value: 42 vs. 22
  misc_feature: MA Experiment 20000173 PARAMETER Experiment Name: At_42deg_Heat_P Parameter: Timepoint (hr) Value: 6
  misc_feature: MA Experiment 20000173 PARAMETER Experiment Name: At_42deg_Heat_P Parameter: Tissue Value: Aerial
  misc_feature: MA Experiment ID: 20000180 Result: Down-regulated in Transcription
  misc_feature: MA Experiment 20000180 PARAMETER Experiment Name: At_Germinating_Seeds_P Parameter: Age (hr) Value: 24 vs. 0
  misc_feature: MA Experiment 20000180 PARAMETER Experiment Name: At_Germinating_Seeds_P Parameter: Tissue Value: Germinating Seeds
  misc_feature: MA Experiment ID: 20001247 Result: Down-regulated in Transcription
  misc_feature: MA Experiment 20001247 PARAMETER Experiment Name: At_Far-red-induction_P Parameter: Age (day) Value: 7
  misc_feature: MA Experiment 20001247 PARAMETER Experiment Name: At_Far-red-induction_P Parameter: Light Value: Far-red vs. White
  misc_feature: MA Experiment 20001247 PARAMETER Experiment Name: At_Far-red-induction_P Parameter: Organism Value: A. thaliana
  misc_feature: MA Experiment 20001247 PARAMETER Experiment Name: At_Far-red-induction_P Parameter: Plant Line Value: Columbia
  misc_feature: MA Experiment 20001247 PARAMETER Experiment Name: At_Far-red-induction_P Parameter: Timepoint (hr) Value: 1
  misc_feature: MA Experiment 20001247 PARAMETER Experiment Name: At_Far-red-induction_P Parameter: Tissue Value: Whole Plant
  misc_feature: MA Experiment ID: 20001556 Result: Up-regulated in Transcription
  misc_feature: MA Experiment 20001556 PARAMETER Experiment Name: At_Drought_Soil_Dry_P Parameter: Age (day) Value: 26
  misc_feature: MA Experiment 20001556 PARAMETER Experiment Name: At_Drought_Soil_Dry_P Parameter: Organism Value: A. thaliana
  misc_feature: MA Experiment 20001556 PARAMETER Experiment Name: At_Drought_Soil_Dry_P Parameter: Plant Line Value: WS
  misc_feature: MA Experiment 20001556 PARAMETER Experiment Name: At_Drought_Soil_Dry_P Parameter: Post Timepoint (hr) Value: None
  misc_feature: MA Experiment 20001556 PARAMETER Experiment Name: At_Drought_Soil_Dry_P Parameter: Post-Treatment Value: None
  misc_feature: MA Experiment 20001556 PARAMETER Experiment Name: At_Drought_Soil_Dry_P Parameter: Timepoint (day) Value: 12
  misc_feature: MA Experiment 20001556 PARAMETER Experiment Name: At_Drought_Soil_Dry_P Parameter: Treatment Value: Drought vs. No Drought
  misc_feature: MA Experiment ID: 20001558 Result: Up-regulated in Transcription
  misc_feature: MA Experiment 20001558 PARAMETER Experiment Name: At_Drought_Soil_Dry_P Parameter: Age (day) Value: 27
  misc_feature: MA Experiment 20001558 PARAMETER Experiment Name: At_Drought_Soil_Dry_P Parameter: Organism Value: A. thaliana
  misc_feature: MA Experiment 20001558 PARAMETER Experiment Name: At_Drought_Soil_Dry_P Parameter: Plant Line Value: WS
  misc_feature: MA Experiment 20001558 PARAMETER Experiment Name: At_Drought_Soil_Dry_P Parameter: Post Timepoint (hr) Value: 6
  misc_feature: MA Experiment 20001558 PARAMETER Experiment Name: At_Drought_Soil_Dry_P Parameter: Post-Treatment Value: Re-Water vs. No Drought
  misc_feature: MA Experiment 20001558 PARAMETER Experiment Name: At_Drought_Soil_Dry_P Parameter: Timepoint (day) Value: 13
  misc_feature: MA Experiment 20001558 PARAMETER Experiment Name: At_Drought_Soil_Dry_P Parameter: Treatment Value: Drought vs. No Drought
  misc_feature: MA Experiment ID: 20001757 Result: Up-regulated in Transcription
  misc_feature: MA Experiment 20001757 PARAMETER Experiment Name: At_50mM_NH4NO3_L-to-H_P Parameter: Timepoint (hr) Value: 6
  misc_feature: MA Experiment 20001757 PARAMETER Experiment Name: At_50mM_NH4NO3_L-to-H_P Parameter: Tissue Value: Leaf
  misc_feature: MA Experiment 20001757 PARAMETER Experiment Name: At_50mM_NH4NO3_L-to-H_P Parameter: Treatment Value: 50mM NH4NO3 vs 100mM Mannitol
aatttcatttctccaaagctttccagaatactctccactccttcatcatttctctggcaacgatggctatgatatctcaccgtctccgacgagctttactcactgcgacttcctatgttaaccgatcaattagctcttcgatcacaccagcgtctgatttcccttctgtgtcggcggcggtgttaaagagatccgttatagggcgttcgacggaagtagctactcgagcaccggcgagactgttttcaacgaggcagtacaagctttacaaagaaggtgatgagatcacggaagacactgtgttgttcgaaggatgtgattataatcactggcttatcactatggatttctccaaagaggaaactcctaagtctccagaagaaatggtcgctgcttatgaagaaacttgcgcccaaggacttggcatcagcgtggaagaggctaagcaaaggatgtatgcttgtagcacaactacttaccaaggatttcaagcaatcatgactgaacaagaatcagaaaagttcaaggatctacccggagtggttttcatcttgccagattcctacattgatccccagaacaaagagtatggaggagataaatacgagaatggagtgataacacacaggccaccaccgattcagagtggcagagcaagacctcgtcctagatttgaccgttcaggaggaggaagtggtggtccccaaaacttccaaagaaacacacagtatggtcagcaaccaccaatgcaaggtggtggagggagctatggtcctcaacagggctatgccactccaggacaaggtcagggaactcaagcgcctccaccatttcaaggaggttataaccaaggcccgagatctccaccacctccatatcaggcaggttacaatcaaggccagggatctccagtgcctccatatcaggcaggttacaatcaagtccagggatctccagtgcctccataccaaggaacacaaagcagttacggtcaaggtggatctgggaactatagtcaagggccacaaggtggttacaaccaaggaggacctaggaattacaatccacagggagctggaaactttggtcctgcatctggagctggaaacttaggtcctgcacctggagctggaaatcctggctatggtcaggggtattctggaccaggacaagagcagaatcagacattcccacaggcagatcagaggaatcgagactggaacaacaataatccagcaggccagcccgggtctgaccaagtaagatctcgatcaataatgaatcttgcatctttcttttttgatatcctcatcaggcattaaagtaccccattttccccatatttgttactga

SEQ ID NO: 37050 - protein, 439 aa, Arabidopsis thaliana
  peptide (1)..(439): Ceres Seq. ID no. 13600836
  misc_feature (211)..(419): Pfam Name: High molecular weight glutenin subunit Pfam Description: High molecular weight glutenin subunit
  misc_feature (211)..(419): Pfam Name: High molecular weight glutenin subunit Pfam Description: High molecular weight glutenin subunit
  misc_feature (21)..(226): Homolog of NCBI NO: 15230785 NR Description: DAG protein -related [Arabidopsis thaliana]
  misc_feature (21)..(226): Homolog of NCBI NO: 27754695 NR Description: putative DAG protein [Arabidopsis thaliana]
  misc_feature (21)..(219): Homolog of NCBI NO: 6014904 NR Description: DAG PROTEIN, CHLOROPLAST PRECURSOR
  misc_feature (20)..(247): Homolog of NCBI NO: 15220382 NR Description: DAG protein -related [Arabidopsis thaliana]
  misc_feature (44)..(230): Homolog of NCBI NO: 38636775 NR Description: putative DAG protein [Oryza sativa (japonica
  misc_feature (21)..(226): Homolog of NCBI NO: 15230785 NR Description: DAG protein -related [Arabidopsis thaliana]
  misc_feature (21)..(219): Homolog of NCBI NO: 6014904 NR Description: DAG PROTEIN, CHLOROPLAST PRECURSOR
  misc_feature (44)..(230): Homolog of NCBI NO: 38636775 NR Description: putative DAG protein [Oryza sativa (japonica
  misc_feature (21)..(439): Homolog of NCBI NO: 15235263 NR Description: putative DAG protein [Arabidopsis thaliana]
  misc_feature (249)..(419): Homolog of NCBI NO: 19310564 NR Description: putative DAG protein [Arabidopsis thaliana]
  misc_feature (21)..(394): Homolog of NCBI NO: 15241580 NR Description: expressed protein [Arabidopsis thaliana]
  misc_feature (97)..(409): Homolog of NCBI NO: 18400602 NR Description: expressed protein [Arabidopsis thaliana]
  misc_feature (20)..(247): Homolog of NCBI NO: 21593052 NR Description: DAG protein, putative [Arabidopsis thaliana]
  misc_feature (20)..(247): Homolog of NCBI NO: 15220382 NR Description: DAG protein -related [Arabidopsis thaliana]
  misc_feature (21)..(226): Homolog of NCBI NO: 27754695 NR Description: putative DAG protein [Arabidopsis thaliana]
  misc_feature (20)..(247): Homolog of NCBI NO: 21593052 NR Description: DAG protein, putative [Arabidopsis thaliana]
  misc_feature (97)..(409): Homolog of NCBI NO: 18400602 NR Description: expressed protein [Arabidopsis thaliana]
  misc_feature (21)..(394): Homolog of NCBI NO: 15241580 NR Description: expressed protein [Arabidopsis thaliana]
  misc_feature (249)..(419): Homolog of NCBI NO: 19310564 NR Description: putative DAG protein [Arabidopsis thaliana]
  misc_feature (21)..(439): Homolog of NCBI NO: 15235263 NR Description: putative DAG protein [Arabidopsis thaliana]
FHFSKAFQNTLHSFIISLATMAMISHRLRRALLTATSYVNRSISSSITPASDFPSVSAAVLKRSVIGRSTEVATRAPARLFSTRQYKLYKEGDEITEDTVLFEGCDYNHWLITMDFSKEETPKSPEEMVAAYEETCAQGLGISVEEAKQRMYACSTTTYQGFQAIMTEQESEKFKDLPGVVFILPDSYIDPQNKEYGGDKYENGVITHRPPPIQSGRARPRPRFDRSGGGSGGPQNFQRNTQYGQQPPMQGGGGSYGPQQGYATPGQGQGTQAPPPFQGGYNQGPRSPPPPYQAGYNQGQGSPVPPYQAGYNQVQGSPVPPYQGTQSSYGQGGSGNYSQGPQGGYNQGGPRNYNPQGAGNFGPASGAGNLGPAPGAGNPGYGQGYSGPGQEQNQTFPQADQRNRDWNNNNPAGQPGSDQVRSRSIMNLASFFFDILIRH

SEQ ID NO: 37051 - protein, 419 aa, Arabidopsis thaliana
  peptide (1)..(419): Ceres Seq. ID no. 13600837
  misc_feature (191)..(399): Pfam Name: High molecular weight glutenin subunit Pfam Description: High molecular weight glutenin subunit
  misc_feature (191)..(399): Pfam Name: High molecular weight glutenin subunit Pfam Description: High molecular weight glutenin subunit
  misc_feature (1)..(206): Homolog of NCBI NO: 15230785 NR Description: DAG protein -related [Arabidopsis thaliana]
  misc_feature (1)..(206): Homolog of NCBI NO: 27754695 NR Description: putative DAG protein [Arabidopsis thaliana]
  misc_feature (1)..(199): Homolog of NCBI NO: 6014904 NR Description: DAG PROTEIN, CHLOROPLAST PRECURSOR
  misc_feature (1)..(227): Homolog of NCBI NO: 15220382 NR Description: DAG protein -related [Arabidopsis thaliana]
  misc_feature (24)..(210): Homolog of NCBI NO: 38636775 NR Description: putative DAG protein [Oryza sativa (japonica
  misc_feature (1)..(206): Homolog of NCBI NO: 15230785 NR Description: DAG protein -related [Arabidopsis thaliana]
  misc_feature (1)..(199): Homolog of NCBI NO: 6014904 NR Description: DAG PROTEIN, CHLOROPLAST PRECURSOR
  misc_feature (24)..(210): Homolog of NCBI NO: 38636775 NR Description: putative DAG protein [Oryza sativa (japonica
  misc_feature (1)..(419): Homolog of NCBI NO: 15235263 NR Description: putative DAG protein [Arabidopsis thaliana]
  misc_feature (229)..(399): Homolog of NCBI NO: 19310564 NR Description: putative DAG protein [Arabidopsis thaliana]
  misc_feature (1)..(374): Homolog of NCBI NO: 15241580 NR Description: expressed protein [Arabidopsis thaliana]
  misc_feature (77)..(389): Homolog of NCBI NO: 18400602 NR Description: expressed protein [Arabidopsis thaliana]
  misc_feature (1)..(227): Homolog of NCBI NO: 21593052 NR Description: DAG protein, putative [Arabidopsis thaliana]
  misc_feature (1)..(227): Homolog of NCBI NO: 15220382 NR Description: DAG protein -related [Arabidopsis thaliana]
  misc_feature (1)..(206): Homolog of NCBI NO: 27754695 NR Description: putative DAG protein [Arabidopsis thaliana]
  misc_feature (1)..(227): Homolog of NCBI NO: 21593052 NR Description: DAG protein, putative [Arabidopsis thaliana]
  misc_feature (77)..(389): Homolog of NCBI NO: 18400602 NR Description: expressed protein [Arabidopsis thaliana]
  misc_feature (1)..(374): Homolog of NCBI NO: 15241580 NR Description: expressed protein [Arabidopsis thaliana]
  misc_feature (229)..(399): Homolog of NCBI NO: 19310564 NR Description: putative DAG protein [Arabidopsis thaliana]
  misc_feature (1)..(419): Homolog of NCBI NO: 15235263 NR Description: putative DAG protein [Arabidopsis thaliana]
MAMISHRLRRALLTATSYVNRSISSSITPASDFPSVSAAVLKRSVIGRSTEVATRAPARLFSTRQYKLYKEGDEITEDTVLFEGCDYNHWLITMDFSKEETPKSPEEMVAAYEETCAQGLGISVEEAKQRMYACSTTTYQGFQAIMTEQESEKFKDLPGVVFILPDSYIDPQNKEYGGDKYENGVITHRPPPIQSGRARPRPRFDRSGGGSGGPQNFQRNTQYGQQPPMQGGGGSYGPQQGYATPGQGQGTQAPPPFQGGYNQGPRSPPPPYQAGYNQGQGSPVPPYQAGYNQVQGSPVPPYQGTQSSYGQGGSGNYSQGPQGGYNQGGPRNYNPQGAGNFGPASGAGNLGPAPGAGNPGYGQGYSGPGQEQNQTFPQADQRNRDWNNNNPAGQPGSDQVRSRSIMNLASFFFDILIRH

SEQ ID NO: 37052 - protein, 417 aa, Arabidopsis thaliana
  peptide (1)..(417): Ceres Seq. ID no. 13600838
  misc_feature (189)..(397): Pfam Name: High molecular weight glutenin subunit Pfam Description: High molecular weight glutenin subunit
  misc_feature (189)..(397): Pfam Name: High molecular weight glutenin subunit Pfam Description: High molecular weight glutenin subunit
  misc_feature (1)..(204): Homolog of NCBI NO: 15230785 NR Description: DAG protein -related [Arabidopsis thaliana]
  misc_feature (1)..(204): Homolog of NCBI NO: 27754695 NR Description: putative DAG protein [Arabidopsis thaliana]
  misc_feature (1)..(197): Homolog of NCBI NO: 6014904 NR Description: DAG PROTEIN, CHLOROPLAST PRECURSOR
  misc_feature (1)..(225): Homolog of NCBI NO: 15220382 NR Description: DAG protein -related [Arabidopsis thaliana]
  misc_feature (22)..(208): Homolog of NCBI NO: 38636775 NR Description: putative DAG protein [Oryza sativa (japonica
  misc_feature (1)..(204): Homolog of NCBI NO: 15230785 NR Description: DAG protein -related [Arabidopsis thaliana]
  misc_feature (1)..(197): Homolog of NCBI NO: 6014904 NR Description: DAG PROTEIN, CHLOROPLAST PRECURSOR
  misc_feature (22)..(208): Homolog of NCBI NO: 38636775 NR Description: putative DAG protein [Oryza sativa (japonica
  misc_feature (1)..(417): Homolog of NCBI NO: 15235263 NR Description: putative DAG protein [Arabidopsis thaliana]
  misc_feature (227)..(397): Homolog of NCBI NO: 19310564 NR Description: putative DAG protein [Arabidopsis thaliana]
  misc_feature (1)..(372): Homolog of NCBI NO: 15241580 NR Description: expressed protein [Arabidopsis thaliana]
  misc_feature (75)..(387): Homolog of NCBI NO: 18400602 NR Description: expressed protein [Arabidopsis thaliana]
  misc_feature (1)..(225): Homolog of NCBI NO: 21593052 NR Description: DAG protein, putative [Arabidopsis thaliana]
  misc_feature (1)..(225): Homolog of NCBI NO: 15220382 NR Description: DAG protein -related [Arabidopsis thaliana]
  misc_feature (1)..(204): Homolog of NCBI NO: 27754695 NR Description: putative DAG protein [Arabidopsis thaliana]
  misc_feature (1)..(225): Homolog of NCBI NO: 21593052 NR Description: DAG protein, putative [Arabidopsis thaliana]
  misc_feature (75)..(387): Homolog of NCBI NO: 18400602 NR Description: expressed protein [Arabidopsis thaliana]
  misc_feature (1)..(372): Homolog of NCBI NO: 15241580 NR Description: expressed protein [Arabidopsis thaliana]
  misc_feature (227)..(397): Homolog of NCBI NO: 19310564 NR Description: putative DAG protein [Arabidopsis thaliana]
  misc_feature (1)..(417): Homolog of NCBI NO: 15235263 NR Description: putative DAG protein [Arabidopsis thaliana]
MISHRLRRALLTATSYVNRSISSSITPASDFPSVSAAVLKRSVIGRSTEVATRAPARLFSTRQYKLYKEGDEITEDTVLFEGCDYNHWLITMDFSKEETPKSPEEMVAAYEETCAQGLGISVEEAKQRMYACSTTTYQGFQAIMTEQESEKFKDLPGVVFILPDSYIDPQNKEYGGDKYENGVITHRPPPIQSGRARPRPRFDRSGGGSGGPQNFQRNTQYGQQPPMQGGGGSYGPQQGYATPGQGQGTQAPPPFQGGYNQGPRSPPPPYQAGYNQGQGSPVPPYQAGYNQVQGSPVPPYQGTQSSYGQGGSGNYSQGPQGGYNQGGPRNYNPQGAGNFGPASGAGNLGPAPGAGNPGYGQGYSGPGQEQNQTFPQADQRNRDWNNNNPAGQPGSDQVRSRSIMNLASFFFDILIRH

SEQ ID NO: 37053 - DNA, 956 bp, Arabidopsis thaliana
  misc_feature (1)..(956): Ceres Seq. ID no. 12678795
  misc_feature: MA Experiment ID: 20000234 Result: Down-regulated in Transcription
  misc_feature: MA Experiment 20000234 PARAMETER Experiment Name: At_Siliques_P Parameter: Age (day) Value: 21
  misc_feature: MA Experiment 20000234 PARAMETER Experiment Name: At_Siliques_P Parameter: Organism Value: A. thaliana
  misc_feature: MA Experiment 20000234 PARAMETER Experiment Name: At_Siliques_P Parameter: Plant Line Value: WS
  misc_feature: MA Experiment 20000234 PARAMETER Experiment Name: At_Siliques_P Parameter: Tissue Value: Less Than 5mm Siliques vs. Whole Plant
  misc_feature: MA Experiment ID: 20000235 Result: Down-regulated in Transcription
  misc_feature: MA Experiment 20000235 PARAMETER Experiment Name: At_Siliques_P Parameter: Age (day) Value: 21
  misc_feature: MA Experiment 20000235 PARAMETER Experiment Name: At_Siliques_P Parameter: Organism Value: A. thaliana
  misc_feature: MA Experiment 20000235 PARAMETER Experiment Name: At_Siliques_P Parameter: Plant Line Value: WS
  misc_feature: MA Experiment 20000235 PARAMETER Experiment Name: At_Siliques_P Parameter: Tissue Value: 5-10mm Siliques vs. Whole Plant
  misc_feature: MA Experiment ID: 20001905 Result: Up-regulated in Transcription
  misc_feature: MA Experiment 20001905 PARAMETER Experiment Name: At_Drought_Reproduction_P Parameter: Age (day) Value: 40
  misc_feature: MA Experiment 20001905 PARAMETER Experiment Name: At_Drought_Reproduction_P Parameter: Organism Value: A. thaliana
  misc_feature: MA Experiment 20001905 PARAMETER Experiment Name: At_Drought_Reproduction_P Parameter: Plant Line Value: WS
  misc_feature: MA Experiment 20001905 PARAMETER Experiment Name: At_Drought_Reproduction_P Parameter: Timepoint (day) Value: 10
  misc_feature: MA Experiment 20001905 PARAMETER Experiment Name: At_Drought_Reproduction_P Parameter: Tissue Value: Rosettes
  misc_feature: MA Experiment 20001905 PARAMETER Experiment Name: At_Drought_Reproduction_P Parameter: Treatment Value: Drought vs. No Drought
aacattaattgaggaggaggagattggttgttgttgacgacgcgtttccgctcactaattttttttaacctttttgtgtctccgtcgtcttttgatcttcaatctcagttttgagctgaagattatcgtatcgacctgcgattctcttcagatcgataatccatggctgcagctggaaacaagagcattaacgccaaattggtgttgcttggagatgttggtgctggaaaatcaagtcttgtgttacggtttgtcaaagatcagtttgttgaattccaggaatcaaccattggtgctgcttttttctcacaaacgttagctgtgaacgatgccactgtgaagtttgagatttgggatacagcgggtcaggaacggtaccatagtttggctccaatgtactacagaggtgctgctgctgcaatcattgtttttgatgttacgaatcaggcttcgtttgagagggcaaagaaatgggttcaggaactgcaggcacaaggtaaccctaatatggtcatggcccttgctggaaacaaatctgatttattagatgcaaggaaggtgacagcagaggatgcacaaacatatgctcaggaaaacggtcttttcttcatggaaacttcagcaaaaaccgctactaatgtcaaagagatattctatgaaatcgcaagaaggctaccgcgagtacagccaacagaaaacccaacaggaatggttctgccagacagggccatggatagggcagtgagctcatcttgttgtgcttagttatattgtgtaatggcacacacttctcttaaaaagagatcttttggtcactttaaagttatggacttctgtgtttgcgtctctttgctttgttttacgtatttgagatttgatctccactattttgtaaataaatctaatactcaactaagtaactaagtgcgtgagggggctatggatccatttgtcat

SEQ ID NO: 37054 - protein, 200 aa, Arabidopsis thaliana
  peptide (1)..(200): Ceres Seq. ID no. 12678796
  misc_feature (12)..(173): Pfam Name: Ras family Pfam Description: Ras family
  misc_feature (5)..(200): Homolog of NCBI NO: 12311680 NR Description: GTP binding protein [Cichorium intybus x
  misc_feature (1)..(200): Homolog of NCBI NO: 6010031 NR Description: GTP binding protein [Cichorium intybus x
  misc_feature (1)..(200): Homolog of NCBI NO: 6010033 NR Description: GTP binding protein [Cichorium intybus x
  misc_feature (1)..(200): Homolog of NCBI NO: 1076545 NR Description: guanine nucleotide regulatory protein - fava bean
  misc_feature (1)..(200): Homolog of NCBI NO: 12311682 NR Description: GTP binding protein [Cichorium intybus x
  misc_feature (1)..(200): Homolog of NCBI NO: 12311684 NR Description: GTP binding protein [Cichorium intybus x
  misc_feature (1)..(200): Homolog of NCBI NO: 1370178 NR Description: RAB5A [Lotus japonicus]
  misc_feature (1)..(200): Homolog of NCBI NO: 421941 NR Description: GTP-binding protein, ras-related - common tobacco
  misc_feature (1)..(200): Homolog of NCBI NO: 15242309 NR Description: ras-related GTP-binding protein RHA1 (sp|P31582)
  misc_feature (1)..(200): Homolog of NCBI NO: 15235113 NR Description: GTP-binding protein, putative
MAAAGNKSINAKLVLLGDVGAGKSSLVLRFVKDQFVEFQESTIGAAFFSQTLAVNDATVKFEIWDTAGQERYHSLAPMYYRGAAAAIIVFDVTNQASFERAKKWVQELQAQGNPNMVMALAGNKSDLLDARKVTAEDAQTYAQENGLFFMETSAKTATNVKEIFYEIARRLPRVQPTENPTGMVLPDRAMDRAVSSSCCA

SEQ ID NO: 37055 - protein, 123 aa, Arabidopsis thaliana
  peptide (1)..(123): Ceres Seq. ID no. 12678797
  misc_feature (1)..(96): Pfam Name: Ras family Pfam Description: Ras family
  misc_feature (1)..(123): Homolog of NCBI NO: 12311680 NR Description: GTP binding protein [Cichorium intybus x
  misc_feature (1)..(123): Homolog of NCBI NO: 6010031 NR Description: GTP binding protein [Cichorium intybus x
  misc_feature (1)..(123): Homolog of NCBI NO: 6010033 NR Description: GTP binding protein [Cichorium intybus x
  misc_feature (1)..(123): Homolog of NCBI NO: 1076545 NR Description: guanine nucleotide regulatory protein - fava bean
  misc_feature (1)..(123): Homolog of NCBI NO: 12311682 NR Description: GTP binding protein [Cichorium intybus x
  misc_feature (1)..(123): Homolog of NCBI NO: 12311684 NR Description: GTP binding protein [Cichorium intybus x
  misc_feature (1)..(123): Homolog of NCBI NO: 1370178 NR Description: RAB5A [Lotus japonicus]
  misc_feature (1)..(123): Homolog of NCBI NO: 421941 NR Description: GTP-binding protein, ras-related - common tobacco
  misc_feature (1)..(123): Homolog of NCBI NO: 15242309 NR Description: ras-related GTP-binding protein RHA1 (sp|P31582)
  misc_feature (1)..(123): Homolog of NCBI NO: 15235113 NR Description: GTP-binding protein, putative
MYYRGAAAAIIVFDVTNQASFERAKKWVQELQAQGNPNMVMALAGNKSDLLDARKVTAEDAQTYAQENGLFFMETSAKTATNVKEIFYEIARRLPRVQPTENPTGMVLPDRAMDRAVSSSCCA

SEQ ID NO: 37056 - DNA, 782 bp, Arabidopsis thaliana
  misc_feature (1)..(782): Ceres Seq. ID no. 12337156
  misc_feature: MA Experiment ID: 20000113 Result: Down-regulated in Transcription
  misc_feature: MA Experiment 20000113 PARAMETER Experiment Name: At_42deg_Heat_cDNA_P Parameter: Temperature (deg C) Value: 42 vs. 22
  misc_feature: MA Experiment 20000113 PARAMETER Experiment Name: At_42deg_Heat_cDNA_P Parameter: Timepoint (hr) Value: 8
  misc_feature: MA Experiment 20000113 PARAMETER Experiment Name: At_42deg_Heat_cDNA_P Parameter: Tissue Value: Aerial
aaaagaaaagatgttgtgtagaatggtggtggtgactggccggaaaaagaaacccggttcggttccggtttatctgaatgtatacgatctcacacccatcaatggctacgcttactggttaggacttgggatctatcactctggtgttgaagttcatggagttgaatatggtttcggagctcacgatcattcgactaccgggatattcgaggtaaccgaagcaatgtccgggtttcacatttaggaagtctatattgattggaagaactgatttagatcctgaaaacgttcgtgtctttatggagaaacttgcggaagaatatagtggaaacagttatcatttgattactaagaattgcaatcacttttgcaatgatgtttgtgtgcaactgactcgaagatcgatccctagttgggttaaccgtcttgctcgctttggtttgttttgcaactgtgttctgccggcggagttgaatgagactaaggtgaggcaggtgagatcaaaggaagagaagattccggaagtagagaagaagaaacttcggagtagatcaagtaggtttccacctggtccttcgctttcttcgtcgggttctttaaaccgaagcagaagaggagaaaggagaagacaatgtcttcctccatcaccaactgtgagtgtttagctctagtcctagtaaaattatacctttttgtttcgcaatttgattctgtagtaatgtttaagctacaagatatggattgaacaaacattttcttgatagtaatggtataagattttc

SEQ ID NO: 37057 - protein, 121 aa, Arabidopsis thaliana
  peptide (1)..(121): Ceres Seq. ID no. 12337157
  misc_feature (1)..(70): Homolog of NCBI NO: 15238059 NR Description: putative protein; protein id: At5g47310.1
  misc_feature (1)..(115): Homolog of NCBI NO: 9802596 NR Description: T2E6.19 [Arabidopsis thaliana]
  misc_feature (1)..(115): Homolog of NCBI NO: 21593644 NR Description: unknown [Arabidopsis thaliana]
  misc_feature (1)..(115): Homolog of NCBI NO: 18401869 NR Description: expressed protein
  misc_feature (1)..(121): Homolog of NCBI NO: 25354458 NR Description: hypothetical protein F23A5.4 [imported] -
  misc_feature (1)..(121): Homolog of NCBI NO: 18412886 NR Description: expressed protein
  misc_feature (1)..(120): Homolog of NCBI NO: 15236618 NR Description: putative protein; protein id: At4g31980.1
  misc_feature (1)..(120): Homolog of NCBI NO: 17529024 NR Description: unknown protein [Arabidopsis thaliana]
  misc_feature (1)..(120): Homolog of NCBI NO: 18400749 NR Description: expressed protein
  misc_feature (1)..(121): Homolog of NCBI NO: 18420889 NR Description: putative protein
MEKLAEEYSGNSYHLITKNCNHFCNDVCVQLTRRSIPSWVNRLARFGLFCNCVLPAELNETKVRQVRSKEEKIPEVEKKKLRSRSSRFPPGPSLSSSGSLNRSRRGERRRQCLPPSPTVSV

SEQ ID NO: 37058 - protein, 80 aa, Arabidopsis thaliana
  peptide (1)..(80): Ceres Seq. ID no. 12337158
  misc_feature (21)..(71): Pfam Name: Eukaryotic protein of unknown function (DUF862) Pfam Description: Eukaryotic protein of unknown function (DUF862)
  misc_feature (19)..(78): Homolog of NCBI NO: 15238059 NR Description: putative protein; protein id: At5g47310.1
  misc_feature (1)..(71): Homolog of NCBI NO: 9802596 NR Description: T2E6.19 [Arabidopsis thaliana]
  misc_feature (1)..(71): Homolog of NCBI NO: 21593644 NR Description: unknown [Arabidopsis thaliana]
  misc_feature (1)..(71): Homolog of NCBI NO: 18401869 NR Description: expressed protein
  misc_feature (4)..(70): Homolog of NCBI NO: 25354458 NR Description: hypothetical protein F23A5.4 [imported] -
  misc_feature (4)..(70): Homolog of NCBI NO: 18412886 NR Description: expressed protein
  misc_feature (4)..(71): Homolog of NCBI NO: 15236618 NR Description: putative protein; protein id: At4g31980.1
  misc_feature (4)..(71): Homolog of NCBI NO: 17529024 NR Description: unknown protein [Arabidopsis thaliana]
  misc_feature (4)..(71): Homolog of NCBI NO: 18400749 NR Description: expressed protein
  misc_feature (4)..(71): Homolog of NCBI NO: 18420889 NR Description: putative protein
KEKMLCRMVVVTGRKKKPGSVPVYLNVYDLTPINGYAYWLGLGIYHSGVEVHGVEYGFGAHDHSTTGIFEVTEAMSGFHI

SEQ ID NO: 37059 - protein, 77 aa, Arabidopsis thaliana
  peptide (1)..(77): Ceres Seq. ID no. 12337159
  misc_feature (18)..(68): Pfam Name: Eukaryotic protein of unknown function (DUF862) Pfam Description: Eukaryotic protein of unknown function (DUF862)
  misc_feature (16)..(75): Homolog of NCBI NO: 15238059 NR Description: putative protein; protein id: At5g47310.1
  misc_feature (1)..(68): Homolog of NCBI NO: 9802596 NR Description: T2E6.19 [Arabidopsis thaliana]
  misc_feature (1)..(68): Homolog of NCBI NO: 21593644 NR Description: unknown [Arabidopsis thaliana]
  misc_feature (1)..(68): Homolog of NCBI NO: 18401869 NR Description: expressed protein
  misc_feature (1)..(67): Homolog of NCBI NO: 25354458 NR Description: hypothetical protein F23A5.4 [imported] -
  misc_feature (1)..(67): Homolog of NCBI NO: 18412886 NR Description: expressed protein
  misc_feature (1)..(68): Homolog of NCBI NO: 15236618 NR Description: putative protein; protein id: At4g31980.1
  misc_feature (1)..(68): Homolog of NCBI NO: 17529024 NR Description: unknown protein [Arabidopsis thaliana]
  misc_feature (1)..(68): Homolog of NCBI NO: 18400749 NR Description: expressed protein
  misc_feature (1)..(68): Homolog of NCBI NO: 18420889 NR Description: putative protein
MLCRMVVVTGRKKKPGSVPVYLNVYDLTPINGYAYWLGLGIYHSGVEVHGVEYGFGAHDHSTTGIFEVTEAMSGFHI

SEQ ID NO: 37060 - DNA, 498 bp, Arabidopsis thaliana
  misc_feature (1)..(498): Ceres Seq. ID no. 1391902
  misc_feature: MA Experiment ID: 20000307 Result: Up-regulated in Transcription
  misc_feature: MA Experiment 20000307 PARAMETER Experiment Name: At_Germinating_Seeds_Sub_P Parameter: Age (hr) Value: 24 vs. 0
  misc_feature: MA Experiment 20000307 PARAMETER Experiment Name: At_Germinating_Seeds_Sub_P Parameter: Organism Value: A. thaliana
  misc_feature: MA Experiment 20000307 PARAMETER Experiment Name: At_Germinating_Seeds_Sub_P Parameter: Plant Line Value: WS
  misc_feature: MA Experiment 20000307 PARAMETER Experiment Name: At_Germinating_Seeds_Sub_P Parameter: Tissue Value: Germinating Seeds
  misc_feature: MA Experiment ID: 20000352 Result: Up-regulated in Transcription
  misc_feature: MA Experiment 20000352 PARAMETER Experiment Name: At_Drought_Sub_P Parameter: Age (day) Value: 7
  misc_feature: MA Experiment 20000352 PARAMETER Experiment Name: At_Drought_Sub_P Parameter: Organism Value: A. thaliana
  misc_feature: MA Experiment 20000352 PARAMETER Experiment Name: At_Drought_Sub_P Parameter: Plant Line Value: WS
  misc_feature: MA Experiment 20000352 PARAMETER Experiment Name: At_Drought_Sub_P Parameter: Timepoint (hr) Value: 6
  misc_feature: MA Experiment 20000352 PARAMETER Experiment Name: At_Drought_Sub_P Parameter: Tissue Value: Whole Plant
  misc_feature: MA Experiment 20000352 PARAMETER Experiment Name: At_Drought_Sub_P Parameter: Treatment Value: Drought vs. No Drought
  misc_feature: MA Experiment ID: 20000355 Result: Up-regulated in Transcription
  misc_feature: MA Experiment 20000355 PARAMETER Experiment Name: At_Siliques_Sub_P Parameter: Age (day) Value: 21
  misc_feature: MA Experiment 20000355 PARAMETER Experiment Name: At_Siliques_Sub_P Parameter: Organism Value: A. thaliana
  misc_feature: MA Experiment 20000355 PARAMETER Experiment Name: At_Siliques_Sub_P Parameter: Plant Line Value: WS
  misc_feature: MA Experiment 20000355 PARAMETER Experiment Name: At_Siliques_Sub_P Parameter: Tissue Value: Less Than 5mm Siliques vs. Whole Plant
aatttaaaggtttatagacaactcttggaaaaaacaaaatcgactccaggagccaaagtagaaaaccacaagttttgtgcttctgtgcactttcgctgcgtcgatgagaagaaatggagcgaactggttctacaggttcggtcggtattaaagaaattccctacgctgcaactgacccaaggtcggaaggttttcgaaatccgtccaatgattgaatgggataaaggaaaggctcttgagttcttgttagaatcacttggatttgggaacactaacaatgttttcccggtttatattggtgacaatcgaactgacgaagatgcatttaagatgctacgagacagaggcgaaggctttggcattcttgtctccaagtttcccaaggatactgatgcttcgtattctttgcaagatccatccgaggtgatggatttcttacgacgattggtggaatggaaacaaatgcagccaagaatgtgaaatgataatataataaac

SEQ ID NO: 37061 - protein, 159 aa, Arabidopsis thaliana
  peptide (1)..(159): Ceres Seq. ID no. 1391903
  misc_feature (3)..(140): Pfam Name: Trehalose-phosphatase Pfam Description: Trehalose-phosphatase
  misc_feature (3)..(154): Homolog of NCBI NO: 25354595 NR Description: trehalose-phosphatase (EC 3.1.3.12) B
  misc_feature (3)..(154): Homolog of NCBI NO: 15218205 NR Description: trehalose-6-phosphate phosphatase (AtTPPB)
  misc_feature (3)..(158): Homolog of NCBI NO: 21554408 NR Description: trehalose-phosphatase, putative [Arabidopsis
  misc_feature (3)..(158): Homolog of NCBI NO: 25354597 NR Description: probable trehalose-phosphatase [imported] -
  misc_feature (3)..(158): Homolog of NCBI NO: 18399940 NR Description: trehalose-phosphatase, putative
  misc_feature (3)..(154): Homolog of NCBI NO: 15227161 NR Description: putative trehalose-6-phosphate phosphatase
  misc_feature (3)..(156): Homolog of NCBI NO: 30692524 NR Description: trehalose-6-phosphate phosphatase, putative
  misc_feature (3)..(159): Homolog of NCBI NO: 15238360 NR Description: trehalose-6-phosphate phosphatase; protein id:
  misc_feature (3)..(146): Homolog of NCBI NO: 11282598 NR Description: trehalose-6-phosphate phosphatase-like protein -
  misc_feature (3)..(159): Homolog of NCBI NO: 30683008 NR Description: trehalose-6-phosphate phosphatase, putative
NLKVYRQLLEKTKSTPGAKVENHKFCASVHFRCVDEKKWSELVLQVRSVLKKFPTLQLTQGRKVFEIRPMIEWDKGKALEFLLESLGFGNTNNVFPVYIGDNRTDEDAFKMLRDRGEGFGILVSKFPKDTDASYSLQDPSEVMDFLRRLVEWKQMQPRM

SEQ ID NO: 37062 - protein, 90 aa, Arabidopsis thaliana
  peptide (1)..(90): Ceres Seq. ID no. 1391904
  misc_feature (1)..(71): Pfam Name: Trehalose-phosphatase Pfam Description: Trehalose-phosphatase
  misc_feature (1)..(85): Homolog of NCBI NO: 25354595 NR Description: trehalose-phosphatase (EC 3.1.3.12) B
  misc_feature (1)..(85): Homolog of NCBI NO: 15218205 NR Description: trehalose-6-phosphate phosphatase (AtTPPB)
  misc_feature (1)..(89): Homolog of NCBI NO: 21554408 NR Description: trehalose-phosphatase, putative [Arabidopsis
  misc_feature (1)..(89): Homolog of NCBI NO: 25354597 NR Description: probable trehalose-phosphatase [imported] -
  misc_feature (1)..(89): Homolog of NCBI NO: 18399940 NR Description: trehalose-phosphatase, putative
  misc_feature (1)..(85): Homolog of NCBI NO: 15227161 NR Description: putative trehalose-6-phosphate phosphatase
  misc_feature (1)..(87): Homolog of NCBI NO: 30692524 NR Description: trehalose-6-phosphate phosphatase, putative
  misc_feature (1)..(90): Homolog of NCBI NO: 15238360 NR Description: trehalose-6-phosphate phosphatase; protein id:
  misc_feature (1)..(77): Homolog of NCBI NO: 11282598 NR Description: trehalose-6-phosphate phosphatase-like protein -
  misc_feature (1)..(90): Homolog of NCBI NO: 30683008 NR Description: trehalose-6-phosphate phosphatase, putative
MIEWDKGKALEFLLESLGFGNTNNVFPVYIGDNRTDEDAFKMLRDRGEGFGILVSKFPKDTDASYSLQDPSEVMDFLRRLVEWKQMQPRM

SEQ ID NO: 37063 - DNA, 672 bp, Arabidopsis thaliana
  misc_feature (1)..(672): Ceres Seq. ID no. 12482397
  misc_feature: MA Experiment ID: 20000306 Result: Up-regulated in Transcription
  misc_feature: MA Experiment 20000306 PARAMETER Experiment Name: At_Germinating_Seeds_Sub_P Parameter: Age (hr) Value: 6 vs. 0
  misc_feature: MA Experiment 20000306 PARAMETER Experiment Name: At_Germinating_Seeds_Sub_P Parameter: Organism Value: A. thaliana
  misc_feature: MA Experiment 20000306 PARAMETER Experiment Name: At_Germinating_Seeds_Sub_P Parameter: Plant Line Value: WS
  misc_feature: MA Experiment 20000306 PARAMETER Experiment Name: At_Germinating_Seeds_Sub_P Parameter: Tissue Value: Germinating Seeds
  misc_feature: MA Experiment ID: 20000307 Result: Up-regulated in Transcription
  misc_feature: MA Experiment 20000307 PARAMETER Experiment Name: At_Germinating_Seeds_Sub_P Parameter: Age (hr) Value: 24 vs. 0
  misc_feature: MA Experiment 20000307 PARAMETER Experiment Name: At_Germinating_Seeds_Sub_P Parameter: Organism Value: A. thaliana
  misc_feature: MA Experiment 20000307 PARAMETER Experiment Name: At_Germinating_Seeds_Sub_P Parameter: Plant Line Value: WS
  misc_feature: MA Experiment 20000307 PARAMETER Experiment Name: At_Germinating_Seeds_Sub_P Parameter: Tissue Value: Germinating Seeds
  misc_feature: MA Experiment ID: 20000315 Result: Down-regulated in Transcription
  misc_feature: MA Experiment 20000315 PARAMETER Experiment Name: At_14day_Shoots-Roots_Sub_P Parameter: Age (day) Value: 14
  misc_feature: MA Experiment 20000315 PARAMETER Experiment Name: At_14day_Shoots-Roots_Sub_P Parameter: Organism Value: A. thaliana
  misc_feature: MA Experiment 20000315 PARAMETER Experiment Name: At_14day_Shoots-Roots_Sub_P Parameter: Plant Line Value: WS
  misc_feature: MA Experiment 20000315 PARAMETER Experiment Name: At_14day_Shoots-Roots_Sub_P Parameter: Tissue Value: Shoots vs. Whole Plant
  misc_feature: MA Experiment ID: 20000327 Result: Up-regulated in Transcription
  misc_feature: MA Experiment 20000327 PARAMETER Experiment Name: At_42deg_Heat_Sub_P Parameter: Age (day) Value: 14
  misc_feature: MA Experiment 20000327 PARAMETER Experiment Name: At_42deg_Heat_Sub_P Parameter: Organism Value: A. thaliana
  misc_feature: MA Experiment 20000327 PARAMETER Experiment Name: At_42deg_Heat_Sub_P Parameter: Plant Line Value: WS
  misc_feature: MA Experiment 20000327 PARAMETER Experiment Name: At_42deg_Heat_Sub_P Parameter: Temperature (deg C) Value: 42 vs. 22
  misc_feature: MA Experiment 20000327 PARAMETER Experiment Name: At_42deg_Heat_Sub_P Parameter: Timepoint (hr) Value: 1
  misc_feature: MA Experiment 20000327 PARAMETER Experiment Name: At_42deg_Heat_Sub_P Parameter: Tissue Value: Aerial
  misc_feature: MA Experiment ID: 20000347 Result: Up-regulated in Transcription
  misc_feature: MA Experiment 20000347 PARAMETER Experiment Name: At_2mM_SA_Sub_P Parameter: Age (day) Value: 14
  misc_feature: MA Experiment 20000347 PARAMETER Experiment Name: At_2mM_SA_Sub_P Parameter: Organism Value: A. thaliana
  misc_feature: MA Experiment 20000347 PARAMETER Experiment Name: At_2mM_SA_Sub_P Parameter: Plant Line Value: WS
  misc_feature: MA Experiment 20000347 PARAMETER Experiment Name: At_2mM_SA_Sub_P Parameter: Timepoint (hr) Value: 6
  misc_feature: MA Experiment 20000347 PARAMETER Experiment Name: At_2mM_SA_Sub_P Parameter: Tissue Value: Aerial
  misc_feature: MA Experiment 20000347 PARAMETER Experiment Name: At_2mM_SA_Sub_P Parameter: Treatment Value: 2mM SA vs. No Treatment
  misc_feature: MA Experiment ID: 20000348 Result: Up-regulated in Transcription
  misc_feature: MA Experiment 20000348 PARAMETER Experiment Name: At_100uM_ABA_Sub_P Parameter: Age (day) Value: 14
  misc_feature: MA Experiment 20000348 PARAMETER Experiment Name: At_100uM_ABA_Sub_P Parameter: Organism Value: A. thaliana
  misc_feature: MA Experiment 20000348 PARAMETER Experiment Name: At_100uM_ABA_Sub_P Parameter: Plant Line Value: WS
  misc_feature: MA Experiment 20000348 PARAMETER Experiment Name: At_100uM_ABA_Sub_P Parameter: Timepoint (hr) Value: 1
  misc_feature: MA Experiment 20000348 PARAMETER Experiment Name: At_100uM_ABA_Sub_P Parameter: Tissue Value: Aerial
  misc_feature: MA Experiment 20000348 PARAMETER Experiment Name: At_100uM_ABA_Sub_P Parameter: Treatment Value: 100uM ABA vs. No Treatment
  misc_feature: MA Experiment ID: 20000355 Result: Up-regulated in Transcription
  misc_feature: MA Experiment 20000355 PARAMETER Experiment Name: At_Siliques_Sub_P Parameter: Age (day) Value: 21
  misc_feature: MA Experiment 20000355 PARAMETER Experiment Name: At_Siliques_Sub_P Parameter: Organism Value: A. thaliana
  misc_feature: MA Experiment 20000355 PARAMETER Experiment Name: At_Siliques_Sub_P Parameter: Plant Line Value: WS
  misc_feature: MA Experiment 20000355 PARAMETER Experiment Name: At_Siliques_Sub_P Parameter: Tissue Value: Less Than 5mm Siliques vs. Whole Plant
atgggcaaaaatgaggaagtgaagcttttgggaatatgggcgagccctttcagccgtcggatcgagatggctctcaaactcaaaggtgtaccgtacgaatacttggaggaagatttggagaacaagagctctttgcttcttgctctaagccctattcacaagaagatccctgttcttgttcataatggtaaaaccattatcgagtcgcatgtgatcctcgaatacatcgatgagacttggaaacacaatcccattcttcctcaggatcccttccaaagatccaaggctcgagtcttagctaaacttgttgatgaaaagatagtaaatgtgggatttgcctcactggccaaaacagagaaaggaagagaagttctgattgagcagacaagagaattgattatgtgtctcgaaaaagaactcgccggaaaagattacttcggcggcaagacagtcggattcttggactttgtcgccggaagtatgatcccgttttgtttggagagggcttgggaaggaatgggagtggagatgattacagagaaaaagtttccagaatataacaaatgggtgaagaagctgaaggaggttgagatcgttgttgattgtattcctctaagagagaaacatattgaacacatgaacaatatggcagagaaaattagatctgcttaa

SEQ ID NO: 37064 - protein, 223 aa, Arabidopsis thaliana
  peptide (1)..(223): Ceres Seq. ID no. 12482398
  misc_feature (86)..(197): Pfam Name: Glutathione S-transferase, C-terminal domain Pfam Description: Glutathione S-transferase, C-terminal domain
  misc_feature (4)..(220): Homolog of NCBI NO: 10567808 NR Description: putative glutathione S-transferase T3
  misc_feature (7)..(213): Homolog of NCBI NO: 7595790 NR Description: glutathione S-transferase [Euphorbia esula]
  misc_feature (4)..(223): Homolog of NCBI NO: 15227082 NR Description: glutathione transferase, putative
  misc_feature (3)..(222): Homolog of NCBI NO: 15227087 NR Description: glutathione transferase, putative
  misc_feature (1)..(222): Homolog of NCBI NO: 15227550 NR Description: glutathione transferase, putative
  misc_feature (3)..(223): Homolog of NCBI NO: 14423534 NR Description: putative glutathione S-transferase [Arabidopsis
  misc_feature (3)..(223): Homolog of NCBI NO: 15227086 NR Description: glutathione transferase, putative
  misc_feature (3)..(223): Homolog of NCBI NO: 15227551 NR Description: glutathione transferase, putative
  misc_feature (1)..(223): Homolog of NCBI NO: 15227085 NR Description: glutathione transferase (103-1A)
  misc_feature (1)..(223): Homolog of NCBI NO: 15227084 NR Description: glutathione transferase, putative
MGKNEEVKLLGIWASPFSRRIEMALKLKGVPYEYLEEDLENKSSLLLALSPIHKKIPVLVHNGKTIIESHVILEYIDETWKHNPILPQDPFQRSKARVLAKLVDEKIVNVGFASLAKTEKGREVLIEQTRELIMCLEKELAGKDYFGGKTVGFLDFVAGSMIPFCLERAWEGMGVEMITEKKFPEYNKWVKKLKEVEIVVDCIPLREKHIEHMNNMAEKIRSA

SEQ ID NO: 37065 - protein, 201 aa, Arabidopsis thaliana
  peptide (1)..(201): Ceres Seq. ID no. 12482399
  misc_feature (64)..(175): Pfam Name: Glutathione S-transferase, C-terminal domain Pfam Description: Glutathione S-transferase, C-terminal domain
  misc_feature (1)..(198): Homolog of NCBI NO: 10567808 NR Description: putative glutathione S-transferase T3
  misc_feature (1)..(191): Homolog of NCBI NO: 7595790 NR Description: glutathione S-transferase [Euphorbia esula]
  misc_feature (1)..(201): Homolog of NCBI NO: 15227082 NR Description: glutathione transferase, putative
  misc_feature (1)..(200): Homolog of NCBI NO: 15227087 NR Description: glutathione transferase, putative
  misc_feature (1)..(200): Homolog of NCBI NO: 15227550 NR Description: glutathione transferase, putative
  misc_feature (1)..(201): Homolog of NCBI NO: 14423534 NR Description: putative glutathione S-transferase [Arabidopsis
  misc_feature (1)..(201): Homolog of NCBI NO: 15227086 NR Description: glutathione transferase, putative
  misc_feature (1)..(201): Homolog of NCBI NO: 15227551 NR Description: glutathione transferase, putative
  misc_feature (1)..(201): Homolog of NCBI NO: 15227085 NR Description: glutathione transferase (103-1A)
  misc_feature (1)..(201): Homolog of NCBI NO: 15227084 NR Description: glutathione transferase, putative
MALKLKGVPYEYLEEDLENKSSLLLALSPIHKKIPVLVHNGKTIIESHVILEYIDETWKHNPILPQDPFQRSKARVLAKLVDEKIVNVGFASLAKTEKGREVLIEQTRELIMCLEKELAGKDYFGGKTVGFLDFVAGSMIPFCLERAWEGMGVEMITEKKFPEYNKWVKKLKEVEIVVDCIPLREKHIEHMNNMAEKIRSA

SEQ ID NO: 37066 - DNA, 973 bp, Arabidopsis thaliana
  misc_feature (1)..(973): Ceres Seq. ID no. 12330419
  misc_feature: MA Experiment ID: 108433 Result: Up-regulated in Transcription
  misc_feature: MA Experiment 108433 PARAMETER Experiment Name: At_rhl_Mutant2_cDNA_P Parameter: Age (day) Value: 7
  misc_feature: MA Experiment 108433 PARAMETER Experiment Name: At_rhl_Mutant2_cDNA_P Parameter: Organism Value: A. thaliana
  misc_feature: MA Experiment 108433 PARAMETER Experiment Name: At_rhl_Mutant2_cDNA_P Parameter: Plant Line Value: rhl Mutant vs. wt landsburg
  misc_feature: MA Experiment 108433 PARAMETER Experiment Name: At_rhl_Mutant2_cDNA_P Parameter: Tissue Value: Roots
  misc_feature: MA Experiment ID: 108434 Result: Up-regulated in Transcription
  misc_feature: MA Experiment 108434 PARAMETER Experiment Name: At_Root_Tips_cDNA_P Parameter: Tissue Value: Root Tips
  misc_feature: MA Experiment ID: 108462 Result: Down-regulated in Transcription
  misc_feature: MA Experiment 108462 PARAMETER Experiment Name: At_Germinating_Seeds_cDNA_P Parameter: Age (day) Value: 2 vs. 0
  misc_feature: MA Experiment 108462 PARAMETER Experiment Name: At_Germinating_Seeds_cDNA_P Parameter: Tissue Value: Germinating Seeds
  misc_feature: MA Experiment ID: 108463 Result: Down-regulated in Transcription
  misc_feature: MA Experiment 108463 PARAMETER Experiment Name: At_Germinating_Seeds_cDNA_P Parameter: Age (day) Value: 3 vs. 0
  misc_feature: MA Experiment 108463 PARAMETER Experiment Name: At_Germinating_Seeds_cDNA_P Parameter: Tissue Value: Germinating Seeds
  misc_feature: MA Experiment ID: 108464 Result: Down-regulated in Transcription
  misc_feature: MA Experiment 108464 PARAMETER Experiment Name: At_Germinating_Seeds_cDNA_P Parameter: Age (day) Value: 4 vs. 0
  misc_feature: MA Experiment 108464 PARAMETER Experiment Name: At_Germinating_Seeds_cDNA_P Parameter: Tissue Value: Germinating Seeds
  misc_feature: MA Experiment ID: 108561 Result: Down-regulated in Transcription
  misc_feature: MA Experiment 108561 PARAMETER Experiment Name: At_100uM_ABA_cDNA_P Parameter: Timepoint (hr) Value: 6
  misc_feature: MA Experiment 108561 PARAMETER Experiment Name: At_100uM_ABA_cDNA_P Parameter: Tissue Value: Aerial
  misc_feature: MA Experiment 108561 PARAMETER Experiment Name: At_100uM_ABA_cDNA_P Parameter: Treatment Value: 100uM ABA vs. No Treatment
  misc_feature: MA Experiment ID: 108573 Result: Down-regulated in Transcription
  misc_feature: MA Experiment 108573 PARAMETER Experiment Name: At_Drought_cDNA_P Parameter: Timepoint (hr) Value: 6
  misc_feature: MA Experiment 108573 PARAMETER Experiment Name: At_Drought_cDNA_P Parameter: Tissue Value: Aerial
  misc_feature: MA Experiment 108573 PARAMETER Experiment Name: At_Drought_cDNA_P Parameter: Treatment Value: Drought vs. No Drought
  misc_feature: MA Experiment ID: 108585 Result: Down-regulated in Transcription
  misc_feature: MA Experiment 108585 PARAMETER Experiment Name: At_5mM_NaNP_cDNA_P Parameter: Timepoint (hr) Value: 6
  misc_feature: MA Experiment 108585 PARAMETER Experiment Name: At_5mM_NaNP_cDNA_P Parameter: Tissue Value: Aerial
  misc_feature: MA Experiment 108585 PARAMETER Experiment Name: At_5mM_NaNP_cDNA_P Parameter: Treatment Value: null
  misc_feature: MA Experiment ID: 20000169 Result: Down-regulated in Transcription
  misc_feature: MA Experiment 20000169 PARAMETER Experiment Name: At_100uM_ABA_P Parameter: Age (day) Value: 14
  misc_feature: MA Experiment 20000169 PARAMETER Experiment Name: At_100uM_ABA_P Parameter: Organism Value: A. thaliana
  misc_feature: MA Experiment 20000169 PARAMETER Experiment Name: At_100uM_ABA_P Parameter: Plant Line Value: WS
  misc_feature: MA Experiment 20000169 PARAMETER Experiment Name: At_100uM_ABA_P Parameter: Timepoint (hr) Value: 6
  misc_feature: MA Experiment 20000169 PARAMETER Experiment Name: At_100uM_ABA_P Parameter: Tissue Value: Aerial
  misc_feature: MA Experiment 20000169 PARAMETER Experiment Name: At_100uM_ABA_P Parameter: Treatment Value: 100uM ABA vs. No Treatment
  misc_feature: MA Experiment ID: 20000182 Result: Down-regulated in Transcription
  misc_feature: MA Experiment 20000182 PARAMETER Experiment Name: At_2mM_SA_P Parameter: Age (day) Value: 14
  misc_feature: MA Experiment 20000182 PARAMETER Experiment Name: At_2mM_SA_P Parameter: Organism Value: A. thaliana
  misc_feature: MA Experiment 20000182 PARAMETER Experiment Name: At_2mM_SA_P Parameter: Plant Line Value: WS
  misc_feature: MA Experiment 20000182 PARAMETER Experiment Name: At_2mM_SA_P Parameter: Timepoint (hr) Value: 6
  misc_feature: MA Experiment 20000182 PARAMETER Experiment Name: At_2mM_SA_P Parameter: Tissue Value: Aerial
  misc_feature: MA Experiment 20000182 PARAMETER Experiment Name: At_2mM_SA_P Parameter: Treatment Value: 2mM SA vs. No Treatment
  misc_feature: MA Experiment ID: 20000185 Result: Down-regulated in Transcription
  misc_feature: MA Experiment 20000185 PARAMETER Experiment Name: At_Roots__P Parameter: Age (day) Value: 7 vs. 21
  misc_feature: MA Experiment 20000185 PARAMETER Experiment Name: At_Roots__P Parameter: Organism Value: A. thaliana
  misc_feature: MA Experiment 20000185 PARAMETER Experiment Name: At_Roots__P Parameter: Tissue Value: Roots vs. Whole Plant
  misc_feature: MA Experiment ID: 20000227 Result: Up-regulated in Transcription
  misc_feature: MA Experiment 20000227 PARAMETER Experiment Name: At_Root-Tips-vs-Tops_P Parameter: Tissue Value: Root Tips vs. Root Tops
  misc_feature: MA Experiment ID: 20000234 Result: Up-regulated in Transcription
  misc_feature: MA Experiment 20000234 PARAMETER Experiment Name: At_Siliques_P Parameter: Age (day) Value: 21
  misc_feature: MA Experiment 20000234 PARAMETER Experiment Name: At_Siliques_P Parameter: Organism Value: A. thaliana
  misc_feature: MA Experiment 20000234 PARAMETER Experiment Name: At_Siliques_P Parameter: Plant Line Value: WS
  misc_feature: MA Experiment 20000234 PARAMETER Experiment Name: At_Siliques_P Parameter: Tissue Value: Less Than 5mm Siliques vs. Whole Plant
  misc_feature: MA Experiment ID: 20000437 Result: Down-regulated in Transcription
  misc_feature: MA Experiment 20000437 PARAMETER Experiment Name: At_Drought_P Parameter: Age (day) Value: 8
  misc_feature: MA Experiment 20000437 PARAMETER Experiment Name: At_Drought_P Parameter: Organism Value: A. thaliana
  misc_feature: MA Experiment 20000437 PARAMETER Experiment Name: At_Drought_P Parameter: Plant Line Value: WS
  misc_feature: MA Experiment 20000437 PARAMETER Experiment Name: At_Drought_P Parameter: Timepoint (hr) Value: 24
  misc_feature: MA Experiment 20000437 PARAMETER Experiment Name: At_Drought_P Parameter: Tissue Value: Whole Plant
  misc_feature: MA Experiment 20000437 PARAMETER Experiment Name: At_Drought_P Parameter: Treatment Value: Drought vs. No Drought
  misc_feature: MA Experiment ID: 20000439 Result: Down-regulated in Transcription
  misc_feature: MA Experiment 20000439 PARAMETER Experiment Name: At_Roots__P Parameter: Age (day) Value: 14 vs. 21
  misc_feature: MA Experiment 20000439 PARAMETER Experiment Name: At_Roots__P Parameter: Organism Value: A. thaliana
  misc_feature: MA Experiment 20000439 PARAMETER Experiment Name: At_Roots__P Parameter: Tissue Value: Roots vs. Whole Plant
  misc_feature: MA Experiment ID: 20000527 Result: Up-regulated in Transcription
  misc_feature: MA Experiment 20000527 PARAMETER Experiment Name: At_10percent_PEG_P Parameter: Age (day) Value: 20
  misc_feature: MA Experiment 20000527 PARAMETER Experiment Name: At_10percent_PEG_P Parameter: Organism Value: A. thaliana
  misc_feature: MA Experiment 20000527 PARAMETER Experiment Name: At_10percent_PEG_P Parameter: Plant Line Value: WS
  misc_feature: MA Experiment 20000527 PARAMETER Experiment Name: At_10percent_PEG_P Parameter: Timepoint (day) Value: 20
  misc_feature: MA Experiment 20000527 PARAMETER Experiment Name: At_10percent_PEG_P Parameter: Tissue Value: Whole Plant
  misc_feature: MA Experiment 20000527 PARAMETER Experiment Name: At_10percent_PEG_P Parameter: Treatment Value: 10percent PEG vs. No Treatment
  misc_feature: MA Experiment ID: 20001450 Result: Down-regulated in Transcription
  misc_feature: MA Experiment 20001450 PARAMETER Experiment Name: At_Far-red-induction_P Parameter: Age (day) Value: 7
  misc_feature: MA Experiment 20001450 PARAMETER Experiment Name: At_Far-red-induction_P Parameter: Light Value: Far-red vs. White
  misc_feature: MA Experiment 20001450 PARAMETER Experiment Name: At_Far-red-induction_P Parameter: Organism Value: A. thaliana
  misc_feature: MA Experiment 20001450 PARAMETER Experiment Name: At_Far-red-induction_P Parameter: Plant Line Value: Columbia
  misc_feature: MA Experiment 20001450 PARAMETER Experiment Name: At_Far-red-induction_P Parameter: Timepoint (hr) Value: 8
  misc_feature: MA Experiment 20001450 PARAMETER Experiment Name: At_Far-red-induction_P Parameter: Tissue Value: Whole Plant
  misc_feature: MA Experiment ID: 20001556 Result: Up-regulated in Transcription
  misc_feature: MA Experiment 20001556 PARAMETER Experiment Name: At_Drought_Soil_Dry_P Parameter: Age (day) Value: 26
  misc_feature: MA Experiment 20001556 PARAMETER Experiment Name: At_Drought_Soil_Dry_P Parameter: Organism Value: A. thaliana
  misc_feature: MA Experiment 20001556 PARAMETER Experiment Name: At_Drought_Soil_Dry_P Parameter: Plant Line Value: WS
  misc_feature: MA Experiment 20001556 PARAMETER Experiment Name: At_Drought_Soil_Dry_P Parameter: Post Timepoint (hr) Value: None
  misc_feature: MA Experiment 20001556 PARAMETER Experiment Name: At_Drought_Soil_Dry_P Parameter: Post-Treatment Value: None
  misc_feature: MA Experiment 20001556 PARAMETER Experiment Name: At_Drought_Soil_Dry_P Parameter: Timepoint (day) Value: 12
  misc_feature: MA Experiment 20001556 PARAMETER Experiment Name: At_Drought_Soil_Dry_P Parameter: Treatment Value: Drought vs. No Drought
  misc_feature: MA Experiment ID: 20001557 Result: Up-regulated in Transcription
  misc_feature: MA Experiment 20001557 PARAMETER Experiment Name: At_Drought_Soil_Dry_P Parameter: Age (day) Value: 27
  misc_feature: MA Experiment 20001557 PARAMETER Experiment Name: At_Drought_Soil_Dry_P Parameter: Organism Value: A. thaliana
  misc_feature: MA Experiment 20001557 PARAMETER Experiment Name: At_Drought_Soil_Dry_P Parameter: Plant Line Value: WS
  misc_feature: MA Experiment 20001557 PARAMETER Experiment Name: At_Drought_Soil_Dry_P Parameter: Post Timepoint (hr) Value: 3
  misc_feature: MA Experiment 20001557 PARAMETER Experiment Name: At_Drought_Soil_Dry_P Parameter: Post-Treatment Value: Re-Water vs. No Drought
  misc_feature: MA Experiment 20001557 PARAMETER Experiment Name: At_Drought_Soil_Dry_P Parameter: Timepoint (day) Value: 13
  misc_feature: MA Experiment 20001557 PARAMETER Experiment Name: At_Drought_Soil_Dry_P Parameter: Treatment Value: Drought vs. No Drought
  misc_feature: MA Experiment ID: 20001558 Result: Up-regulated in Transcription
  misc_feature: MA Experiment 20001558 PARAMETER Experiment Name: At_Drought_Soil_Dry_P Parameter: Age (day) Value: 27
  misc_feature: MA Experiment 20001558 PARAMETER Experiment Name: At_Drought_Soil_Dry_P Parameter: Organism Value: A. thaliana
  misc_feature: MA Experiment 20001558 PARAMETER Experiment Name: At_Drought_Soil_Dry_P Parameter: Plant Line Value: WS
  misc_feature: MA Experiment 20001558 PARAMETER Experiment Name: At_Drought_Soil_Dry_P Parameter: Post Timepoint (hr) Value: 6
  misc_feature: MA Experiment 20001558 PARAMETER Experiment Name: At_Drought_Soil_Dry_P Parameter: Post-Treatment Value: Re-Water vs. No Drought
  misc_feature: MA Experiment 20001558 PARAMETER Experiment Name: At_Drought_Soil_Dry_P Parameter: Timepoint (day) Value: 13
  misc_feature: MA Experiment 20001558 PARAMETER Experiment Name: At_Drought_Soil_Dry_P Parameter: Treatment Value: Drought vs. No Drought
  misc_feature: MA Experiment ID: 20001560 Result: Up-regulated in Transcription
  misc_feature: MA Experiment 20001560 PARAMETER Experiment Name: At_Drought_Soil_Dry_P Parameter: Age (day) Value: 28
  misc_feature: MA Experiment 20001560 PARAMETER Experiment Name: At_Drought_Soil_Dry_P Parameter: Organism Value: A. thaliana
  misc_feature: MA Experiment 20001560 PARAMETER Experiment Name: At_Drought_Soil_Dry_P Parameter: Plant Line Value: WS
  misc_feature: MA Experiment 20001560 PARAMETER Experiment Name: At_Drought_Soil_Dry_P Parameter: Post Timepoint (hr) Value: None
  misc_feature: MA Experiment 20001560 PARAMETER Experiment Name: At_Drought_Soil_Dry_P Parameter: Post-Treatment Value: None
  misc_feature: MA Experiment 20001560 PARAMETER Experiment Name: At_Drought_Soil_Dry_P Parameter: Timepoint (day) Value: 14
  misc_feature: MA Experiment 20001560 PARAMETER Experiment Name: At_Drought_Soil_Dry_P Parameter: Treatment Value: Drought vs. No Drought
  misc_feature: MA Experiment ID: 20001757 Result: Up-regulated in Transcription
  misc_feature: MA Experiment 20001757 PARAMETER Experiment Name: At_50mM_NH4NO3_L-to-H_P Parameter: Timepoint (hr) Value: 6
  misc_feature: MA Experiment 20001757 PARAMETER Experiment Name: At_50mM_NH4NO3_L-to-H_P Parameter: Tissue Value: Leaf
  misc_feature: MA Experiment 20001757 PARAMETER Experiment Name: At_50mM_NH4NO3_L-to-H_P Parameter: Treatment Value: 50mM NH4NO3 vs 100mM Mannitol
gaacaggatctgttctataggctcgtacctctgtttccttgatttctaaggagacaggccctaaaccctggttgatgaaccatgaccgtgcggtcagagcgtgattgatggctacgatcgtcttcggacgcatccggtgctgtagaggatcgttactcggcttggtcttccttgccggggtggtcgcacggcggtctgacagaaaacaagagataaggttgaagagtgaagcaaagcttagtaatggcttcaatgcacgaagctctgttctcttctcggcttcttcaagtcaattcttctttttccttccgttgcgctcttccaattatctcttcaccagctgcagtatcttgcgcaatcaaatcgacccagttttttaaacagcgttgtagaaccaaagtgagggacttttctctatcttcactgtcccggagagggttccgtttgccagagctgctgagtacaagtttccggatcccatacctgaattcgccgaagctgagactgagaaatttagggaccatatgttaaacaaactatcaaaaagagatctttttgaagactctgttgatgaaattgttggagtctgcactgagatcttcgagacgttcttgcgcagtgagtatggaggacctggtacactcttggtgatacctttcattgacatggcagatactctcaatgaaagggaattgcctggaggtccacaagccgcccgagcagctattaaatgggctcaggatcatgtagacaaggactggaaggaatggaccggcactgattagtcccctgggagcattaagtataatccgtgagttatttagtttagtagtggggtagcagatgtgtcattgtaaaactctgattactatgtcgtgaagcacttaatctttgatcaaaaactgtttggtgtaaacttgtccaaacgactggaaacaagaaaaagaaaagatggcaaaagctttttattgtc

SEQ ID NO: 37067 - protein, 95 aa, Arabidopsis thaliana
  peptide (1)..(95): Ceres Seq. ID no. 12330420
  misc_feature (1)..(66): Homolog of NCBI NO: 18391169 NR Description: Expressed protein
MASMHEALFSSRLLQVNSSFSFRCALPIISSPAAVSCAIKSTQFFKQRCRTKVRDFSLSSLSRRGFRLPELLSTSFRIPYLNSPKLRLRNLGTIC

SEQ ID NO: 37068 - protein, 92 aa, Arabidopsis thaliana
  peptide (1)..(92): Ceres Seq. ID no. 12330421
  misc_feature (1)..(63): Homolog of NCBI NO: 18391169 NR Description: Expressed protein
MHEALFSSRLLQVNSSFSFRCALPIISSPAAVSCAIKSTQFFKQRCRTKVRDFSLSSLSRRGFRLPELLSTSFRIPYLNSPKLRLRNLGTIC

SEQ ID NO: 37069 - protein, 90 aa, Arabidopsis thaliana
  peptide (1)..(90): Ceres Seq. ID no. 12330422
  misc_feature (52)..(90): Homolog of NCBI NO: 18391169 NR Description: Expressed protein
MATIVFGRIRCCRGSLLGLVFLAGVVARRSDRKQEIRLKSEAKLSNGFNARSSVLFSASSSQFFFFLPLRSSNYLFTSCSILRNQIDPVF

SEQ ID NO: 37070 - protein, 86 aa, Arabidopsis thaliana
  peptide (1)..(86): Ceres Seq. ID no. 12330423
  misc_feature (1)..(86): Homolog of NCBI NO: 18391169 NR Description: Expressed protein
MLNKLSKRDLFEDSVDEIVGVCTEIFETFLRSEYGGPGTLLVIPFIDMADTLNERELPGGPQAARAAIKWAQDHVDKDWKEWTGTD

SEQ ID NO: 37071 - DNA, 649 bp, Arabidopsis thaliana
  misc_feature (1)..(649): Ceres Seq. ID no. 12604901
  misc_feature: MA Experiment ID: 20000438 Result: Down-regulated in Transcription
  misc_feature: MA Experiment 20000438 PARAMETER Experiment Name: At_Shoots__P Parameter: Age (day) Value: 14
  misc_feature: MA Experiment 20000438 PARAMETER Experiment Name: At_Shoots__P Parameter: Tissue Value: Shoots vs. Whole Plant
  misc_feature: MA Experiment ID: 20001451 Result: Down-regulated in Transcription
  misc_feature: MA Experiment 20001451 PARAMETER Experiment Name: At_Far-red-induction_P Parameter: Age (day) Value: 7
  misc_feature: MA Experiment 20001451 PARAMETER Experiment Name: At_Far-red-induction_P Parameter: Light Value: Far-red vs. White
  misc_feature: MA Experiment 20001451 PARAMETER Experiment Name: At_Far-red-induction_P Parameter: Organism Value: A. thaliana
  misc_feature: MA Experiment 20001451 PARAMETER Experiment Name: At_Far-red-induction_P Parameter: Plant Line Value: Columbia
  misc_feature: MA Experiment 20001451 PARAMETER Experiment Name: At_Far-red-induction_P Parameter: Timepoint (hr) Value: 24
  misc_feature: MA Experiment 20001451 PARAMETER Experiment Name: At_Far-red-induction_P Parameter: Tissue Value: Whole Plant
  misc_feature: MA Experiment ID: 20001757 Result: Up-regulated in Transcription
  misc_feature: MA Experiment 20001757 PARAMETER Experiment Name: At_50mM_NH4NO3_L-to-H_P Parameter: Timepoint (hr) Value: 6
  misc_feature: MA Experiment 20001757 PARAMETER Experiment Name: At_50mM_NH4NO3_L-to-H_P Parameter: Tissue Value: Leaf
  misc_feature: MA Experiment 20001757 PARAMETER Experiment Name: At_50mM_NH4NO3_L-to-H_P Parameter: Treatment Value: 50mM NH4NO3 vs 100mM Mannitol
  misc_feature: MA Experiment ID: 20001905 Result: Down-regulated in Transcription
  misc_feature: MA Experiment 20001905 PARAMETER Experiment Name: At_Drought_Reproduction_P Parameter: Age (day) Value: 40
  misc_feature: MA Experiment 20001905 PARAMETER Experiment Name: At_Drought_Reproduction_P Parameter: Organism Value: A. thaliana
  misc_feature: MA Experiment 20001905 PARAMETER Experiment Name: At_Drought_Reproduction_P Parameter: Plant Line Value: WS
  misc_feature: MA Experiment 20001905 PARAMETER Experiment Name: At_Drought_Reproduction_P Parameter: Timepoint (day) Value: 10
  misc_feature: MA Experiment 20001905 PARAMETER Experiment Name: At_Drought_Reproduction_P Parameter: Tissue Value: Rosettes
  misc_feature: MA Experiment 20001905 PARAMETER Experiment Name: At_Drought_Reproduction_P Parameter: Treatment Value: Drought vs. No Drought
acacaatcacagaacctaatcttcttctccaatcaatctcagagaaaaaaagaaatggcaacaaaccctaaagtctacttcgacatgaccgtcggtggcaaatccgccggtcgtatcgtgatggagctttacgccgacacaacaccagaaaccgccgagaatttcagagcactctgtaccggagagagaggaatcggtaaacaaggtgatttcacagccgggaatggtaccggaggtgaatctatctatggatcgaagttcaaagacgagaactttatcaagaaacatacaggaccaggtattttgtctatggctaacgctggtgcgaacacgaatggatctcagttttttatttgtactgagaagacttcgtggctcgatgggaaacatgttgtgtttggtcaagttgttgagggattgaatgttgttagagatattgagaaggttggatctgactctggaagaacttctaagcctgttgtcattgctgattgtggtcagatttcttagatctgtctgagattgttgataatgatgatgatgatcttgaggatccaatggtagctttgtgttgtttctctttgatgttttctggtttatgtttttggattttgatatttattgctgttgtgaaactttgagtttggct

SEQ ID NO: 37072 - protein, 169 aa, Arabidopsis thaliana
  peptide (1)..(169): Ceres Seq. ID no. 12604902
  misc_feature (23)..(69): Homolog of NCBI NO: 167138 NR Description: cyclophilin
  misc_feature (69)..(168): Homolog of NCBI NO: 167138 NR Description: cyclophilin
  misc_feature (22)..(69): Homolog of NCBI NO: 68407 NR Description: peptidylprolyl isomerase (EC 5.2.1.8) - rape
  misc_feature (69)..(168): Homolog of NCBI NO: 68407 NR Description: peptidylprolyl isomerase (EC 5.2.1.8) - rape
  misc_feature (22)..(69): Homolog of NCBI NO: 1345921 NR Description: PEPTIDYL-PROLYL CIS-TRANS ISOMERASE (PPIASE)
  misc_feature (69)..(168): Homolog of NCBI NO: 1345921 NR Description: PEPTIDYL-PROLYL CIS-TRANS ISOMERASE (PPIASE)
  misc_feature (19)..(69): Homolog of NCBI NO: 15227259 NR Description: cytosolic cyclophilin (ROC3)
  misc_feature (69)..(169): Homolog of NCBI NO: 15227259 NR Description: cytosolic cyclophilin (ROC3)
TQSQNLIFFSNQSQRKKEMATNPKVYFDMTVGGKSAGRIVMELYADTTPETAENFRALCTGERGIGKQGDFTAGNGTGGESIYGSKFKDENFIKKHTGPGILSMANAGANTNGSQFFICTEKTSWLDGKHVVFGQVVEGLNVVRDIEKVGSDSGRTSKPVVIADCGQIS

SEQ ID NO: 37073 - protein, 151 aa, Arabidopsis thaliana
  peptide (1)..(151): Ceres Seq. ID no. 12604903
  misc_feature (5)..(51): Homolog of NCBI NO: 167138 NR Description: cyclophilin
  misc_feature (51)..(150): Homolog of NCBI NO: 167138 NR Description: cyclophilin
  misc_feature (4)..(51): Homolog of NCBI NO: 68407 NR Description: peptidylprolyl isomerase (EC 5.2.1.8) - rape
  misc_feature (51)..(150): Homolog of NCBI NO: 68407 NR Description: peptidylprolyl isomerase (EC 5.2.1.8) - rape
  misc_feature (4)..(51): Homolog of NCBI NO: 1345921 NR Description: PEPTIDYL-PROLYL CIS-TRANS ISOMERASE (PPIASE)
  misc_feature (51)..(150): Homolog of NCBI NO: 1345921 NR Description: PEPTIDYL-PROLYL CIS-TRANS ISOMERASE (PPIASE)
  misc_feature (1)..(51): Homolog of NCBI NO: 15227259 NR Description: cytosolic cyclophilin (ROC3)
  misc_feature (51)..(151): Homolog of NCBI NO: 15227259 NR Description: cytosolic cyclophilin (ROC3)
MATNPKVYFDMTVGGKSAGRIVMELYADTTPETAENFRALCTGERGIGKQGDFTAGNGTGGESIYGSKFKDENFIKKHTGPGILSMANAGANTNGSQFFICTEKTSWLDGKHVVFGQVVEGLNVVRDIEKVGSDSGRTSKPVVIADCGQIS

SEQ ID NO: 37074 - protein, 141 aa, Arabidopsis thaliana
  peptide (1)..(141): Ceres Seq. ID no. 12604904
  misc_feature (1)..(41): Homolog of NCBI NO: 167138 NR Description: cyclophilin
  misc_feature (41)..(140): Homolog of NCBI NO: 167138 NR Description: cyclophilin
  misc_feature (1)..(41): Homolog of NCBI NO: 68407 NR Description: peptidylprolyl isomerase (EC 5.2.1.8) - rape
  misc_feature (41)..(140): Homolog of NCBI NO: 68407 NR Description: peptidylprolyl isomerase (EC 5.2.1.8) - rape
  misc_feature (1)..(41): Homolog of NCBI NO: 1345921 NR Description: PEPTIDYL-PROLYL CIS-TRANS ISOMERASE (PPIASE)
  misc_feature (41)..(140): Homolog of NCBI NO: 1345921 NR Description: PEPTIDYL-PROLYL CIS-TRANS ISOMERASE (PPIASE)
  misc_feature (1)..(41): Homolog of NCBI NO: 15227259 NR Description: cytosolic cyclophilin (ROC3)
  misc_feature (41)..(141): Homolog of NCBI NO: 15227259 NR Description: cytosolic cyclophilin (ROC3)
MTVGGKSAGRIVMELYADTTPETAENFRALCTGERGIGKQGDFTAGNGTGGESIYGSKFKDENFIKKHTGPGILSMANAGANTNGSQFFICTEKTSWLDGKHVVFGQVVEGLNVVRDIEKVGSDSGRTSKPVVIADCGQIS

SEQ ID NO: 37075 - DNA, 2028 bp, Arabidopsis thaliana
  misc_feature (1)..(2028): Ceres Seq. ID no. 12559842
  misc_feature: MA Experiment ID: 20000171 Result: Down-regulated in Transcription
  misc_feature: MA Experiment 20000171 PARAMETER Experiment Name: At_42deg_Heat_P Parameter: Age (day) Value: 14
  misc_feature: MA Experiment 20000171 PARAMETER Experiment Name: At_42deg_Heat_P Parameter: Organism Value: A. thaliana
  misc_feature: MA Experiment 20000171 PARAMETER Experiment Name: At_42deg_Heat_P Parameter: Plant Line Value: WS
  misc_feature: MA Experiment 20000171 PARAMETER Experiment Name: At_42deg_Heat_P Parameter: Temperature (deg C) Value: 42 vs. 22
  misc_feature: MA Experiment 20000171 PARAMETER Experiment Name: At_42deg_Heat_P Parameter: Timepoint (hr) Value: 1
  misc_feature: MA Experiment 20000171 PARAMETER Experiment Name: At_42deg_Heat_P Parameter: Tissue Value: Aerial
  misc_feature: MA Experiment ID: 20000173 Result: Down-regulated in Transcription
  misc_feature: MA Experiment 20000173 PARAMETER Experiment Name: At_42deg_Heat_P Parameter: Age (day) Value: 14
  misc_feature: MA Experiment 20000173 PARAMETER Experiment Name: At_42deg_Heat_P Parameter: Organism Value: A. thaliana
  misc_feature: MA Experiment 20000173 PARAMETER Experiment Name: At_42deg_Heat_P Parameter: Plant Line Value: WS
  misc_feature: MA Experiment 20000173 PARAMETER Experiment Name: At_42deg_Heat_P Parameter: Temperature (deg C) Value: 42 vs. 22
  misc_feature: MA Experiment 20000173 PARAMETER Experiment Name: At_42deg_Heat_P Parameter: Timepoint (hr) Value: 6
  misc_feature: MA Experiment 20000173 PARAMETER Experiment Name: At_42deg_Heat_P Parameter: Tissue Value: Aerial
  misc_feature: MA Experiment ID: 20000179 Result: Up-regulated in Transcription
  misc_feature: MA Experiment 20000179 PARAMETER Experiment Name: At_Germinating_Seeds_P Parameter: Age (hr) Value: 6 vs. 0
  misc_feature: MA Experiment 20000179 PARAMETER Experiment Name: At_Germinating_Seeds_P Parameter: Tissue Value: Germinating Seeds
  misc_feature: MA Experiment ID: 20000184 Result: Up-regulated in Transcription
  misc_feature: MA Experiment 20000184 PARAMETER Experiment Name: At_Shoots__P Parameter: Age (day) Value: 7
  misc_feature: MA Experiment 20000184 PARAMETER Experiment Name: At_Shoots__P Parameter: Tissue Value: Shoots vs. Whole Plant
  misc_feature: MA Experiment ID: 20000185 Result: Down-regulated in Transcription
  misc_feature: MA Experiment 20000185 PARAMETER Experiment Name: At_Roots__P Parameter: Age (day) Value: 7 vs. 21
  misc_feature: MA Experiment 20000185 PARAMETER Experiment Name: At_Roots__P Parameter: Organism Value: A. thaliana
  misc_feature: MA Experiment 20000185 PARAMETER Experiment Name: At_Roots__P Parameter: Tissue Value: Roots vs. Whole Plant
  misc_feature: MA Experiment ID: 20000227 Result: Up-regulated in Transcription
  misc_feature: MA Experiment 20000227 PARAMETER Experiment Name: At_Root-Tips-vs-Tops_P Parameter: Tissue Value: Root Tips vs. Root Tops
  misc_feature: MA Experiment ID: 20000267 Result: Down-regulated in Transcription
  misc_feature: MA Experiment 20000267 PARAMETER Experiment Name: At_Drought_P Parameter: Age (day) Value: 7
  misc_feature: MA Experiment 20000267 PARAMETER Experiment Name: At_Drought_P Parameter: Organism Value: A. thaliana
  misc_feature: MA Experiment 20000267 PARAMETER Experiment Name: At_Drought_P Parameter: Plant Line Value: WS
  misc_feature: MA Experiment 20000267 PARAMETER Experiment Name: At_Drought_P Parameter: Timepoint (hr) Value: 6
  misc_feature: MA Experiment 20000267 PARAMETER Experiment Name: At_Drought_P Parameter: Tissue Value: Whole Plant
  misc_feature: MA Experiment 20000267 PARAMETER Experiment Name: At_Drought_P Parameter: Treatment Value: Drought vs. No Drought
  misc_feature: MA Experiment ID: 20000308 Result: Down-regulated in Transcription
  misc_feature: MA Experiment 20000308 PARAMETER Experiment Name: At_100mM_NaCl__P Parameter: Age (day) Value: 17
  misc_feature: MA Experiment 20000308 PARAMETER Experiment Name: At_100mM_NaCl__P Parameter: Organism Value: A. thaliana
  misc_feature: MA Experiment 20000308 PARAMETER Experiment Name: At_100mM_NaCl__P Parameter: Plant Line Value: WS
  misc_feature: MA Experiment 20000308 PARAMETER Experiment Name: At_100mM_NaCl__P Parameter: Timepoint (hr) Value: 72
  misc_feature: MA Experiment 20000308 PARAMETER Experiment Name: At_100mM_NaCl__P Parameter: Tissue Value: Whole Plant
  misc_feature: MA Experiment 20000308 PARAMETER Experiment Name: At_100mM_NaCl__P Parameter: Treatment Value: 100mM NaCl vs. No Treatment
  misc_feature: MA Experiment ID: 20000436 Result: Down-regulated in Transcription
  misc_feature: MA Experiment 20000436 PARAMETER Experiment Name: At_Drought_P Parameter: Age (day) Value: 7
  misc_feature: MA Experiment 20000436 PARAMETER Experiment Name: At_Drought_P Parameter: Organism Value: A. thaliana
  misc_feature: MA Experiment 20000436 PARAMETER Experiment Name: At_Drought_P Parameter: Plant Line Value: WS
  misc_feature: MA Experiment 20000436 PARAMETER Experiment Name: At_Drought_P Parameter: Timepoint (hr) Value: 12
  misc_feature: MA Experiment 20000436 PARAMETER Experiment Name: At_Drought_P Parameter: Tissue Value: Whole Plant
  misc_feature: MA Experiment 20000436 PARAMETER Experiment Name: At_Drought_P Parameter: Treatment Value: Drought vs. No Drought
  misc_feature: MA Experiment ID: 20000437 Result: Down-regulated in Transcription
  misc_feature: MA Experiment 20000437 PARAMETER Experiment Name: At_Drought_P Parameter: Age (day) Value: 8
  misc_feature: MA Experiment 20000437 PARAMETER Experiment Name: At_Drought_P Parameter: Organism Value: A. thaliana
  misc_feature: MA Experiment 20000437 PARAMETER Experiment Name: At_Drought_P Parameter: Plant Line Value: WS
  misc_feature: MA Experiment 20000437 PARAMETER Experiment Name: At_Drought_P Parameter: Timepoint (hr) Value: 24
  misc_feature: MA Experiment 20000437 PARAMETER Experiment Name: At_Drought_P Parameter: Tissue Value: Whole Plant
  misc_feature: MA Experiment 20000437 PARAMETER Experiment Name: At_Drought_P Parameter: Treatment Value: Drought vs. No Drought
  misc_feature: MA Experiment ID: 20000438 Result: Up-regulated in Transcription
  misc_feature: MA Experiment 20000438 PARAMETER Experiment Name: At_Shoots__P Parameter: Age (day) Value: 14
  misc_feature: MA Experiment 20000438 PARAMETER Experiment Name: At_Shoots__P Parameter: Tissue Value: Shoots vs. Whole Plant
  misc_feature: MA Experiment ID: 20000527 Result: Up-regulated in Transcription
  misc_feature: MA Experiment 20000527 PARAMETER Experiment Name: At_10percent_PEG_P Parameter: Age (day) Value: 20
  misc_feature: MA Experiment 20000527 PARAMETER Experiment Name: At_10percent_PEG_P Parameter: Organism Value: A. thaliana
  misc_feature: MA Experiment 20000527 PARAMETER Experiment Name: At_10percent_PEG_P Parameter: Plant Line Value: WS
  misc_feature: MA Experiment 20000527 PARAMETER Experiment Name: At_10percent_PEG_P Parameter: Timepoint (day) Value: 20
  misc_feature: MA Experiment 20000527 PARAMETER Experiment Name: At_10percent_PEG_P Parameter: Tissue Value: Whole Plant
  misc_feature: MA Experiment 20000527 PARAMETER Experiment Name: At_10percent_PEG_P Parameter: Treatment Value: 10percent PEG vs. No Treatment
  misc_feature: MA Experiment ID: 20000709 Result: Up-regulated in Transcription
  misc_feature: MA Experiment 20000709 PARAMETER Experiment Name: At_15mM_NH4NO3_L-to-H_P Parameter: Age (hr) Value: 14
  misc_feature: MA Experiment 20000709 PARAMETER Experiment Name: At_15mM_NH4NO3_L-to-H_P Parameter: Organism Value: A. thaliana
  misc_feature: MA Experiment 20000709 PARAMETER Experiment Name: At_15mM_NH4NO3_L-to-H_P Parameter: Plant Line Value: WS
  misc_feature: MA Experiment 20000709 PARAMETER Experiment Name: At_15mM_NH4NO3_L-to-H_P Parameter: Timepoint (hr) Value: 4
  misc_feature: MA Experiment 20000709 PARAMETER Experiment Name: At_15mM_NH4NO3_L-to-H_P Parameter: Tissue Value: Aerial
  misc_feature: MA Experiment 20000709 PARAMETER Experiment Name: At_15mM_NH4NO3_L-to-H_P Parameter: Treatment Value: 15mM NH4NO3 vs. 30mM Mannitol
  misc_feature: MA Experiment ID: 20000794 Result: Down-regulated in Transcription
  misc_feature: MA Experiment 20000794 PARAMETER Experiment Name: At_Petals_P Parameter: Age (day) Value: 23-25 days
  misc_feature: MA Experiment 20000794 PARAMETER Experiment Name: At_Petals_P Parameter: Plant Line Value: WS
  misc_feature: MA Experiment 20000794 PARAMETER Experiment Name: At_Petals_P Parameter: Tissue Value: Petals vs. Whole plant
  misc_feature: MA Experiment ID: 20001248 Result: Down-regulated in Transcription
  misc_feature: MA Experiment 20001248 PARAMETER Experiment Name: At_Far-red-induction_P Parameter: Age (day) Value: 7
  misc_feature: MA Experiment 20001248 PARAMETER Experiment Name: At_Far-red-induction_P Parameter: Light Value: Far-red vs. White
  misc_feature: MA Experiment 20001248 PARAMETER Experiment Name: At_Far-red-induction_P Parameter: Organism Value: A. thaliana
  misc_feature: MA Experiment 20001248 PARAMETER Experiment Name: At_Far-red-induction_P Parameter: Plant Line Value: Columbia
  misc_feature: MA Experiment 20001248 PARAMETER Experiment Name: At_Far-red-induction_P Parameter: Timepoint (hr) Value: 4
  misc_feature: MA Experiment 20001248 PARAMETER Experiment Name: At_Far-red-induction_P Parameter: Tissue Value: Whole Plant
  misc_feature: MA Experiment ID: 20001450 Result: Down-regulated in Transcription
  misc_feature: MA Experiment 20001450 PARAMETER Experiment Name: At_Far-red-induction_P Parameter: Age (day) Value: 7
  misc_feature: MA Experiment 20001450 PARAMETER Experiment Name: At_Far-red-induction_P Parameter: Light Value: Far-red vs. White
  misc_feature: MA Experiment 20001450 PARAMETER Experiment Name: At_Far-red-induction_P Parameter: Organism Value: A. thaliana
  misc_feature: MA Experiment 20001450 PARAMETER Experiment Name: At_Far-red-induction_P Parameter: Plant Line Value: Columbia
  misc_feature: MA Experiment 20001450 PARAMETER Experiment Name: At_Far-red-induction_P Parameter: Timepoint (hr) Value: 8
  misc_feature: MA Experiment 20001450 PARAMETER Experiment Name: At_Far-red-induction_P Parameter: Tissue Value: Whole Plant
  misc_feature: MA Experiment ID: 20001457 Result: Up-regulated in Transcription
  misc_feature: MA Experiment 20001457 PARAMETER Experiment Name: At_50mM_NH4NO3_L-to-H_P Parameter: Age (day) Value: Undefined
  misc_feature: MA Experiment 20001457 PARAMETER Experiment Name: At_50mM_NH4NO3_L-to-H_P Parameter: Organism Value: Undefined
  misc_feature: MA Experiment 20001457 PARAMETER Experiment Name: At_50mM_NH4NO3_L-to-H_P Parameter: Plant Line Value: Undefined
  misc_feature: MA Experiment 20001457 PARAMETER Experiment Name: At_50mM_NH4NO3_L-to-H_P Parameter: Timepoint (hr) Value: 0.5
  misc_feature: MA Experiment 20001457 PARAMETER Experiment Name: At_50mM_NH4NO3_L-to-H_P Parameter: Tissue Value: Siliques
  misc_feature: MA Experiment 20001457 PARAMETER Experiment Name: At_50mM_NH4NO3_L-to-H_P Parameter: Treatment Value: 50mM NH4NO3 vs. 100mM Manitol
  misc_feature: MA Experiment ID: 20001458 Result: Up-regulated in Transcription
  misc_feature: MA Experiment 20001458 PARAMETER Experiment Name: At_50mM_NH4NO3_L-to-H_P Parameter: Age (day) Value: Undefined
  misc_feature: MA Experiment 20001458 PARAMETER Experiment Name: At_50mM_NH4NO3_L-to-H_P Parameter: Organism Value: Undefined
  misc_feature: MA Experiment 20001458 PARAMETER Experiment Name: At_50mM_NH4NO3_L-to-H_P Parameter: Plant Line Value: Undefined
  misc_feature: MA Experiment 20001458 PARAMETER Experiment Name: At_50mM_NH4NO3_L-to-H_P Parameter: Timepoint (hr) Value: 2
  misc_feature: MA Experiment 20001458 PARAMETER Experiment Name: At_50mM_NH4NO3_L-to-H_P Parameter: Tissue Value: Siliques
  misc_feature: MA Experiment 20001458 PARAMETER Experiment Name: At_50mM_NH4NO3_L-to-H_P Parameter: Treatment Value: 50mM NH4NO3 vs. 100mM Manitol
  misc_feature: MA Experiment ID: 20001459 Result: Up-regulated in Transcription
  misc_feature: MA Experiment 20001459 PARAMETER Experiment Name: At_50mM_NH4NO3_L-to-H_P Parameter: Age (day) Value: Undefined
  misc_feature: MA Experiment 20001459 PARAMETER Experiment Name: At_50mM_NH4NO3_L-to-H_P Parameter: Organism Value: Undefined
  misc_feature: MA Experiment 20001459 PARAMETER Experiment Name: At_50mM_NH4NO3_L-to-H_P Parameter: Plant Line Value: Undefined
  misc_feature: MA Experiment 20001459 PARAMETER Experiment Name: At_50mM_NH4NO3_L-to-H_P Parameter: Timepoint (hr) Value: 4
  misc_feature: MA Experiment 20001459 PARAMETER Experiment Name: At_50mM_NH4NO3_L-to-H_P Parameter: Tissue Value: Siliques
  misc_feature: MA Experiment 20001459 PARAMETER Experiment Name: At_50mM_NH4NO3_L-to-H_P Parameter: Treatment Value: 50mM NH4NO3 vs. 100mM Manitol
  misc_feature: MA Experiment ID: 20001555 Result: Up-regulated in Transcription
  misc_feature: MA Experiment 20001555 PARAMETER Experiment Name: At_Drought_Soil_Dry_P Parameter: Age (day) Value: 24
  misc_feature: MA Experiment 20001555 PARAMETER Experiment Name: At_Drought_Soil_Dry_P Parameter: Organism Value: A. thaliana
  misc_feature: MA Experiment 20001555 PARAMETER Experiment Name: At_Drought_Soil_Dry_P Parameter: Plant Line Value: WS
  misc_feature: MA Experiment 20001555 PARAMETER Experiment Name: At_Drought_Soil_Dry_P Parameter: Post Timepoint (hr) Value: None
  misc_feature: MA Experiment 20001555 PARAMETER Experiment Name: At_Drought_Soil_Dry_P Parameter: Post-Treatment Value: None
  misc_feature: MA Experiment 20001555 PARAMETER Experiment Name: At_Drought_Soil_Dry_P Parameter: Timepoint (day) Value: 10
  misc_feature: MA Experiment 20001555 PARAMETER Experiment Name: At_Drought_Soil_Dry_P Parameter: Treatment Value: Drought vs. No Drought
  misc_feature: MA Experiment ID: 20001557 Result: Up-regulated in Transcription
  misc_feature: MA Experiment 20001557 PARAMETER Experiment Name: At_Drought_Soil_Dry_P Parameter: Age (day) Value: 27
  misc_feature: MA Experiment 20001557 PARAMETER Experiment Name: At_Drought_Soil_Dry_P Parameter: Organism Value: A. thaliana
  misc_feature: MA Experiment 20001557 PARAMETER Experiment Name: At_Drought_Soil_Dry_P Parameter: Plant Line Value: WS
  misc_feature: MA Experiment 20001557 PARAMETER Experiment Name: At_Drought_Soil_Dry_P Parameter: Post Timepoint (hr) Value: 3
  misc_feature: MA Experiment 20001557 PARAMETER Experiment Name: At_Drought_Soil_Dry_P Parameter: Post-Treatment Value: Re-Water vs. No Drought
  misc_feature: MA Experiment 20001557 PARAMETER Experiment Name: At_Drought_Soil_Dry_P Parameter: Timepoint (day) Value: 13
  misc_feature: MA Experiment 20001557 PARAMETER Experiment Name: At_Drought_Soil_Dry_P Parameter: Treatment Value: Drought vs. No Drought
  misc_feature: MA Experiment ID: 20001560 Result: Up-regulated in Transcription
  misc_feature: MA Experiment 20001560 PARAMETER Experiment Name: At_Drought_Soil_Dry_P Parameter: Age (day) Value: 28
  misc_feature: MA Experiment 20001560 PARAMETER Experiment Name: At_Drought_Soil_Dry_P Parameter: Organism Value: A. thaliana
  misc_feature: MA Experiment 20001560 PARAMETER Experiment Name: At_Drought_Soil_Dry_P Parameter: Plant Line Value: WS
  misc_feature: MA Experiment 20001560 PARAMETER Experiment Name: At_Drought_Soil_Dry_P Parameter: Post Timepoint (hr) Value: None
  misc_feature: MA Experiment 20001560 PARAMETER Experiment Name: At_Drought_Soil_Dry_P Parameter: Post-Treatment Value: None
  misc_feature: MA Experiment 20001560 PARAMETER Experiment Name: At_Drought_Soil_Dry_P Parameter: Timepoint (day) Value: 14
  misc_feature: MA Experiment 20001560 PARAMETER Experiment Name: At_Drought_Soil_Dry_P Parameter: Treatment Value: Drought vs. No Drought
  misc_feature: MA Experiment ID: 20001757 Result: Up-regulated in Transcription
  misc_feature: MA Experiment 20001757 PARAMETER Experiment Name: At_50mM_NH4NO3_L-to-H_P Parameter: Timepoint (hr) Value: 6
  misc_feature: MA Experiment 20001757 PARAMETER Experiment Name: At_50mM_NH4NO3_L-to-H_P Parameter: Tissue Value: Leaf
  misc_feature: MA Experiment 20001757 PARAMETER Experiment Name: At_50mM_NH4NO3_L-to-H_P Parameter: Treatment Value: 50mM NH4NO3 vs 100mM Mannitol
  misc_feature: MA Experiment ID: 20001759 Result: Up-regulated in Transcription
  misc_feature: MA Experiment 20001759 PARAMETER Experiment Name: At_50mM_NH4NO3_L-to-H_P Parameter: Timepoint (hr) Value: 1
  misc_feature: MA Experiment 20001759 PARAMETER Experiment Name: At_50mM_NH4NO3_L-to-H_P Parameter: Tissue Value: Siliques
  misc_feature: MA Experiment 20001759 PARAMETER Experiment Name: At_50mM_NH4NO3_L-to-H_P Parameter: Treatment Value: 50mM NH4NO3 vs 100mM Mannitol
  misc_feature: MA Experiment ID: 20001760 Result: Up-regulated in Transcription
  misc_feature: MA Experiment 20001760 PARAMETER Experiment Name: At_50mM_NH4NO3_L-to-H_P Parameter: Timepoint (hr) Value: 2
  misc_feature: MA Experiment 20001760 PARAMETER Experiment Name: At_50mM_NH4NO3_L-to-H_P Parameter: Tissue Value: Siliques
  misc_feature: MA Experiment 20001760 PARAMETER Experiment Name: At_50mM_NH4NO3_L-to-H_P Parameter: Treatment Value: 50mM NH4NO3 vs 100mM Mannitol
  misc_feature: MA Experiment ID: 20001906 Result: Down-regulated in Transcription
  misc_feature: MA Experiment 20001906 PARAMETER Experiment Name: At_Drought_Reproduction_P Parameter: Age (day) Value: 35
  misc_feature: MA Experiment 20001906 PARAMETER Experiment Name: At_Drought_Reproduction_P Parameter: Organism Value: A. thaliana
  misc_feature: MA Experiment 20001906 PARAMETER Experiment Name: At_Drought_Reproduction_P Parameter: Plant Line Value: WS
  misc_feature: MA Experiment 20001906 PARAMETER Experiment Name: At_Drought_Reproduction_P Parameter: Timepoint (day) Value: 5
  misc_feature: MA Experiment 20001906 PARAMETER Experiment Name: At_Drought_Reproduction_P Parameter: Tissue Value: Siliques
  misc_feature: MA Experiment 20001906 PARAMETER Experiment Name: At_Drought_Reproduction_P Parameter: Treatment Value: Drought vs. No Drought
  misc_feature: MA Experiment ID: 20001908 Result: Down-regulated in Transcription
  misc_feature: MA Experiment 20001908 PARAMETER Experiment Name: At_Drought_Reproduction_P Parameter: Age (day) Value: 40
  misc_feature: MA Experiment 20001908 PARAMETER Experiment Name: At_Drought_Reproduction_P Parameter: Organism Value: A. thaliana
  misc_feature: MA Experiment 20001908 PARAMETER Experiment Name: At_Drought_Reproduction_P Parameter: Plant Line Value: WS
  misc_feature: MA Experiment 20001908 PARAMETER Experiment Name: At_Drought_Reproduction_P Parameter: Timepoint (day) Value: 10
  misc_feature: MA Experiment 20001908 PARAMETER Experiment Name: At_Drought_Reproduction_P Parameter: Tissue Value: Siliques
  misc_feature: MA Experiment 20001908 PARAMETER Experiment Name: At_Drought_Reproduction_P Parameter: Treatment Value: Drought vs. No Drought
  misc_feature: MA Experiment ID: 20001911 Result: Down-regulated in Transcription
  misc_feature: MA Experiment 20001911 PARAMETER Experiment Name: At_Drought_Reproduction_P Parameter: Age (day) Value: 40
  misc_feature: MA Experiment 20001911 PARAMETER Experiment Name: At_Drought_Reproduction_P Parameter: Organism Value: A. thaliana
  misc_feature: MA Experiment 20001911 PARAMETER Experiment Name: At_Drought_Reproduction_P Parameter: Plant Line Value: WS
  misc_feature: MA Experiment 20001911 PARAMETER Experiment Name: At_Drought_Reproduction_P Parameter: Timepoint (day) Value: 10
  misc_feature: MA Experiment 20001911 PARAMETER Experiment Name: At_Drought_Reproduction_P Parameter: Tissue Value: Flowers
  misc_feature: MA Experiment 20001911 PARAMETER Experiment Name: At_Drought_Reproduction_P Parameter: Treatment Value: Drought vs. No Drought
attgttatttgttttcgttgccactctaacacaatgtgtgggattctcgctgttcttggttgcatcgacaactctcaagctaaacgttctcgtatcatcgaactctctcgcagattgaggcacagaggtcctgattggagtggactccattgttatgaagattgttatcttgcccatgagcgtttagccatcattgaccctacttcaggagaccaacctctctataacgaagacaagaccgtcgctgtcactgtaaatggagagatatacaaccacaagattttgcgtgaaaagcttaagtctcatcagttccgtactggtagtgactgtgaagtgattgcacatctttacgaagaacatggagaggaatttatcgacatgttggatggaatgttcgcgtttgtccttcttgatactcgcgacaaaagttttattgctgcaagggacgctattggtatcactccactttacattggatggggtcttgatggttctgtctggtttgcttcggagatgaaagcgcttagtgatgattgtgaacagtttatgtcttttcctcctggccacatctactcaagtaaacaaggagggcttaggaggtggtacaatcctccgtggtacaatgagcaggttccttcaaccccatatgatcctttagttctgcgcaatgctttcgagaaggctgtaataaagagacttatgactgatgtgccttttggagttctcctatctggaggattggactcgtctctcgttgctgcagtagcattacgccatttggaaaaatcagaagctgctcgtcaatggggttcacaattgcacacgttttgcatcggtttgcagggatcgccagatcttaaagctggcagagaagttgctgactatcttggaacacgccaccacgagtttcagtttacagttcaggacgggatagacgcgatagaggaagtcatttaccatattgagacttatgacgttactacaataagagctagcaccccaatgtttcttatgtccagaaaaattaaatctttaggtgtaaagatggttctttctggggaaggttctgatgaaatactggggggatacttgtacttccataaggctcccaacaagaaagaatttcatgaagaaacatgccgaaagatcaaagctctccaccaatttgattgtttgagagctaacaaatcaacttctgcgtggggtgtcgaagctcgtgtgcctttcctagataaagaatttttaaatgttgcaatgagcatcgatccagagtggaagttgatcaagcctgatctcggaaggatcgagaagtgggtgctacgcaatgcctttgatgatgaagaacgaccttatctaccaaagcacattctatatagacagaaagaacagtttagtgatggagttgggtatagctggatagatggtctgaaagatcatgcaaataaacatgtctctgatactatgctgtcaaacgcaagctttgtcttcccggataacacacctctgacaaaagaagcgtactactacagaaccatcttcgagaagttcttcccgaagagtgctgctagagcgactgtaccaggaggtccaagtatagcttgcagtaccgcgaaagctgtagaatgggatgcaacttggtcaaagaatcttgatccgtcaggccgtgcggctcttggagttcatgttgcagcttatgaagaggataaagcagctgctgctgctaaggctggatcggatttagtagatcctcttcctaagaatggaacataagagaacaacactacaggcattgaggatataagcaaatgttttattcttctacacagagagatcgttatcttctagagggatcaatgaataaaagcttcgtccatttctagctggagattccatggatctccagttagtgcaagtgatacacgttgtctacatttgtacctaagtttctgcattttttgtcgttcttttgtgttagacaagtcttggaccctagatgatacttcagtttcttagacgttaaatttgatg

SEQ ID NO: 37076 - protein, 589 aa, Arabidopsis thaliana
  peptide (1)..(589): Ceres Seq. ID no. 12559843
  misc_feature (204)..(527): Pfam Name: Asparagine synthase Pfam Description: Asparagine synthase
  misc_feature (204)..(527): Pfam Name: Asparagine synthase Pfam Description: Asparagine synthase
  misc_feature (204)..(527): Pfam Name: Asparagine synthase Pfam Description: Asparagine synthase
  misc_feature (6)..(566): Homolog of NCBI NO: 26246639 NR Description: Asparagine synthetase B
  misc_feature (12)..(589): Homolog of NCBI NO: 3132675 NR Description: asparagine synthetase [Elaeagnus umbellata]
  misc_feature (12)..(586): Homolog of NCBI NO: 399064 NR Description: Asparagine synthase [glutamine-hydrolyzing] (AS)
  misc_feature (12)..(586): Homolog of NCBI NO: 1617002 NR Description: asparagine synthetase [Asparagus officinalis]
  misc_feature (12)..(578): Homolog of NCBI NO: 13925886 NR Description: glutamine-dependent asparagine synthetase 1
  misc_feature (6)..(566): Homolog of NCBI NO: 26246639 NR Description: Asparagine synthetase B
  misc_feature (12)..(586): Homolog of NCBI NO: 399064 NR Description: Asparagine synthase [glutamine-hydrolyzing] (AS)
  misc_feature (12)..(578): Homolog of NCBI NO: 13925886 NR Description: glutamine-dependent asparagine synthetase 1
  misc_feature (12)..(586): Homolog of NCBI NO: 1617002 NR Description: asparagine synthetase [Asparagus officinalis]
  misc_feature (12)..(586): Homolog of NCBI NO: 399064 NR Description: Asparagine synthase [glutamine-hydrolyzing] (AS)
  misc_feature (12)..(589): Homolog of NCBI NO: 3132675 NR Description: asparagine synthetase [Elaeagnus umbellata]
  misc_feature (6)..(566): Homolog of NCBI NO: 26246639 NR Description: Asparagine synthetase B
  misc_feature (12)..(569): Homolog of NCBI NO: 15238108 NR Description: asparagine synthetase ASN3
  misc_feature (12)..(569): Homolog of NCBI NO: 25293864 NR Description: asparagine synthase (glutamine-hydrolyzing) (EC
  misc_feature (12)..(571): Homolog of NCBI NO: 22208544 NR Description: asparagine synthetase 2 [Striga hermonthica]
  misc_feature (12)..(569): Homolog of NCBI NO: 6049843 NR Description: asparagine synthetase [Helianthus annuus]
  misc_feature (12)..(574): Homolog of NCBI NO: 3182921 NR Description: Asparagine synthetase
  misc_feature (12)..(569): Homolog of NCBI NO: 15238108 NR Description: asparagine synthetase ASN3
  misc_feature (12)..(569): Homolog of NCBI NO: 25293864 NR Description: asparagine synthase (glutamine-hydrolyzing) (EC
  misc_feature (12)..(571): Homolog of NCBI NO: 22208544 NR Description: asparagine synthetase 2 [Striga hermonthica]
  misc_feature (12)..(569): Homolog of NCBI NO: 6049843 NR Description: asparagine synthetase [Helianthus annuus]
  misc_feature (12)..(574): Homolog of NCBI NO: 3182921 NR Description: Asparagine synthetase
  misc_feature (12)..(578): Homolog of NCBI NO: 13925886 NR Description: glutamine-dependent asparagine synthetase 1
  misc_feature (12)..(586): Homolog of NCBI NO: 1617002 NR Description: asparagine synthetase [Asparagus officinalis]
  misc_feature (12)..(589): Homolog of NCBI NO: 3132675 NR Description: asparagine synthetase [Elaeagnus umbellata]
  misc_feature (12)..(574): Homolog of NCBI NO: 3182921 NR Description: Asparagine synthetase
  misc_feature (12)..(569): Homolog of NCBI NO: 6049843 NR Description: asparagine synthetase [Helianthus annuus]
  misc_feature (12)..(571): Homolog of NCBI NO: 22208544 NR Description: asparagine synthetase 2 [Striga hermonthica]
  misc_feature (12)..(569): Homolog of NCBI NO: 25293864 NR Description: asparagine synthase (glutamine-hydrolyzing) (EC
  misc_feature (12)..(569): Homolog of NCBI NO: 15238108 NR Description: asparagine synthetase ASN3
IVICFRCHSNTMCGILAVLGCIDNSQAKRSRIIELSRRLRHRGPDWSGLHCYEDCYLAHERLAIIDPTSGDQPLYNEDKTVAVTVNGEIYNHKILREKLKSHQFRTGSDCEVIAHLYEEHGEEFIDMLDGMFAFVLLDTRDKSFIAARDAIGITPLYIGWGLDGSVWFASEMKALSDDCEQFMSFPPGHIYSSKQGGLRRWYNPPWYNEQVPSTPYDPLVLRNAFEKAVIKRLMTDVPFGVLLSGGLDSSLVAAVALRHLEKSEAARQWGSQLHTFCIGLQGSPDLKAGREVADYLGTRHHEFQFTVQDGIDAIEEVIYHIETYDVTTIRASTPMFLMSRKIKSLGVKMVLSGEGSDEILGGYLYFHKAPNKKEFHEETCRKIKALHQFDCLRANKSTSAWGVEARVPFLDKEFLNVAMSIDPEWKLIKPDLGRIEKWVLRNAFDDEERPYLPKHILYRQKEQFSDGVGYSWIDGLKDHANKHVSDTMLSNASFVFPDNTPLTKEAYYYRTIFEKFFPKSAARATVPGGPSIACSTAKAVEWDATWSKNLDPSGRAALGVHVAAYEEDKAAAAAKAGSDLVDPLPKNGT

SEQ ID NO: 37077 - protein, 578 aa, Arabidopsis thaliana
  peptide (1)..(578): Ceres Seq. ID no. 12559844
  misc_feature (193)..(516): Pfam Name: Asparagine synthase Pfam Description: Asparagine synthase
  misc_feature (193)..(516): Pfam Name: Asparagine synthase Pfam Description: Asparagine synthase
  misc_feature (193)..(516): Pfam Name: Asparagine synthase Pfam Description: Asparagine synthase
  misc_feature (1)..(555): Homolog of NCBI NO: 26246639 NR Description: Asparagine synthetase B
  misc_feature (1)..(578): Homolog of NCBI NO: 3132675 NR Description: asparagine synthetase [Elaeagnus umbellata]
  misc_feature (1)..(575): Homolog of NCBI NO: 399064 NR Description: Asparagine synthase [glutamine-hydrolyzing] (AS)
  misc_feature (1)..(575): Homolog of NCBI NO: 1617002 NR Description: asparagine synthetase [Asparagus officinalis]
  misc_feature (1)..(567): Homolog of NCBI NO: 13925886 NR Description: glutamine-dependent asparagine synthetase 1
  misc_feature (1)..(555): Homolog of NCBI NO: 26246639 NR Description: Asparagine synthetase B
  misc_feature (1)..(575): Homolog of NCBI NO: 399064 NR Description: Asparagine synthase [glutamine-hydrolyzing] (AS)
  misc_feature (1)..(567): Homolog of NCBI NO: 13925886 NR Description: glutamine-dependent asparagine synthetase 1
  misc_feature (1)..(575): Homolog of NCBI NO: 1617002 NR Description: asparagine synthetase [Asparagus officinalis]
  misc_feature (1)..(575): Homolog of NCBI NO: 399064 NR Description: Asparagine synthase [glutamine-hydrolyzing] (AS)
  misc_feature (1)..(578): Homolog of NCBI NO: 3132675 NR Description: asparagine synthetase [Elaeagnus umbellata]
  misc_feature (1)..(555): Homolog of NCBI NO: 26246639 NR Description: Asparagine synthetase B
  misc_feature (1)..(558): Homolog of NCBI NO: 15238108 NR Description: asparagine synthetase ASN3
  misc_feature (1)..(558): Homolog of NCBI NO: 25293864 NR Description: asparagine synthase (glutamine-hydrolyzing) (EC
  misc_feature (1)..(560): Homolog of NCBI NO: 22208544 NR Description: asparagine synthetase 2 [Striga hermonthica]
  misc_feature (1)..(558): Homolog of NCBI NO: 6049843 NR Description: asparagine synthetase [Helianthus annuus]
  misc_feature (1)..(563): Homolog of NCBI NO: 3182921 NR Description: Asparagine synthetase
  misc_feature (1)..(558): Homolog of NCBI NO: 15238108 NR Description: asparagine synthetase ASN3
  misc_feature (1)..(558): Homolog of NCBI NO: 25293864 NR Description: asparagine synthase (glutamine-hydrolyzing) (EC
  misc_feature (1)..(560): Homolog of NCBI NO: 22208544 NR Description: asparagine synthetase 2 [Striga hermonthica]
  misc_feature (1)..(558): Homolog of NCBI NO: 6049843 NR Description: asparagine synthetase [Helianthus annuus]
  misc_feature (1)..(563): Homolog of NCBI NO: 3182921 NR Description: Asparagine synthetase
  misc_feature (1)..(567): Homolog of NCBI NO: 13925886 NR Description: glutamine-dependent asparagine synthetase 1
  misc_feature (1)..(575): Homolog of NCBI NO: 1617002 NR Description: asparagine synthetase [Asparagus officinalis]
  misc_feature (1)..(578): Homolog of NCBI NO: 3132675 NR Description: asparagine synthetase [Elaeagnus umbellata]
  misc_feature (1)..(563): Homolog of NCBI NO: 3182921 NR Description: Asparagine synthetase
  misc_feature (1)..(558): Homolog of NCBI NO: 6049843 NR Description: asparagine synthetase [Helianthus annuus]
  misc_feature (1)..(560): Homolog of NCBI NO: 22208544 NR Description: asparagine synthetase 2 [Striga hermonthica]
  misc_feature (1)..(558): Homolog of NCBI NO: 25293864 NR Description: asparagine synthase (glutamine-hydrolyzing) (EC
  misc_feature (1)..(558): Homolog of NCBI NO: 15238108 NR Description: asparagine synthetase ASN3
MCGILAVLGCIDNSQAKRSRIIELSRRLRHRGPDWSGLHCYEDCYLAHERLAIIDPTSGDQPLYNEDKTVAVTVNGEIYNHKILREKLKSHQFRTGSDCEVIAHLYEEHGEEFIDMLDGMFAFVLLDTRDKSFIAARDAIGITPLYIGWGLDGSVWFASEMKALSDDCEQFMSFPPGHIYSSKQGGLRRWYNPPWYNEQVPSTPYDPLVLRNAFEKAVIKRLMTDVPFGVLLSGGLDSSLVAAVALRHLEKSEAARQWGSQLHTFCIGLQGSPDLKAGREVADYLGTRHHEFQFTVQDGIDAIEEVIYHIETYDVTTIRASTPMFLMSRKIKSLGVKMVLSGEGSDEILGGYLYFHKAPNKKEFHEETCRKIKALHQFDCLRANKSTSAWGVEARVPFLDKEFLNVAMSIDPEWKLIKPDLGRIEKWVLRNAFDDEERPYLPKHILYRQKEQFSDGVGYSWIDGLKDHANKHVSDTMLSNASFVFPDNTPLTKEAYYYRTIFEKFFPKSAARATVPGGPSIACSTAKAVEWDATWSKNLDPSGRAALGVHVAAYEEDKAAAAAKAGSDLVDPLPKNGT

SEQ ID NO: 37078 - protein, 463 aa, Arabidopsis thaliana
  peptide (1)..(463): Ceres Seq. ID no. 12559845
  misc_feature (78)..(401): Pfam Name: Asparagine synthase Pfam Description: Asparagine synthase
  misc_feature (78)..(401): Pfam Name: Asparagine synthase Pfam Description: Asparagine synthase
  misc_feature (78)..(401): Pfam Name: Asparagine synthase Pfam Description: Asparagine synthase
  misc_feature (1)..(440): Homolog of NCBI NO: 26246639 NR Description: Asparagine synthetase B
  misc_feature (1)..(463): Homolog of NCBI NO: 3132675 NR Description: asparagine synthetase [Elaeagnus umbellata]
  misc_feature (1)..(460): Homolog of NCBI NO: 399064 NR Description: Asparagine synthase [glutamine-hydrolyzing] (AS)
  misc_feature (1)..(460): Homolog of NCBI NO: 1617002 NR Description: asparagine synthetase [Asparagus officinalis]
  misc_feature (1)..(452): Homolog of NCBI NO: 13925886 NR Description: glutamine-dependent asparagine synthetase 1
  misc_feature (1)..(440): Homolog of NCBI NO: 26246639 NR Description: Asparagine synthetase B
  misc_feature (1)..(460): Homolog of NCBI NO: 399064 NR Description: Asparagine synthase [glutamine-hydrolyzing] (AS)
  misc_feature (1)..(452): Homolog of NCBI NO: 13925886 NR Description: glutamine-dependent asparagine synthetase 1
  misc_feature (1)..(460): Homolog of NCBI NO: 1617002 NR Description: asparagine synthetase [Asparagus officinalis]
  misc_feature (1)..(460): Homolog of NCBI NO: 399064 NR Description: Asparagine synthase [glutamine-hydrolyzing] (AS)
  misc_feature (1)..(463): Homolog of NCBI NO: 3132675 NR Description: asparagine synthetase [Elaeagnus umbellata]
  misc_feature (1)..(440): Homolog of NCBI NO: 26246639 NR Description: Asparagine synthetase B
  misc_feature (1)..(443): Homolog of NCBI NO: 15238108 NR Description: asparagine synthetase ASN3
  misc_feature (1)..(443): Homolog of NCBI NO: 25293864 NR Description: asparagine synthase (glutamine-hydrolyzing) (EC
  misc_feature (1)..(445): Homolog of NCBI NO: 22208544 NR Description: asparagine synthetase 2 [Striga hermonthica]
  misc_feature (1)..(443): Homolog of NCBI NO: 6049843 NR Description: asparagine synthetase [Helianthus annuus]
  misc_feature (1)..(448): Homolog of NCBI NO: 3182921 NR Description: Asparagine synthetase
  misc_feature (1)..(443): Homolog of NCBI NO: 15238108 NR Description: asparagine synthetase ASN3
  misc_feature (1)..(443): Homolog of NCBI NO: 25293864 NR Description: asparagine synthase (glutamine-hydrolyzing) (EC
  misc_feature (1)..(445): Homolog of NCBI NO: 22208544 NR Description: asparagine synthetase 2 [Striga hermonthica]
  misc_feature (1)..(443): Homolog of NCBI NO: 6049843 NR Description: asparagine synthetase [Helianthus annuus]
  misc_feature (1)..(448): Homolog of NCBI NO: 3182921 NR Description: Asparagine synthetase
  misc_feature (1)..(452): Homolog of NCBI NO: 13925886 NR Description: glutamine-dependent asparagine synthetase 1
  misc_feature (1)..(460): Homolog of NCBI NO: 1617002 NR Description: asparagine synthetase [Asparagus officinalis]
  misc_feature (1)..(463): Homolog of NCBI NO: 3132675 NR Description: asparagine synthetase [Elaeagnus umbellata]
  misc_feature (1)..(448): Homolog of NCBI NO: 3182921 NR Description: Asparagine synthetase
  misc_feature (1)..(443): Homolog of NCBI NO: 6049843 NR Description: asparagine synthetase [Helianthus annuus]
  misc_feature (1)..(445): Homolog of NCBI NO: 22208544 NR Description: asparagine synthetase 2 [Striga hermonthica]
  misc_feature (1)..(443): Homolog of NCBI NO: 25293864 NR Description: asparagine synthase (glutamine-hydrolyzing) (EC
  misc_feature (1)..(443): Homolog of NCBI NO: 15238108 NR Description: asparagine synthetase ASN3
MLDGMFAFVLLDTRDKSFIAARDAIGITPLYIGWGLDGSVWFASEMKALSDDCEQFMSFPPGHIYSSKQGGLRRWYNPPWYNEQVPSTPYDPLVLRNAFEKAVIKRLMTDVPFGVLLSGGLDSSLVAAVALRHLEKSEAARQWGSQLHTFCIGLQGSPDLKAGREVADYLGTRHHEFQFTVQDGIDAIEEVIYHIETYDVTTIRASTPMFLMSRKIKSLGVKMVLSGEGSDEILGGYLYFHKAPNKKEFHEETCRKIKALHQFDCLRANKSTSAWGVEARVPFLDKEFLNVAMSIDPEWKLIKPDLGRIEKWVLRNAFDDEERPYLPKHILYRQKEQFSDGVGYSWIDGLKDHANKHVSDTMLSNASFVFPDNTPLTKEAYYYRTIFEKFFPKSAARATVPGGPSIACSTAKAVEWDATWSKNLDPSGRAALGVHVAAYEEDKAAAAAKAGSDLVDPLPKNGT

SEQ ID NO: 37079 - DNA, 1254 bp, Arabidopsis thaliana
  misc_feature (1)..(1254): Ceres Seq. ID no. 12329514
  misc_feature: MA Experiment ID: 20000166 Result: Down-regulated in Transcription
  misc_feature: MA Experiment 20000166 PARAMETER Experiment Name: At_100uM_ABA_P Parameter: Age (day) Value: 14
  misc_feature: MA Experiment 20000166 PARAMETER Experiment Name: At_100uM_ABA_P Parameter: Organism Value: A. thaliana
  misc_feature: MA Experiment 20000166 PARAMETER Experiment Name: At_100uM_ABA_P Parameter: Plant Line Value: WS
  misc_feature: MA Experiment 20000166 PARAMETER Experiment Name: At_100uM_ABA_P Parameter: Timepoint (hr) Value: 1
  misc_feature: MA Experiment 20000166 PARAMETER Experiment Name: At_100uM_ABA_P Parameter: Tissue Value: Aerial
  misc_feature: MA Experiment 20000166 PARAMETER Experiment Name: At_100uM_ABA_P Parameter: Treatment Value: 100uM ABA vs. No Treatment
  misc_feature: MA Experiment ID: 20000185 Result: Down-regulated in Transcription
  misc_feature: MA Experiment 20000185 PARAMETER Experiment Name: At_Roots__P Parameter: Age (day) Value: 7 vs. 21
  misc_feature: MA Experiment 20000185 PARAMETER Experiment Name: At_Roots__P Parameter: Organism Value: A. thaliana
  misc_feature: MA Experiment 20000185 PARAMETER Experiment Name: At_Roots__P Parameter: Tissue Value: Roots vs. Whole Plant
  misc_feature: MA Experiment ID: 20000234 Result: Down-regulated in Transcription
  misc_feature: MA Experiment 20000234 PARAMETER Experiment Name: At_Siliques_P Parameter: Age (day) Value: 21
  misc_feature: MA Experiment 20000234 PARAMETER Experiment Name: At_Siliques_P Parameter: Organism Value: A. thaliana
  misc_feature: MA Experiment 20000234 PARAMETER Experiment Name: At_Siliques_P Parameter: Plant Line Value: WS
  misc_feature: MA Experiment 20000234 PARAMETER Experiment Name: At_Siliques_P Parameter: Tissue Value: Less Than 5mm Siliques vs. Whole Plant
  misc_feature: MA Experiment ID: 20000235 Result: Down-regulated in Transcription
  misc_feature: MA Experiment 20000235 PARAMETER Experiment Name: At_Siliques_P Parameter: Age (day) Value: 21
  misc_feature: MA Experiment 20000235 PARAMETER Experiment Name: At_Siliques_P Parameter: Organism Value: A. thaliana
  misc_feature: MA Experiment 20000235 PARAMETER Experiment Name: At_Siliques_P Parameter: Plant Line Value: WS
  misc_feature: MA Experiment 20000235 PARAMETER Experiment Name: At_Siliques_P Parameter: Tissue Value: 5-10mm Siliques vs. Whole Plant
  misc_feature: MA Experiment ID: 20000264 Result: Down-regulated in Transcription
  misc_feature: MA Experiment 20000264 PARAMETER Experiment Name: At_Open_Flower_P Parameter: Age (day) Value: 21
  misc_feature: MA Experiment 20000264 PARAMETER Experiment Name: At_Open_Flower_P Parameter: Plant Line Value: WS
  misc_feature: MA Experiment 20000264 PARAMETER Experiment Name: At_Open_Flower_P Parameter: Tissue Value: Open Flower vs. Whole Plant
  misc_feature: MA Experiment ID: 20000265 Result: Down-regulated in Transcription
  misc_feature: MA Experiment 20000265 PARAMETER Experiment Name: At_Open_Flower_P Parameter: Age (day) Value: 21
  misc_feature: MA Experiment 20000265 PARAMETER Experiment Name: At_Open_Flower_P Parameter: Plant Line Value: WS
  misc_feature: MA Experiment 20000265 PARAMETER Experiment Name: At_Open_Flower_P Parameter: Tissue Value: Closed Flower vs. Whole Plant
  misc_feature: MA Experiment ID: 20000268 Result: Down-regulated in Transcription
  misc_feature: MA Experiment 20000268 PARAMETER Experiment Name: At_100mM_NaCl__P Parameter: Age (day) Value: 14
  misc_feature: MA Experiment 20000268 PARAMETER Experiment Name: At_100mM_NaCl__P Parameter: Organism Value: A. thaliana
  misc_feature: MA Experiment 20000268 PARAMETER Experiment Name: At_100mM_NaCl__P Parameter: Plant Line Value: WS
  misc_feature: MA Experiment 20000268 PARAMETER Experiment Name: At_100mM_NaCl__P Parameter: Timepoint (hr) Value: 6
  misc_feature: MA Experiment 20000268 PARAMETER Experiment Name: At_100mM_NaCl__P Parameter: Tissue Value: Whole Plant
  misc_feature: MA Experiment 20000268 PARAMETER Experiment Name: At_100mM_NaCl__P Parameter: Treatment Value: 100mM NaCl vs. No Treatment
  misc_feature: MA Experiment ID: 20000286 Result: Down-regulated in Transcription
  misc_feature: MA Experiment 20000286 PARAMETER Experiment Name: At_Open_Flower_P Parameter: Age (day) Value: 21
  misc_feature: MA Experiment 20000286 PARAMETER Experiment Name: At_Open_Flower_P Parameter: Plant Line Value: WS
  misc_feature: MA Experiment 20000286 PARAMETER Experiment Name: At_Open_Flower_P Parameter: Tissue Value: Half Open vs. Whole Plant
  misc_feature: MA Experiment ID: 20000438 Result: Down-regulated in Transcription
  misc_feature: MA Experiment 20000438 PARAMETER Experiment Name: At_Shoots__P Parameter: Age (day) Value: 14
  misc_feature: MA Experiment 20000438 PARAMETER Experiment Name: At_Shoots__P Parameter: Tissue Value: Shoots vs. Whole Plant
  misc_feature: MA Experiment ID: 20000439 Result: Down-regulated in Transcription
  misc_feature: MA Experiment 20000439 PARAMETER Experiment Name: At_Roots__P Parameter: Age (day) Value: 14 vs. 21
  misc_feature: MA Experiment 20000439 PARAMETER Experiment Name: At_Roots__P Parameter: Organism Value: A. thaliana
  misc_feature: MA Experiment 20000439 PARAMETER Experiment Name: At_Roots__P Parameter: Tissue Value: Roots vs. Whole Plant
  misc_feature: MA Experiment ID: 20000441 Result: Up-regulated in Transcription
  misc_feature: MA Experiment 20000441 PARAMETER Experiment Name: At_1uM_BR-BRZ__P Parameter: Tissue Value: Shoot Apices
  misc_feature: MA Experiment 20000441 PARAMETER Experiment Name: At_1uM_BR-BRZ__P Parameter: Treatment Value: 1uM BR vs. No Treatment
  misc_feature: MA Experiment ID: 20000460 Result: Up-regulated in Transcription
  misc_feature: MA Experiment 20000460 PARAMETER Experiment Name: At_10percent_PEG_P Parameter: Age (day) Value: 12
  misc_feature: MA Experiment 20000460 PARAMETER Experiment Name: At_10percent_PEG_P Parameter: Organism Value: A. thaliana
  misc_feature: MA Experiment 20000460 PARAMETER Experiment Name: At_10percent_PEG_P Parameter: Plant Line Value: WS
  misc_feature: MA Experiment 20000460 PARAMETER Experiment Name: At_10percent_PEG_P Parameter: Timepoint (day) Value: 12
  misc_feature: MA Experiment 20000460 PARAMETER Experiment Name: At_10percent_PEG_P Parameter: Tissue Value: Whole Plant
  misc_feature: MA Experiment 20000460 PARAMETER Experiment Name: At_10percent_PEG_P Parameter: Treatment Value: 10percent PEG vs. No Treatment
  misc_feature: MA Experiment ID: 20000495 Result: Down-regulated in Transcription
  misc_feature: MA Experiment 20000495 PARAMETER Experiment Name: At_Guard_Cells_P Parameter: Harvest Date Value: 8/2/2002
  misc_feature: MA Experiment 20000495 PARAMETER Experiment Name: At_Guard_Cells_P Parameter: Organism Value: A. thaliana
  misc_feature: MA Experiment 20000495 PARAMETER Experiment Name: At_Guard_Cells_P Parameter: Tissue Value: Guard Cells vs. Leaves
  misc_feature: MA Experiment ID: 20000496 Result: Down-regulated in Transcription
  misc_feature: MA Experiment 20000496 PARAMETER Experiment Name: At_Guard_Cells_P Parameter: Harvest Date Value: 7/19/2002
  misc_feature: MA Experiment 20000496 PARAMETER Experiment Name: At_Guard_Cells_P Parameter: Organism Value: Canola
  misc_feature: MA Experiment 20000496 PARAMETER Experiment Name: At_Guard_Cells_P Parameter: Tissue Value: Guard Cells vs. Leaves
  misc_feature: MA Experiment ID: 20000527 Result: Up-regulated in Transcription
  misc_feature: MA Experiment 20000527 PARAMETER Experiment Name: At_10percent_PEG_P Parameter: Age (day) Value: 20
  misc_feature: MA Experiment 20000527 PARAMETER Experiment Name: At_10percent_PEG_P Parameter: Organism Value: A. thaliana
  misc_feature: MA Experiment 20000527 PARAMETER Experiment Name: At_10percent_PEG_P Parameter: Plant Line Value: WS
  misc_feature: MA Experiment 20000527 PARAMETER Experiment Name: At_10percent_PEG_P Parameter: Timepoint (day) Value: 20
  misc_feature: MA Experiment 20000527 PARAMETER Experiment Name: At_10percent_PEG_P Parameter: Tissue Value: Whole Plant
  misc_feature: MA Experiment 20000527 PARAMETER Experiment Name: At_10percent_PEG_P Parameter: Treatment Value: 10percent PEG vs. No Treatment
  misc_feature: MA Experiment ID: 20000573 Result: Down-regulated in Transcription
  misc_feature: MA Experiment 20000573 PARAMETER Experiment Name: At_100uM_ABA_Mutants__P Parameter: Organism Value: A. thaliana
  misc_feature: MA Experiment 20000573 PARAMETER Experiment Name: At_100uM_ABA_Mutants__P Parameter: Plant Line Value: CS22 vs. Ler wt
  misc_feature: MA Experiment 20000573 PARAMETER Experiment Name: At_100uM_ABA_Mutants__P Parameter: Timepoint (hr) Value: N/A
  misc_feature: MA Experiment 20000573 PARAMETER Experiment Name: At_100uM_ABA_Mutants__P Parameter: Tissue Value: Whole Plant
  misc_feature: MA Experiment 20000573 PARAMETER Experiment Name: At_100uM_ABA_Mutants__P Parameter: Treatment Value: None
  misc_feature: MA Experiment ID: 20000574 Result: Down-regulated in Transcription
  misc_feature: MA Experiment 20000574 PARAMETER Experiment Name: At_100uM_ABA_Mutants__P Parameter: Organism Value: A. thaliana
  misc_feature: MA Experiment 20000574 PARAMETER Experiment Name: At_100uM_ABA_Mutants__P Parameter: Plant Line Value: CS23 vs. Ler wt
  misc_feature: MA Experiment 20000574 PARAMETER Experiment Name: At_100uM_ABA_Mutants__P Parameter: Timepoint (hr) Value: N/A
  misc_feature: MA Experiment 20000574 PARAMETER Experiment Name: At_100uM_ABA_Mutants__P Parameter: Tissue Value: Whole Plant
  misc_feature: MA Experiment 20000574 PARAMETER Experiment Name: At_100uM_ABA_Mutants__P Parameter: Treatment Value: None
  misc_feature: MA Experiment ID: 20001247 Result: Up-regulated in Transcription
  misc_feature: MA Experiment 20001247 PARAMETER Experiment Name: At_Far-red-induction_P Parameter: Age (day) Value: 7
  misc_feature: MA Experiment 20001247 PARAMETER Experiment Name: At_Far-red-induction_P Parameter: Light Value: Far-red vs. White
  misc_feature: MA Experiment 20001247 PARAMETER Experiment Name: At_Far-red-induction_P Parameter: Organism Value: A. thaliana
  misc_feature: MA Experiment 20001247 PARAMETER Experiment Name: At_Far-red-induction_P Parameter: Plant Line Value: Columbia
  misc_feature: MA Experiment 20001247 PARAMETER Experiment Name: At_Far-red-induction_P Parameter: Timepoint (hr) Value: 1
  misc_feature: MA Experiment 20001247 PARAMETER Experiment Name: At_Far-red-induction_P Parameter: Tissue Value: Whole Plant
  misc_feature: MA Experiment ID: 20001559 Result: Down-regulated in Transcription
  misc_feature: MA Experiment 20001559 PARAMETER Experiment Name: At_Drought_Soil_Dry_P Parameter: Age (day) Value: 28
  misc_feature: MA Experiment 20001559 PARAMETER Experiment Name: At_Drought_Soil_Dry_P Parameter: Organism Value: A. thaliana
  misc_feature: MA Experiment 20001559 PARAMETER Experiment Name: At_Drought_Soil_Dry_P Parameter: Plant Line Value: WS
  misc_feature: MA Experiment 20001559 PARAMETER Experiment Name: At_Drought_Soil_Dry_P Parameter: Post Timepoint (hr) Value: 29
  misc_feature: MA Experiment 20001559 PARAMETER Experiment Name: At_Drought_Soil_Dry_P Parameter: Post-Treatment Value: Re-Water vs. No Drought
  misc_feature: MA Experiment 20001559 PARAMETER Experiment Name: At_Drought_Soil_Dry_P Parameter: Timepoint (day) Value: 14
  misc_feature: MA Experiment 20001559 PARAMETER Experiment Name: At_Drought_Soil_Dry_P Parameter: Treatment Value: Drought vs. No Drought
  misc_feature: MA Experiment ID: 20001560 Result: Down-regulated in Transcription
  misc_feature: MA Experiment 20001560 PARAMETER Experiment Name: At_Drought_Soil_Dry_P Parameter: Age (day) Value: 28
  misc_feature: MA Experiment 20001560 PARAMETER Experiment Name: At_Drought_Soil_Dry_P Parameter: Organism Value: A. thaliana
  misc_feature: MA Experiment 20001560 PARAMETER Experiment Name: At_Drought_Soil_Dry_P Parameter: Plant Line Value: WS
  misc_feature: MA Experiment 20001560 PARAMETER Experiment Name: At_Drought_Soil_Dry_P Parameter: Post Timepoint (hr) Value: None
  misc_feature: MA Experiment 20001560 PARAMETER Experiment Name: At_Drought_Soil_Dry_P Parameter: Post-Treatment Value: None
  misc_feature: MA Experiment 20001560 PARAMETER Experiment Name: At_Drought_Soil_Dry_P Parameter: Timepoint (day) Value: 14
  misc_feature: MA Experiment 20001560 PARAMETER Experiment Name: At_Drought_Soil_Dry_P Parameter: Treatment Value: Drought vs. No Drought
atggctcagaatcaacaacctattttccagaccaaacctccagaacaatttgtgcaaatacctatcaacatcgagcgtgattcttcaaccacacgcatgaaccaaaccggaaacacaatccggaaaccaaaccactggccaaccatcaccatctcaatcatcttcgtcatcatcggtcaatccatagcgaaactcctcgaaaacttctactacgacaaaaccaaccgaagcgaatacaacgaaaaccgtcaaaacgatggcgtttggactcaatctcttctccaaactgttggtttccctctccttcttctcccgttcctcatcttcatcaccaagaacaaacgcaaccaccatcaacaacctccgatcacttccgattcaatccacttaaaatccttagctgtgatctacatttgcatcggaattatcatgtccgttcaaggaagactcgcagccatgggaaaactcgagatcccatttggtgttttcactctgatctacacagcacagctcttcttcactcctatcttcgcagctttcattaacaaaatcaaattcaatcgatgggttgttatctctgtgatcttagctatcatcaccggagctcttactctgtcttcttcattcggtggtgagcctgatgaagcagaggagaattacgctagaggctcatgggctgctctgttcgctggaatctgtttcgctcttcttctctgtaacatccaaaacgtcttcgacagttacatcttcaaacgaactgaatcaaccaatcaaaaaccaagctttgcctctgttttcgaagttattatcttctcttctctcgttgctacgatcatctccgtcgtgggtctgcttatagccggtgagcaacacgatttgaagagggaaatgaatggattctcgaaagggaaaggttcttatgtgatggctatggttggtcaagctgtttcgtggcaggtctattgggttgggattgttggacttgtctactctgtttcgagcgtgttgtcgaatgtgatcagtgtcattacgtggccgattgtgtcggttcttgtggtgatcttcttcaatttcatggatgatgagtttgatgccttcaaaggtgttgccttggttactgccgtcttaagcgctgcagcttatttctttaggcttcacaaagacaatcgtatggcttattaggtttggattcttgaatctctaaagaaagtttttttatttcccttgattttttgtgtgtatatctaatcatat

SEQ ID NO: 37080 - protein, 393 aa, Arabidopsis thaliana
  peptide (1)..(393): Ceres Seq. ID no. 12329515
  misc_feature (206)..(393): Pfam Name: Domain of unknown function, DUF250 Pfam Description: Domain of unknown function, DUF250
  misc_feature (89)..(392): Homolog of NCBI NO: 38344290 NR Description: OSJNBa0013K16.22 [Oryza sativa (japonica
  misc_feature (15)..(387): Homolog of NCBI NO: 25405226 NR Description: F16N3.13 [imported] - Arabidopsis thaliana
  misc_feature (9)..(390): Homolog of NCBI NO: 25405230 NR Description: F16N3.10 [imported] - Arabidopsis thaliana
  misc_feature (46)..(386): Homolog of NCBI NO: 15218319 NR Description: unknown protein; protein id: At1g09860.1
  misc_feature (40)..(390): Homolog of NCBI NO: 15217799 NR Description: hypothetical protein; protein id: At1g57943.1
  misc_feature (46)..(390): Homolog of NCBI NO: 15217802 NR Description: hypothetical protein; protein id: At1g57980.1
  misc_feature (40)..(390): Homolog of NCBI NO: 15217805 NR Description: unknown protein
  misc_feature (11)..(388): Homolog of NCBI NO: 15222257 NR Description: hypothetical protein; protein id: At1g75470.1
  misc_feature (1)..(388): Homolog of NCBI NO: 9369374 NR Description: F10A5.31 [Arabidopsis thaliana]
  misc_feature (1)..(393): Homolog of NCBI NO: 15223662 NR Description: unknown protein; protein id: At1g19770.1
MAQNQQPIFQTKPPEQFVQIPINIERDSSTTRMNQTGNTIRKPNHWPTITISIIFVIIGQSIAKLLENFYYDKTNRSEYNENRQNDGVWTQSLLQTVGFPLLLLPFLIFITKNKRNHHQQPPITSDSIHLKSLAVIYICIGIIMSVQGRLAAMGKLEIPFGVFTLIYTAQLFFTPIFAAFINKIKFNRWVVISVILAIITGALTLSSSFGGEPDEAEENYARGSWAALFAGICFALLLCNIQNVFDSYIFKRTESTNQKPSFASVFEVIIFSSLVATIISVVGLLIAGEQHDLKREMNGFSKGKGSYVMAMVGQAVSWQVYWVGIVGLVYSVSSVLSNVISVITWPIVSVLVVIFFNFMDDEFDAFKGVALVTAVLSAAAYFFRLHKDNRMAY

SEQ ID NO: 37081 - protein, 361 aa, Arabidopsis thaliana
  peptide (1)..(361): Ceres Seq. ID no. 12329516
  misc_feature (174)..(361): Pfam Name: Domain of unknown function, DUF250 Pfam Description: Domain of unknown function, DUF250
  misc_feature (57)..(360): Homolog of NCBI NO: 38344290 NR Description: OSJNBa0013K16.22 [Oryza sativa (japonica
  misc_feature (1)..(355): Homolog of NCBI NO: 25405226 NR Description: F16N3.13 [imported] - Arabidopsis thaliana
  misc_feature (1)..(358): Homolog of NCBI NO: 25405230 NR Description: F16N3.10 [imported] - Arabidopsis thaliana
  misc_feature (14)..(354): Homolog of NCBI NO: 15218319 NR Description: unknown protein; protein id: At1g09860.1
  misc_feature (8)..(358): Homolog of NCBI NO: 15217799 NR Description: hypothetical protein; protein id: At1g57943.1
  misc_feature (14)..(358): Homolog of NCBI NO: 15217802 NR Description: hypothetical protein; protein id: At1g57980.1
  misc_feature (8)..(358): Homolog of NCBI NO: 15217805 NR Description: unknown protein
  misc_feature (1)..(356): Homolog of NCBI NO: 15222257 NR Description: hypothetical protein; protein id: At1g75470.1
  misc_feature (1)..(356): Homolog of NCBI NO: 9369374 NR Description: F10A5.31 [Arabidopsis thaliana]
  misc_feature (1)..(361): Homolog of NCBI NO: 15223662 NR Description: unknown protein; protein id: At1g19770.1
MNQTGNTIRKPNHWPTITISIIFVIIGQSIAKLLENFYYDKTNRSEYNENRQNDGVWTQSLLQTVGFPLLLLPFLIFITKNKRNHHQQPPITSDSIHLKSLAVIYICIGIIMSVQGRLAAMGKLEIPFGVFTLIYTAQLFFTPIFAAFINKIKFNRWVVISVILAIITGALTLSSSFGGEPDEAEENYARGSWAALFAGICFALLLCNIQNVFDSYIFKRTESTNQKPSFASVFEVIIFSSLVATIISVVGLLIAGEQHDLKREMNGFSKGKGSYVMAMVGQAVSWQVYWVGIVGLVYSVSSVLSNVISVITWPIVSVLVVIFFNFMDDEFDAFKGVALVTAVLSAAAYFFRLHKDNRMAY

SEQ ID NO: 37082 - protein, 250 aa, Arabidopsis thaliana
  peptide (1)..(250): Ceres Seq. ID no. 12329517
  misc_feature (63)..(250): Pfam Name: Domain of unknown function, DUF250 Pfam Description: Domain of unknown function, DUF250
  misc_feature (1)..(249): Homolog of NCBI NO: 38344290 NR Description: OSJNBa0013K16.22 [Oryza sativa (japonica
  misc_feature (1)..(244): Homolog of NCBI NO: 25405226 NR Description: F16N3.13 [imported] - Arabidopsis thaliana
  misc_feature (1)..(247): Homolog of NCBI NO: 25405230 NR Description: F16N3.10 [imported] - Arabidopsis thaliana
  misc_feature (1)..(243): Homolog of NCBI NO: 15218319 NR Description: unknown protein; protein id: At1g09860.1
  misc_feature (1)..(247): Homolog of NCBI NO: 15217799 NR Description: hypothetical protein; protein id: At1g57943.1
  misc_feature (1)..(247): Homolog of NCBI NO: 15217802 NR Description: hypothetical protein; protein id: At1g57980.1
  misc_feature (1)..(247): Homolog of NCBI NO: 15217805 NR Description: unknown protein
  misc_feature (1)..(245): Homolog of NCBI NO: 15222257 NR Description: hypothetical protein; protein id: At1g75470.1
  misc_feature (1)..(245): Homolog of NCBI NO: 9369374 NR Description: F10A5.31 [Arabidopsis thaliana]
  misc_feature (1)..(250): Homolog of NCBI NO: 15223662 NR Description: unknown protein; protein id: At1g19770.1
MSVQGRLAAMGKLEIPFGVFTLIYTAQLFFTPIFAAFINKIKFNRWVVISVILAIITGALTLSSSFGGEPDEAEENYARGSWAALFAGICFALLLCNIQNVFDSYIFKRTESTNQKPSFASVFEVIIFSSLVATIISVVGLLIAGEQHDLKREMNGFSKGKGSYVMAMVGQAVSWQVYWVGIVGLVYSVSSVLSNVISVITWPIVSVLVVIFFNFMDDEFDAFKGVALVTAVLSAAAYFFRLHKDNRMAY

SEQ ID NO: 37083 - DNA, 662 bp, Arabidopsis thaliana
  misc_feature (1)..(662): Ceres Seq. ID no. 13499574
  misc_feature: MA Experiment ID: 108434 Result: Up-regulated in Transcription
  misc_feature: MA Experiment 108434 PARAMETER Experiment Name: At_Root_Tips_cDNA_P Parameter: Tissue Value: Root Tips
  misc_feature: MA Experiment ID: 108462 Result: Down-regulated in Transcription
  misc_feature: MA Experiment 108462 PARAMETER Experiment Name: At_Germinating_Seeds_cDNA_P Parameter: Age (day) Value: 2 vs. 0
  misc_feature: MA Experiment 108462 PARAMETER Experiment Name: At_Germinating_Seeds_cDNA_P Parameter: Tissue Value: Germinating Seeds
  misc_feature: MA Experiment ID: 108463 Result: Down-regulated in Transcription
  misc_feature: MA Experiment 108463 PARAMETER Experiment Name: At_Germinating_Seeds_cDNA_P Parameter: Age (day) Value: 3 vs. 0
  misc_feature: MA Experiment 108463 PARAMETER Experiment Name: At_Germinating_Seeds_cDNA_P Parameter: Tissue Value: Germinating Seeds
  misc_feature: MA Experiment ID: 20000224 Result: Up-regulated in Transcription
ttgtttcttcatcttcctcactctctgcgccgcgtttgcttccatctttctctcgattgtttcctctcaagcgaagcttcttcttcttcgatcttcttcctcgtgtgtggattcgtttctgaaataggatcgaagtaatggccagcaaatctggaagcggtggcctaagagaaccgccgaatgagcaagctgttttgaacatgtatgaaggcaagagatcagagctaagccaaatctactccaacataaccgacctcgagatgcaagtgagcgaacattctctggtcattaacgccattcagcctctcgaccaatcgaggaaatgcttccgcatgataggaggcgttcttgtcgaaagaaccatcaaagaggtactaccagctgtccaacgtaacaaggacggacttgaagaggttgtgaggaagctatacgagacattggagaaaaagaagaaagatcttacagagtttgaagctaagtataagatcaggataacgaaacaagaagataacaaggaaggaggtaacaagaaggaaggtaatgctcaaggtgttcttgttggagctgccagttcaagccagtaaaactctatatttggcagtttgttttactgttgtatctcttttttggatcttatggttaaaagccgtaaactttgctgt

SEQ ID NO: 37084 - protein, 148 aa, Arabidopsis thaliana
  peptide (1)..(148): Ceres Seq. ID no. 13499575
  misc_feature (16)..(123): Pfam Name: KE2 family protein Pfam Description: KE2 family protein
  misc_feature (85)..(148): Homolog of NCBI NO: 11994282 NR Description: gene_id:F16J14.6~unknown protein [Arabidopsis
  misc_feature (12)..(138): Homolog of NCBI NO: 39595088 NR Description: Hypothetical protein CBG03668 [Caenorhabditis
  misc_feature (15)..(141): Homolog of NCBI NO: 24662461 NR Description: CG6302-PA [Drosophila melanogaster]
  misc_feature (42)..(141): Homolog of NCBI NO: 7106852 NR Description: HSPC231 [Homo sapiens]
  misc_feature (14)..(141): Homolog of NCBI NO: 5690431 NR Description: prefoldin subunit 2 [Homo sapiens]
  misc_feature (5)..(141): Homolog of NCBI NO: 28189659 NR Description: similar to prefoldin subunit 2 [Bos taurus]
  misc_feature (5)..(141): Homolog of NCBI NO: 12408675 NR Description: prefoldin 2 [Homo sapiens]
  misc_feature (1)..(148): Homolog of NCBI NO: 15228766 NR Description: prefoldin-related protein [Arabidopsis thaliana]
MASKSGSGGLREPPNEQAVLNMYEGKRSELSQIYSNITDLEMQVSEHSLVINAIQPLDQSRKCFRMIGGVLVERTIKEVLPAVQRNKDGLEEVVRKLYETLEKKKKDLTEFEAKYKIRITKQEDNKEGGNKKEGNAQGVLVGAASSSQ

SEQ ID NO: 37085 - protein, 127 aa, Arabidopsis thaliana
  peptide (1)..(127): Ceres Seq. ID no. 13499576
  misc_feature (1)..(102): Pfam Name: KE2 family protein Pfam Description: KE2 family protein
  misc_feature (64)..(127): Homolog of NCBI NO: 11994282 NR Description: gene_id:F16J14.6~unknown protein [Arabidopsis
  misc_feature (1)..(117): Homolog of NCBI NO: 39595088 NR Description: Hypothetical protein CBG03668 [Caenorhabditis
  misc_feature (1)..(120): Homolog of NCBI NO: 24662461 NR Description: CG6302-PA [Drosophila melanogaster]
  misc_feature (21)..(120): Homolog of NCBI NO: 7106852 NR Description: HSPC231 [Homo sapiens]
  misc_feature (1)..(120): Homolog of NCBI NO: 5690431 NR Description: prefoldin subunit 2 [Homo sapiens]
  misc_feature (1)..(120): Homolog of NCBI NO: 28189659 NR Description: similar to prefoldin subunit 2 [Bos taurus]
  misc_feature (1)..(120): Homolog of NCBI NO: 12408675 NR Description: prefoldin 2 [Homo sapiens]
  misc_feature (1)..(127): Homolog of NCBI NO: 15228766 NR Description: prefoldin-related protein [Arabidopsis thaliana]
MYEGKRSELSQIYSNITDLEMQVSEHSLVINAIQPLDQSRKCFRMIGGVLVERTIKEVLPAVQRNKDGLEEVVRKLYETLEKKKKDLTEFEAKYKIRITKQEDNKEGGNKKEGNAQGVLVGAASSSQ

SEQ ID NO: 37086 - protein, 107 aa, Arabidopsis thaliana
  peptide (1)..(107): Ceres Seq. ID no. 13499577
  misc_feature (1)..(82): Pfam Name: KE2 family protein Pfam Description: KE2 family protein
  misc_feature (44)..(107): Homolog of NCBI NO: 11994282 NR Description: gene_id:F16J14.6~unknown protein [Arabidopsis
  misc_feature (1)..(97): Homolog of NCBI NO: 39595088 NR Description: Hypothetical protein CBG03668 [Caenorhabditis
  misc_feature (1)..(100): Homolog of NCBI NO: 24662461 NR Description: CG6302-PA [Drosophila melanogaster]
  misc_feature (1)..(100): Homolog of NCBI NO: 7106852 NR Description: HSPC231 [Homo sapiens]
  misc_feature (1)..(100): Homolog of NCBI NO: 5690431 NR Description: prefoldin subunit 2 [Homo sapiens]
  misc_feature (1)..(100): Homolog of NCBI NO: 28189659 NR Description: similar to prefoldin subunit 2 [Bos taurus]
  misc_feature (1)..(100): Homolog of NCBI NO: 12408675 NR Description: prefoldin 2 [Homo sapiens]
  misc_feature (1)..(107): Homolog of NCBI NO: 15228766 NR Description: prefoldin-related protein [Arabidopsis thaliana]
MQVSEHSLVINAIQPLDQSRKCFRMIGGVLVERTIKEVLPAVQRNKDGLEEVVRKLYETLEKKKKDLTEFEAKYKIRITKQEDNKEGGNKKEGNAQGVLVGAASSSQ

SEQ ID NO: 37087 - DNA, 1499 bp, Arabidopsis thaliana
  misc_feature (1)..(1499): Ceres Seq. ID no. 13593683
  misc_feature: MA Experiment ID: 20000182 Result: Down-regulated in Transcription
  misc_feature: MA Experiment 20000182 PARAMETER Experiment Name: At_2mM_SA_P Parameter: Age (day) Value: 14
  misc_feature: MA Experiment 20000182 PARAMETER Experiment Name: At_2mM_SA_P Parameter: Organism Value: A. thaliana
  misc_feature: MA Experiment 20000182 PARAMETER Experiment Name: At_2mM_SA_P Parameter: Plant Line Value: WS
  misc_feature: MA Experiment 20000182 PARAMETER Experiment Name: At_2mM_SA_P Parameter: Timepoint (hr) Value: 6
  misc_feature: MA Experiment 20000182 PARAMETER Experiment Name: At_2mM_SA_P Parameter: Tissue Value: Aerial
  misc_feature: MA Experiment 20000182 PARAMETER Experiment Name: At_2mM_SA_P Parameter: Treatment Value: 2mM SA vs. No Treatment
  misc_feature: MA Experiment ID: 20000185 Result: Down-regulated in Transcription
  misc_feature: MA Experiment 20000185 PARAMETER Experiment Name: At_Roots__P Parameter: Age (day) Value: 7 vs. 21
  misc_feature: MA Experiment 20000185 PARAMETER Experiment Name: At_Roots__P Parameter: Organism Value: A. thaliana
  misc_feature: MA Experiment 20000185 PARAMETER Experiment Name: At_Roots__P Parameter: Tissue Value: Roots vs. Whole Plant
  misc_feature: MA Experiment ID: 20000227 Result: Down-regulated in Transcription
  misc_feature: MA Experiment 20000227 PARAMETER Experiment Name: At_Root-Tips-vs-Tops_P Parameter: Tissue Value: Root Tips vs. Root Tops
  misc_feature: MA Experiment ID: 20000234 Result: Down-regulated in Transcription
  misc_feature: MA Experiment 20000234 PARAMETER Experiment Name: At_Siliques_P Parameter: Age (day) Value: 21
  misc_feature: MA Experiment 20000234 PARAMETER Experiment Name: At_Siliques_P Parameter: Organism Value: A. thaliana
  misc_feature: MA Experiment 20000234 PARAMETER Experiment Name: At_Siliques_P Parameter: Plant Line Value: WS
  misc_feature: MA Experiment 20000234 PARAMETER Experiment Name: At_Siliques_P Parameter: Tissue Value: Less Than 5mm Siliques vs. Whole Plant
  misc_feature: MA Experiment ID: 20000264 Result: Down-regulated in Transcription
  misc_feature: MA Experiment 20000264 PARAMETER Experiment Name: At_Open_Flower_P Parameter: Age (day) Value: 21
  misc_feature: MA Experiment 20000264 PARAMETER Experiment Name: At_Open_Flower_P Parameter: Plant Line Value: WS
  misc_feature: MA Experiment 20000264 PARAMETER Experiment Name: At_Open_Flower_P Parameter: Tissue Value: Open Flower vs. Whole Plant
  misc_feature: MA Experiment ID: 20000265 Result: Down-regulated in Transcription
  misc_feature: MA Experiment 20000265 PARAMETER Experiment Name: At_Open_Flower_P Parameter: Age (day) Value: 21
  misc_feature: MA Experiment 20000265 PARAMETER Experiment Name: At_Open_Flower_P Parameter: Plant Line Value: WS
  misc_feature: MA Experiment 20000265 PARAMETER Experiment Name: At_Open_Flower_P Parameter: Tissue Value: Closed Flower vs. Whole Plant
  misc_feature: MA Experiment ID: 20000286 Result: Down-regulated in Transcription
  misc_feature: MA Experiment 20000286 PARAMETER Experiment Name: At_Open_Flower_P Parameter: Age (day) Value: 21
  misc_feature: MA Experiment 20000286 PARAMETER Experiment Name: At_Open_Flower_P Parameter: Plant Line Value: WS
  misc_feature: MA Experiment 20000286 PARAMETER Experiment Name: At_Open_Flower_P Parameter: Tissue Value: Half Open vs. Whole Plant
  misc_feature: MA Experiment ID: 20000438 Result: Down-regulated in Transcription
  misc_feature: MA Experiment 20000438 PARAMETER Experiment Name: At_Shoots__P Parameter: Age (day) Value: 14
  misc_feature: MA Experiment 20000438 PARAMETER Experiment Name: At_Shoots__P Parameter: Tissue Value: Shoots vs. Whole Plant
  misc_feature: MA Experiment ID: 20000439 Result: Down-regulated in Transcription
  misc_feature: MA Experiment 20000439 PARAMETER Experiment Name: At_Roots__P Parameter: Age (day) Value: 14 vs. 21
  misc_feature: MA Experiment 20000439 PARAMETER Experiment Name: At_Roots__P Parameter: Organism Value: A. thaliana
  misc_feature: MA Experiment 20000439 PARAMETER Experiment Name: At_Roots__P Parameter: Tissue Value: Roots vs. Whole Plant
  misc_feature: MA Experiment ID: 20000794 Result: Down-regulated in Transcription
  misc_feature: MA Experiment 20000794 PARAMETER Experiment Name: At_Petals_P Parameter: Age (day) Value: 23-25 days
  misc_feature: MA Experiment 20000794 PARAMETER Experiment Name: At_Petals_P Parameter: Plant Line Value: WS
  misc_feature: MA Experiment 20000794 PARAMETER Experiment Name: At_Petals_P Parameter: Tissue Value: Petals vs. Whole plant
  misc_feature: MA Experiment ID: 20001248 Result: Up-regulated in Transcription
  misc_feature: MA Experiment 20001248 PARAMETER Experiment Name: At_Far-red-induction_P Parameter: Age (day) Value: 7
  misc_feature: MA Experiment 20001248 PARAMETER Experiment Name: At_Far-red-induction_P Parameter: Light Value: Far-red vs. White
  misc_feature: MA Experiment 20001248 PARAMETER Experiment Name: At_Far-red-induction_P Parameter: Organism Value: A. thaliana
  misc_feature: MA Experiment 20001248 PARAMETER Experiment Name: At_Far-red-induction_P Parameter: Plant Line Value: Columbia
  misc_feature: MA Experiment 20001248 PARAMETER Experiment Name: At_Far-red-induction_P Parameter: Timepoint (hr) Value: 4
  misc_feature: MA Experiment 20001248 PARAMETER Experiment Name: At_Far-red-induction_P Parameter: Tissue Value: Whole Plant
  misc_feature: MA Experiment ID: 20001904 Result: Down-regulated in Transcription
  misc_feature: MA Experiment 20001904 PARAMETER Experiment Name: At_Drought_Reproduction_P Parameter: Age (day) Value: 37
  misc_feature: MA Experiment 20001904 PARAMETER Experiment Name: At_Drought_Reproduction_P Parameter: Organism Value: A. thaliana
  misc_feature: MA Experiment 20001904 PARAMETER Experiment Name: At_Drought_Reproduction_P Parameter: Plant Line Value: WS
  misc_feature: MA Experiment 20001904 PARAMETER Experiment Name: At_Drought_Reproduction_P Parameter: Timepoint (day) Value: 7
  misc_feature: MA Experiment 20001904 PARAMETER Experiment Name: At_Drought_Reproduction_P Parameter: Tissue Value: Rosettes
  misc_feature: MA Experiment 20001904 PARAMETER Experiment Name: At_Drought_Reproduction_P Parameter: Treatment Value: Drought vs. No Drought
gatctaccttctcagaaagggagctgcatcaatggcgaccaataatgattttggagctttcattgagaaagttacaatctctccaacttctacttcctcgtcgcctccttctctacagggtcttactttcgccattaaagacatttttgatgtggaaggacgcgttaccggttttggtaacccggattggttaaggacacactcggcagctacttctacagctccagtagtttcatctctcttagaagctggtgccacagctttgggtattaccattatggatgaaatggcttacagtataaacggagaaaatgcgcattatgggactccgagaaacccgattgctttcgatagagtgcctgggggatcatcgagtggctcagccgtagctgtagctgctcgtcttgtggatttttctattggaactgataccggagggagtgtacgagttccagcatcttactgtgggattttcggtttccggccatcccacggtgcagtttccactgtcggacttactccaatggctcagagcttcgacacagttggatggtttgctcgggacacagccactttgaaacgtgtaggttgcgttctcctgcagcagcatcacttgaaccccatcgaaccatctcaactgattatcgcggatgactgcttcaagctgtgtagtgtaccgcatgatctcttggtgcagcctctggttggatccgtggaaaaatcgtttggaggcaacactgtagtaaagaaggtgaatcttggagagtacattggacagaatgttccaagccttaaacatttcatgacaagtgacgatgtcactacacaacaagagttctgcattccgtctctcatggccctatcgagttcaatgagattgttacaaagacatgaattcaagataaaccacggtgcatggatctcgtcggtgaagccagagtttggtcctggaatatcagaacgaattgaggaagctatcagaacatccgacgagaagatcgaccattgccggtccgtgaaatctgaactgataacggctctttcaactttgctcggggagaagggtgtgttggtgattccaacggtaccaggtcctccaccgcatctccaagctaatgtggctgcacttgaatctttccgcagcagagccttcagcttgttgtcgatcgcaggcgtttctggattctgtcaggtgagcataccattggggctacacgaaaatcttccggtttcggtatcattggtagctaagtatggctcagacggttttcttctgagtcttgtggattcccttgctgcatttatttgattgacatgtcataaacttaatgcactttgagcatatctattttgctttctgtttattatgtcatcgtagcatatctgaatggttttcttgtcccaaacccaacaatgtattaaataaattgttgtatatgttggacaattgtactatttgtcttttagcgaagtattaatgacaacttaatattaactag

SEQ ID NO: 37088 - protein, 435 aa, Arabidopsis thaliana
  peptide (1)..(435): Ceres Seq. ID no. 13593684
  misc_feature (19)..(425): Pfam Name: Amidase Pfam Description: Amidase
  misc_feature (19)..(425): Pfam Name: Amidase Pfam Description: Amidase
  misc_feature (11)..(200): Homolog of NCBI NO: 23499864 NR Description: conserved hypothetical protein [Brucella suis
  misc_feature (16)..(351): Homolog of NCBI NO: 38344119 NR Description: OSJNBb0050O03.16 [Oryza sativa (japonica
  misc_feature (16)..(435): Homolog of NCBI NO: 13937285 NR Description: chloroplast protein-translocon-like protein
  misc_feature (5)..(425): Homolog of NCBI NO: 30682691 NR Description: subunit of TOC complex -related [Arabidopsis
  misc_feature (5)..(425): Homolog of NCBI NO: 9955529 NR Description: putative subunit of TOC complex [Arabidopsis
  misc_feature (11)..(200): Homolog of NCBI NO: 23499864 NR Description: conserved hypothetical protein [Brucella suis
  misc_feature (16)..(435): Homolog of NCBI NO: 13937285 NR Description: chloroplast protein-translocon-like protein
  misc_feature (5)..(425): Homolog of NCBI NO: 9955529 NR Description: putative subunit of TOC complex [Arabidopsis
  misc_feature (11)..(435): Homolog of NCBI NO: 18390964 NR Description: amidase [Arabidopsis thaliana]
  misc_feature (11)..(234): Homolog of NCBI NO: 25402505 NR Description: hypothetical protein [imported] - Arabidopsis
  misc_feature (260)..(303): Homolog of NCBI NO: 25402505 NR Description: hypothetical protein [imported] - Arabidopsis
  misc_feature (1)..(431): Homolog of NCBI NO: 7453538 NR Description: Toc64 [Pisum sativum]
  misc_feature (1)..(431): Homolog of NCBI NO: 30684733 NR Description: chloroplast outer membrane translocon subunit,
  misc_feature (5)..(425): Homolog of NCBI NO: 30682691 NR Description: subunit of TOC complex -related [Arabidopsis
  misc_feature (16)..(351): Homolog of NCBI NO: 38344119 NR Description: OSJNBb0050O03.16 [Oryza sativa (japonica
  misc_feature (1)..(431): Homolog of NCBI NO: 30684733 NR Description: chloroplast outer membrane translocon subunit,
  misc_feature (1)..(431): Homolog of NCBI NO: 7453538 NR Description: Toc64 [Pisum sativum]
  misc_feature (260)..(303): Homolog of NCBI NO: 25402505 NR Description: hypothetical protein [imported] - Arabidopsis
  misc_feature (11)..(234): Homolog of NCBI NO: 25402505 NR Description: hypothetical protein [imported] - Arabidopsis
  misc_feature (11)..(435): Homolog of NCBI NO: 18390964 NR Description: amidase [Arabidopsis thaliana]
IYLLRKGAASMATNNDFGAFIEKVTISPTSTSSSPPSLQGLTFAIKDIFDVEGRVTGFGNPDWLRTHSAATSTAPVVSSLLEAGATALGITIMDEMAYSINGENAHYGTPRNPIAFDRVPGGSSSGSAVAVAARLVDFSIGTDTGGSVRVPASYCGIFGFRPSHGAVSTVGLTPMAQSFDTVGWFARDTATLKRVGCVLLQQHHLNPIEPSQLIIADDCFKLCSVPHDLLVQPLVGSVEKSFGGNTVVKKVNLGEYIGQNVPSLKHFMTSDDVTTQQEFCIPSLMALSSSMRLLQRHEFKINHGAWISSVKPEFGPGISERIEEAIRTSDEKIDHCRSVKSELITALSTLLGEKGVLVIPTVPGPPPHLQANVAALESFRSRAFSLLSIAGVSGFCQVSIPLGLHENLPVSVSLVAKYGSDGFLLSLVDSLAAFI

SEQ ID NO: 37089 - protein, 425 aa, Arabidopsis thaliana
  peptide (1)..(425): Ceres Seq. ID no. 13593685
  misc_feature (9)..(415): Pfam Name: Amidase Pfam Description: Amidase
  misc_feature (9)..(415): Pfam Name: Amidase Pfam Description: Amidase
  misc_feature (1)..(190): Homolog of NCBI NO: 23499864 NR Description: conserved hypothetical protein [Brucella suis
  misc_feature (6)..(341): Homolog of NCBI NO: 38344119 NR Description: OSJNBb0050O03.16 [Oryza sativa (japonica
  misc_feature (6)..(425): Homolog of NCBI NO: 13937285 NR Description: chloroplast protein-translocon-like protein
  misc_feature (1)..(415): Homolog of NCBI NO: 30682691 NR Description: subunit of TOC complex -related [Arabidopsis
  misc_feature (1)..(415): Homolog of NCBI NO: 9955529 NR Description: putative subunit of TOC complex [Arabidopsis
  misc_feature (1)..(190): Homolog of NCBI NO: 23499864 NR Description: conserved hypothetical protein [Brucella suis
  misc_feature (6)..(425): Homolog of NCBI NO: 13937285 NR Description: chloroplast protein-translocon-like protein
  misc_feature (1)..(415): Homolog of NCBI NO: 9955529 NR Description: putative subunit of TOC complex [Arabidopsis
  misc_feature (1)..(425): Homolog of NCBI NO: 18390964 NR Description: amidase [Arabidopsis thaliana]
  misc_feature (1)..(224): Homolog of NCBI NO: 25402505 NR Description: hypothetical protein [imported] - Arabidopsis
  misc_feature (250)..(293): Homolog of NCBI NO: 25402505 NR Description: hypothetical protein [imported] - Arabidopsis
  misc_feature (1)..(421): Homolog of NCBI NO: 7453538 NR Description: Toc64 [Pisum sativum]
  misc_feature (1)..(421): Homolog of NCBI NO: 30684733 NR Description: chloroplast outer membrane translocon subunit,
  misc_feature (1)..(415): Homolog of NCBI NO: 30682691 NR Description: subunit of TOC complex -related [Arabidopsis
  misc_feature (6)..(341): Homolog of NCBI NO: 38344119 NR Description: OSJNBb0050O03.16 [Oryza sativa (japonica
  misc_feature (1)..(421): Homolog of NCBI NO: 30684733 NR Description: chloroplast outer membrane translocon subunit,
  misc_feature (1)..(421): Homolog of NCBI NO: 7453538 NR Description: Toc64 [Pisum sativum]
  misc_feature (250)..(293): Homolog of NCBI NO: 25402505 NR Description: hypothetical protein [imported] - Arabidopsis
  misc_feature (1)..(224): Homolog of NCBI NO: 25402505 NR Description: hypothetical protein [imported] - Arabidopsis
  misc_feature (1)..(425): Homolog of NCBI NO: 18390964 NR Description: amidase [Arabidopsis thaliana]
MATNNDFGAFIEKVTISPTSTSSSPPSLQGLTFAIKDIFDVEGRVTGFGNPDWLRTHSAATSTAPVVSSLLEAGATALGITIMDEMAYSINGENAHYGTPRNPIAFDRVPGGSSSGSAVAVAARLVDFSIGTDTGGSVRVPASYCGIFGFRPSHGAVSTVGLTPMAQSFDTVGWFARDTATLKRVGCVLLQQHHLNPIEPSQLIIADDCFKLCSVPHDLLVQPLVGSVEKSFGGNTVVKKVNLGEYIGQNVPSLKHFMTSDDVTTQQEFCIPSLMALSSSMRLLQRHEFKINHGAWISSVKPEFGPGISERIEEAIRTSDEKIDHCRSVKSELITALSTLLGEKGVLVIPTVPGPPPHLQANVAALESFRSRAFSLLSIAGVSGFCQVSIPLGLHENLPVSVSLVAKYGSDGFLLSLVDSLAAFI

SEQ ID NO: 37090 - protein, 343 aa, Arabidopsis thaliana
  peptide (1)..(343): Ceres Seq. ID no. 13593686
  misc_feature (1)..(333): Pfam Name: Amidase Pfam Description: Amidase
  misc_feature (1)..(333): Pfam Name: Amidase Pfam Description: Amidase
  misc_feature (1)..(108): Homolog of NCBI NO: 23499864 NR Description: conserved hypothetical protein [Brucella suis
  misc_feature (1)..(259): Homolog of NCBI NO: 38344119 NR Description: OSJNBb0050O03.16 [Oryza sativa (japonica
  misc_feature (1)..(343): Homolog of NCBI NO: 13937285 NR Description: chloroplast protein-translocon-like protein
  misc_feature (1)..(333): Homolog of NCBI NO: 30682691 NR Description: subunit of TOC complex -related [Arabidopsis
  misc_feature (1)..(333): Homolog of NCBI NO: 9955529 NR Description: putative subunit of TOC complex [Arabidopsis
  misc_feature (1)..(108): Homolog of NCBI NO: 23499864 NR Description: conserved hypothetical protein [Brucella suis
  misc_feature (1)..(343): Homolog of NCBI NO: 13937285 NR Description: chloroplast protein-translocon-like protein
  misc_feature (1)..(333): Homolog of NCBI NO: 9955529 NR Description: putative subunit of TOC complex [Arabidopsis
  misc_feature (1)..(343): Homolog of NCBI NO: 18390964 NR Description: amidase [Arabidopsis thaliana]
  misc_feature (1)..(142): Homolog of NCBI NO: 25402505 NR Description: hypothetical protein [imported] - Arabidopsis
  misc_feature (168)..(211): Homolog of NCBI NO: 25402505 NR Description: hypothetical protein [imported] - Arabidopsis
  misc_feature (1)..(339): Homolog of NCBI NO: 7453538 NR Description: Toc64 [Pisum sativum]
  misc_feature (1)..(339): Homolog of NCBI NO: 30684733 NR Description: chloroplast outer membrane translocon subunit,
  misc_feature (1)..(333): Homolog of NCBI NO: 30682691 NR Description: subunit of TOC complex -related [Arabidopsis
  misc_feature (1)..(259): Homolog of NCBI NO: 38344119 NR Description: OSJNBb0050O03.16 [Oryza sativa (japonica
  misc_feature (1)..(339): Homolog of NCBI NO: 30684733 NR Description: chloroplast outer membrane translocon subunit,
  misc_feature (1)..(339): Homolog of NCBI NO: 7453538 NR Description: Toc64 [Pisum sativum]
  misc_feature (168)..(211): Homolog of NCBI NO: 25402505 NR Description: hypothetical protein [imported] - Arabidopsis
  misc_feature (1)..(142): Homolog of NCBI NO: 25402505 NR Description: hypothetical protein [imported] - Arabidopsis
  misc_feature (1)..(343): Homolog of NCBI NO: 18390964 NR Description: amidase [Arabidopsis thaliana]
MDEMAYSINGENAHYGTPRNPIAFDRVPGGSSSGSAVAVAARLVDFSIGTDTGGSVRVPASYCGIFGFRPSHGAVSTVGLTPMAQSFDTVGWFARDTATLKRVGCVLLQQHHLNPIEPSQLIIADDCFKLCSVPHDLLVQPLVGSVEKSFGGNTVVKKVNLGEYIGQNVPSLKHFMTSDDVTTQQEFCIPSLMALSSSMRLLQRHEFKINHGAWISSVKPEFGPGISERIEEAIRTSDEKIDHCRSVKSELITALSTLLGEKGVLVIPTVPGPPPHLQANVAALESFRSRAFSLLSIAGVSGFCQVSIPLGLHENLPVSVSLVAKYGSDGFLLSLVDSLAAFI

SEQ ID NO: 37091 - DNA, 930 bp, Arabidopsis thaliana; identical to SEQ ID NO: 27097
  misc_feature (1)..(930): Ceres Seq. ID no. 12647740
  misc_feature: MA Experiment ID: 20000173 Result: Down-regulated in Transcription
  misc_feature: MA Experiment 20000173 PARAMETER Experiment Name: At_42deg_Heat_P Parameter: Age (day) Value: 14
  misc_feature: MA Experiment 20000173 PARAMETER Experiment Name: At_42deg_Heat_P Parameter: Organism Value: A. thaliana
  misc_feature: MA Experiment 20000173 PARAMETER Experiment Name: At_42deg_Heat_P Parameter: Plant Line Value: WS
  misc_feature: MA Experiment 20000173 PARAMETER Experiment Name: At_42deg_Heat_P Parameter: Temperature (deg C) Value: 42 vs. 22
  misc_feature: MA Experiment 20000173 PARAMETER Experiment Name: At_42deg_Heat_P Parameter: Timepoint (hr) Value: 6
  misc_feature: MA Experiment 20000173 PARAMETER Experiment Name: At_42deg_Heat_P Parameter: Tissue Value: Aerial
  misc_feature: MA Experiment ID: 20000185 Result: Down-regulated in Transcription
  misc_feature: MA Experiment 20000185 PARAMETER Experiment Name: At_Roots__P Parameter: Age (day) Value: 7 vs. 21
  misc_feature: MA Experiment 20000185 PARAMETER Experiment Name: At_Roots__P Parameter: Organism Value: A. thaliana
  misc_feature: MA Experiment 20000185 PARAMETER Experiment Name: At_Roots__P Parameter: Tissue Value: Roots vs. Whole Plant
  misc_feature: MA Experiment ID: 20000227 Result: Down-regulated in Transcription
  misc_feature: MA Experiment 20000227 PARAMETER Experiment Name: At_Root-Tips-vs-Tops_P Parameter: Tissue Value: Root Tips vs. Root Tops
  misc_feature: MA Experiment ID: 20000234 Result: Down-regulated in Transcription
  misc_feature: MA Experiment 20000234 PARAMETER Experiment Name: At_Siliques_P Parameter: Age (day) Value: 21
  misc_feature: MA Experiment 20000234 PARAMETER Experiment Name: At_Siliques_P Parameter: Organism Value: A. thaliana
  misc_feature: MA Experiment 20000234 PARAMETER Experiment Name: At_Siliques_P Parameter: Plant Line Value: WS
  misc_feature: MA Experiment 20000234 PARAMETER Experiment Name: At_Siliques_P Parameter: Tissue Value: Less Than 5mm Siliques vs. Whole Plant
  misc_feature: MA Experiment ID: 20000264 Result: Down-regulated in Transcription
  misc_feature: MA Experiment 20000264 PARAMETER Experiment Name: At_Open_Flower_P Parameter: Age (day) Value: 21
  misc_feature: MA Experiment 20000264 PARAMETER Experiment Name: At_Open_Flower_P Parameter: Plant Line Value: WS
  misc_feature: MA Experiment 20000264 PARAMETER Experiment Name: At_Open_Flower_P Parameter: Tissue Value: Open Flower vs. Whole Plant
  misc_feature: MA Experiment ID: 20000265 Result: Down-regulated in Transcription
  misc_feature: MA Experiment 20000265 PARAMETER Experiment Name: At_Open_Flower_P Parameter: Age (day) Value: 21
  misc_feature: MA Experiment 20000265 PARAMETER Experiment Name: At_Open_Flower_P Parameter: Plant Line Value: WS
  misc_feature: MA Experiment 20000265 PARAMETER Experiment Name: At_Open_Flower_P Parameter: Tissue Value: Closed Flower vs. Whole Plant
  misc_feature: MA Experiment ID: 20000268 Result: Down-regulated in Transcription
  misc_feature: MA Experiment 20000268 PARAMETER Experiment Name: At_100mM_NaCl__P Parameter: Age (day) Value: 14
  misc_feature: MA Experiment 20000268 PARAMETER Experiment Name: At_100mM_NaCl__P Parameter: Organism Value: A. thaliana
  misc_feature: MA Experiment 20000268 PARAMETER Experiment Name: At_100mM_NaCl__P Parameter: Plant Line Value: WS
  misc_feature: MA Experiment 20000268 PARAMETER Experiment Name: At_100mM_NaCl__P Parameter: Timepoint (hr) Value: 6
  misc_feature: MA Experiment 20000268 PARAMETER Experiment Name: At_100mM_NaCl__P Parameter: Tissue Value: Whole Plant
  misc_feature: MA Experiment 20000268 PARAMETER Experiment Name: At_100mM_NaCl__P Parameter: Treatment Value: 100mM NaCl vs. No Treatment
  misc_feature: MA Experiment ID: 20000269 Result: Down-regulated in Transcription
  misc_feature: MA Experiment 20000269 PARAMETER Experiment Name: At_1mM_KNO3_L-vs-H_Roots_P Parameter: Age (day) Value: 7,10,12
  misc_feature: MA Experiment 20000269 PARAMETER Experiment Name: At_1mM_KNO3_L-vs-H_Roots_P Parameter: Organism Value: A. thaliana
  misc_feature: MA Experiment 20000269 PARAMETER Experiment Name: At_1mM_KNO3_L-vs-H_Roots_P Parameter: Plant Line Value: WS
  misc_feature: MA Experiment 20000269 PARAMETER Experiment Name: At_1mM_KNO3_L-vs-H_Roots_P Parameter: Timepoint (day) Value: 7,10,12
  misc_feature: MA Experiment 20000269 PARAMETER Experiment Name: At_1mM_KNO3_L-vs-H_Roots_P Parameter: Tissue Value: Roots
  misc_feature: MA Experiment 20000269 PARAMETER Experiment Name: At_1mM_KNO3_L-vs-H_Roots_P Parameter: Treatment Value: 1mM KNO3 vs. 50mM KNO3
  misc_feature: MA Experiment ID: 20000286 Result: Down-regulated in Transcription
  misc_feature: MA Experiment 20000286 PARAMETER Experiment Name: At_Open_Flower_P Parameter: Age (day) Value: 21
  misc_feature: MA Experiment 20000286 PARAMETER Experiment Name: At_Open_Flower_P Parameter: Plant Line Value: WS
  misc_feature: MA Experiment 20000286 PARAMETER Experiment Name: At_Open_Flower_P Parameter: Tissue Value: Half Open vs. Whole Plant
  misc_feature: MA Experiment ID: 20000308 Result: Down-regulated in Transcription
  misc_feature: MA Experiment 20000308 PARAMETER Experiment Name: At_100mM_NaCl__P Parameter: Age (day) Value: 17
  misc_feature: MA Experiment 20000308 PARAMETER Experiment Name: At_100mM_NaCl__P Parameter: Organism Value: A. thaliana
  misc_feature: MA Experiment 20000308 PARAMETER Experiment Name: At_100mM_NaCl__P Parameter: Plant Line Value: WS
  misc_feature: MA Experiment 20000308 PARAMETER Experiment Name: At_100mM_NaCl__P Parameter: Timepoint (hr) Value: 72
  misc_feature: MA Experiment 20000308 PARAMETER Experiment Name: At_100mM_NaCl__P Parameter: Tissue Value: Whole Plant
  misc_feature: MA Experiment 20000308 PARAMETER Experiment Name: At_100mM_NaCl__P Parameter: Treatment Value: 100mM NaCl vs. No Treatment
  misc_feature: MA Experiment ID: 20000439 Result: Down-regulated in Transcription
  misc_feature: MA Experiment 20000439 PARAMETER Experiment Name: At_Roots__P Parameter: Age (day) Value: 14 vs. 21
  misc_feature: MA Experiment 20000439 PARAMETER Experiment Name: At_Roots__P Parameter: Organism Value: A. thaliana
  misc_feature: MA Experiment 20000439 PARAMETER Experiment Name: At_Roots__P Parameter: Tissue Value: Roots vs. Whole Plant
  misc_feature: MA Experiment ID: 20000441 Result: Up-regulated in Transcription
  misc_feature: MA Experiment 20000441 PARAMETER Experiment Name: At_1uM_BR-BRZ__P Parameter: Tissue Value: Shoot Apices
  misc_feature: MA Experiment 20000441 PARAMETER Experiment Name: At_1uM_BR-BRZ__P Parameter: Treatment Value: 1uM BR vs. No Treatment
  misc_feature: MA Experiment ID: 20000443 Result: Up-regulated in Transcription
  misc_feature: MA Experiment 20000443 PARAMETER Experiment Name: At_1uM_BR-BRZ__P Parameter: Tissue Value: Shoot Apices
  misc_feature: MA Experiment 20000443 PARAMETER Experiment Name: At_1uM_BR-BRZ__P Parameter: Treatment Value: 1uM BRZ vs. No Treatment
  misc_feature: MA Experiment ID: 20000451 Result: Down-regulated in Transcription
  misc_feature: MA Experiment 20000451 PARAMETER Experiment Name: At_CS6879_Shoots-Roots_P Parameter: Age (day) Value: 14
  misc_feature: MA Experiment 20000451 PARAMETER Experiment Name: At_CS6879_Shoots-Roots_P Parameter: Organism Value: A. thaliana
  misc_feature: MA Experiment 20000451 PARAMETER Experiment Name: At_CS6879_Shoots-Roots_P Parameter: Plant Line Value: CS6879 vs. WS
  misc_feature: MA Experiment 20000451 PARAMETER Experiment Name: At_CS6879_Shoots-Roots_P Parameter: Tissue Value: Roots
  misc_feature: MA Experiment ID: 20000460 Result: Up-regulated in Transcription
  misc_feature: MA Experiment 20000460 PARAMETER Experiment Name: At_10percent_PEG_P Parameter: Age (day) Value: 12
  misc_feature: MA Experiment 20000460 PARAMETER Experiment Name: At_10percent_PEG_P Parameter: Organism Value: A. thaliana
  misc_feature: MA Experiment 20000460 PARAMETER Experiment Name: At_10percent_PEG_P Parameter: Plant Line Value: WS
  misc_feature: MA Experiment 20000460 PARAMETER Experiment Name: At_10percent_PEG_P Parameter: Timepoint (day) Value: 12
  misc_feature: MA Experiment 20000460 PARAMETER Experiment Name: At_10percent_PEG_P Parameter: Tissue Value: Whole Plant
  misc_feature: MA Experiment 20000460 PARAMETER Experiment Name: At_10percent_PEG_P Parameter: Treatment Value: 10percent PEG vs. No Treatment
  misc_feature: MA Experiment ID: 20000527 Result: Up-regulated in Transcription
  misc_feature: MA Experiment 20000527 PARAMETER Experiment Name: At_10percent_PEG_P Parameter: Age (day) Value: 20
  misc_feature: MA Experiment 20000527 PARAMETER Experiment Name: At_10percent_PEG_P Parameter: Organism Value: A. thaliana
  misc_feature: MA Experiment 20000527 PARAMETER Experiment Name: At_10percent_PEG_P Parameter: Plant Line Value: WS
  misc_feature: MA Experiment 20000527 PARAMETER Experiment Name: At_10percent_PEG_P Parameter: Timepoint (day) Value: 20
  misc_feature: MA Experiment 20000527 PARAMETER Experiment Name: At_10percent_PEG_P Parameter: Tissue Value: Whole Plant
  misc_feature: MA Experiment 20000527 PARAMETER Experiment Name: At_10percent_PEG_P Parameter: Treatment Value: 10percent PEG vs. No Treatment
  misc_feature: MA Experiment ID: 20000794 Result: Down-regulated in Transcription
  misc_feature: MA Experiment 20000794 PARAMETER Experiment Name: At_Petals_P Parameter: Age (day) Value: 23-25 days
  misc_feature: MA Experiment 20000794 PARAMETER Experiment Name: At_Petals_P Parameter: Plant Line Value: WS
  misc_feature: MA Experiment 20000794 PARAMETER Experiment Name: At_Petals_P Parameter: Tissue Value: Petals vs. Whole plant
  misc_feature: MA Experiment ID: 20001247 Result: Up-regulated in Transcription
  misc_feature: MA Experiment 20001247 PARAMETER Experiment Name: At_Far-red-induction_P Parameter: Age (day) Value: 7
  misc_feature: MA Experiment 20001247 PARAMETER Experiment Name: At_Far-red-induction_P Parameter: Light Value: Far-red vs. White
  misc_feature: MA Experiment 20001247 PARAMETER Experiment Name: At_Far-red-induction_P Parameter: Organism Value: A. thaliana
  misc_feature: MA Experiment 20001247 PARAMETER Experiment Name: At_Far-red-induction_P Parameter: Plant Line Value: Columbia
  misc_feature: MA Experiment 20001247 PARAMETER Experiment Name: At_Far-red-induction_P Parameter: Timepoint (hr) Value: 1
  misc_feature: MA Experiment 20001247 PARAMETER Experiment Name: At_Far-red-induction_P Parameter: Tissue Value: Whole Plant
  misc_feature: MA Experiment ID: 20001450 Result: Up-regulated in Transcription
  misc_feature: MA Experiment 20001450 PARAMETER Experiment Name: At_Far-red-induction_P Parameter: Age (day) Value: 7
  misc_feature: MA Experiment 20001450 PARAMETER Experiment Name: At_Far-red-induction_P Parameter: Light Value: Far-red vs. White
  misc_feature: MA Experiment 20001450 PARAMETER Experiment Name: At_Far-red-induction_P Parameter: Organism Value: A. thaliana
  misc_feature: MA Experiment 20001450 PARAMETER Experiment Name: At_Far-red-induction_P Parameter: Plant Line Value: Columbia
  misc_feature: MA Experiment 20001450 PARAMETER Experiment Name: At_Far-red-induction_P Parameter: Timepoint (hr) Value: 8
  misc_feature: MA Experiment 20001450 PARAMETER Experiment Name: At_Far-red-induction_P Parameter: Tissue Value: Whole Plant
  misc_feature: MA Experiment ID: 20001451 Result: Up-regulated in Transcription
  misc_feature: MA Experiment 20001451 PARAMETER Experiment Name: At_Far-red-induction_P Parameter: Age (day) Value: 7
  misc_feature: MA Experiment 20001451 PARAMETER Experiment Name: At_Far-red-induction_P Parameter: Light Value: Far-red vs. White
  misc_feature: MA Experiment 20001451 PARAMETER Experiment Name: At_Far-red-induction_P Parameter: Organism Value: A. thaliana
  misc_feature: MA Experiment 20001451 PARAMETER Experiment Name: At_Far-red-induction_P Parameter: Plant Line Value: Columbia
  misc_feature: MA Experiment 20001451 PARAMETER Experiment Name: At_Far-red-induction_P Parameter: Timepoint (hr) Value: 24
  misc_feature: MA Experiment 20001451 PARAMETER Experiment Name: At_Far-red-induction_P Parameter: Tissue Value: Whole Plant
  misc_feature: MA Experiment ID: 20001458 Result: Up-regulated in Transcription
  misc_feature: MA Experiment 20001458 PARAMETER Experiment Name: At_50mM_NH4NO3_L-to-H_P Parameter: Age (day) Value: Undefined
  misc_feature: MA Experiment 20001458 PARAMETER Experiment Name: At_50mM_NH4NO3_L-to-H_P Parameter: Organism Value: Undefined
  misc_feature: MA Experiment 20001458 PARAMETER Experiment Name: At_50mM_NH4NO3_L-to-H_P Parameter: Plant Line Value: Undefined
  misc_feature: MA Experiment 20001458 PARAMETER Experiment Name: At_50mM_NH4NO3_L-to-H_P Parameter: Timepoint (hr) Value: 2
  misc_feature: MA Experiment 20001458 PARAMETER Experiment Name: At_50mM_NH4NO3_L-to-H_P Parameter: Tissue Value: Siliques
  misc_feature: MA Experiment 20001458 PARAMETER Experiment Name: At_50mM_NH4NO3_L-to-H_P Parameter: Treatment Value: 50mM NH4NO3 vs. 100mM Manitol
  misc_feature: MA Experiment ID: 20001459 Result: Down-regulated in Transcription
  misc_feature: MA Experiment 20001459 PARAMETER Experiment Name: At_50mM_NH4NO3_L-to-H_P Parameter: Age (day) Value: Undefined
  misc_feature: MA Experiment 20001459 PARAMETER Experiment Name: At_50mM_NH4NO3_L-to-H_P Parameter: Organism Value: Undefined
  misc_feature: MA Experiment 20001459 PARAMETER Experiment Name: At_50mM_NH4NO3_L-to-H_P Parameter: Plant Line Value: Undefined
  misc_feature: MA Experiment 20001459 PARAMETER Experiment Name: At_50mM_NH4NO3_L-to-H_P Parameter: Timepoint (hr) Value: 4
  misc_feature: MA Experiment 20001459 PARAMETER Experiment Name: At_50mM_NH4NO3_L-to-H_P Parameter: Tissue Value: Siliques
  misc_feature: MA Experiment 20001459 PARAMETER Experiment Name: At_50mM_NH4NO3_L-to-H_P Parameter: Treatment Value: 50mM NH4NO3 vs. 100mM Manitol
  misc_feature: MA Experiment ID: 20001504 Result: Down-regulated in Transcription
  misc_feature: MA Experiment 20001504 PARAMETER Experiment Name: At_Far-red-enriched_P Parameter: Age (day) Value: 10
  misc_feature: MA Experiment 20001504 PARAMETER Experiment Name: At_Far-red-enriched_P Parameter: Light Value: Far-red enriched vs. White
  misc_feature: MA Experiment 20001504 PARAMETER Experiment Name: At_Far-red-enriched_P Parameter: Organism Value: A. thaliana
  misc_feature: MA Experiment 20001504 PARAMETER Experiment Name: At_Far-red-enriched_P Parameter: Plant Line Value: Columbia
  misc_feature: MA Experiment 20001504 PARAMETER Experiment Name: At_Far-red-enriched_P Parameter: Timepoint (day) Value: 6
  misc_feature: MA Experiment 20001504 PARAMETER Experiment Name: At_Far-red-enriched_P Parameter: Tissue Value: Whole Plant
  misc_feature: MA Experiment ID: 20001554 Result: Down-regulated in Transcription
  misc_feature: MA Experiment 20001554 PARAMETER Experiment Name: At_Drought_Soil_Dry_P Parameter: Age (day) Value: 21
  misc_feature: MA Experiment 20001554 PARAMETER Experiment Name: At_Drought_Soil_Dry_P Parameter: Organism Value: A. thaliana
  misc_feature: MA Experiment 20001554 PARAMETER Experiment Name: At_Drought_Soil_Dry_P Parameter: Plant Line Value: WS
  misc_feature: MA Experiment 20001554 PARAMETER Experiment Name: At_Drought_Soil_Dry_P Parameter: Post Timepoint (hr) Value: None
  misc_feature: MA Experiment 20001554 PARAMETER Experiment Name: At_Drought_Soil_Dry_P Parameter: Post-Treatment Value: None
  misc_feature: MA Experiment 20001554 PARAMETER Experiment Name: At_Drought_Soil_Dry_P Parameter: Timepoint (day) Value: 7
  misc_feature: MA Experiment 20001554 PARAMETER Experiment Name: At_Drought_Soil_Dry_P Parameter: Treatment Value: Drought vs. No Drought
  misc_feature: MA Experiment ID: 20001555 Result: Down-regulated in Transcription
  misc_feature: MA Experiment 20001555 PARAMETER Experiment Name: At_Drought_Soil_Dry_P Parameter: Age (day) Value: 24
  misc_feature: MA Experiment 20001555 PARAMETER Experiment Name: At_Drought_Soil_Dry_P Parameter: Organism Value: A. thaliana
  misc_feature: MA Experiment 20001555 PARAMETER Experiment Name: At_Drought_Soil_Dry_P Parameter: Plant Line Value: WS
  misc_feature: MA Experiment 20001555 PARAMETER Experiment Name: At_Drought_Soil_Dry_P Parameter: Post Timepoint (hr) Value: None
  misc_feature: MA Experiment 20001555 PARAMETER Experiment Name: At_Drought_Soil_Dry_P Parameter: Post-Treatment Value: None
  misc_feature: MA Experiment 20001555 PARAMETER Experiment Name: At_Drought_Soil_Dry_P Parameter: Timepoint (day) Value: 10
  misc_feature: MA Experiment 20001555 PARAMETER Experiment Name: At_Drought_Soil_Dry_P Parameter: Treatment Value: Drought vs. No Drought
  misc_feature: MA Experiment ID: 20001556 Result: Down-regulated in Transcription
  misc_feature: MA Experiment 20001556 PARAMETER Experiment Name: At_Drought_Soil_Dry_P Parameter: Age (day) Value: 26
  misc_feature: MA Experiment 20001556 PARAMETER Experiment Name: At_Drought_Soil_Dry_P Parameter: Organism Value: A. thaliana
  misc_feature: MA Experiment 20001556 PARAMETER Experiment Name: At_Drought_Soil_Dry_P Parameter: Plant Line Value: WS
  misc_feature: MA Experiment 20001556 PARAMETER Experiment Name: At_Drought_Soil_Dry_P Parameter: Post Timepoint (hr) Value: None
  misc_feature: MA Experiment 20001556 PARAMETER Experiment Name: At_Drought_Soil_Dry_P Parameter: Post-Treatment Value: None
  misc_feature: MA Experiment 20001556 PARAMETER Experiment Name: At_Drought_Soil_Dry_P Parameter: Timepoint (day) Value: 12
  misc_feature: MA Experiment 20001556 PARAMETER Experiment Name: At_Drought_Soil_Dry_P Parameter: Treatment Value: Drought vs. No Drought
  misc_feature: MA Experiment ID: 20001557 Result: Down-regulated in Transcription
  misc_feature: MA Experiment 20001557 PARAMETER Experiment Name: At_Drought_Soil_Dry_P Parameter: Age (day) Value: 27
  misc_feature: MA Experiment 20001557 PARAMETER Experiment Name: At_Drought_Soil_Dry_P Parameter: Organism Value: A. thaliana
  misc_feature: MA Experiment 20001557 PARAMETER Experiment Name: At_Drought_Soil_Dry_P Parameter: Plant Line Value: WS
  misc_feature: MA Experiment 20001557 PARAMETER Experiment Name: At_Drought_Soil_Dry_P Parameter: Post Timepoint (hr) Value: 3
  misc_feature: MA Experiment 20001557 PARAMETER Experiment Name: At_Drought_Soil_Dry_P Parameter: Post-Treatment Value: Re-Water vs. No Drought
  misc_feature: MA Experiment 20001557 PARAMETER Experiment Name: At_Drought_Soil_Dry_P Parameter: Timepoint (day) Value: 13
  misc_feature: MA Experiment 20001557 PARAMETER Experiment Name: At_Drought_Soil_Dry_P Parameter: Treatment Value: Drought vs. No Drought
  misc_feature: MA Experiment ID: 20001558 Result: Down-regulated in Transcription
  misc_feature: MA Experiment 20001558 PARAMETER Experiment Name: At_Drought_Soil_Dry_P Parameter: Age (day) Value: 27
  misc_feature: MA Experiment 20001558 PARAMETER Experiment Name: At_Drought_Soil_Dry_P Parameter: Organism Value: A. thaliana
  misc_feature: MA Experiment 20001558 PARAMETER Experiment Name: At_Drought_Soil_Dry_P Parameter: Plant Line Value: WS
  misc_feature: MA Experiment 20001558 PARAMETER Experiment Name: At_Drought_Soil_Dry_P Parameter: Post Timepoint (hr) Value: 6
  misc_feature: MA Experiment 20001558 PARAMETER Experiment Name: At_Drought_Soil_Dry_P Parameter: Post-Treatment Value: Re-Water vs. No Drought
  misc_feature: MA Experiment 20001558 PARAMETER Experiment Name: At_Drought_Soil_Dry_P Parameter: Timepoint (day) Value: 13
  misc_feature: MA Experiment 20001558 PARAMETER Experiment Name: At_Drought_Soil_Dry_P Parameter: Treatment Value: Drought vs. No Drought
  misc_feature: MA Experiment ID: 20001559 Result: Down-regulated in Transcription
  misc_feature: MA Experiment 20001559 PARAMETER Experiment Name: At_Drought_Soil_Dry_P Parameter: Age (day) Value: 28
  misc_feature: MA Experiment 20001559 PARAMETER Experiment Name: At_Drought_Soil_Dry_P Parameter: Organism Value: A. thaliana
  misc_feature: MA Experiment 20001559 PARAMETER Experiment Name: At_Drought_Soil_Dry_P Parameter: Plant Line Value: WS
  misc_feature: MA Experiment 20001559 PARAMETER Experiment Name: At_Drought_Soil_Dry_P Parameter: Post Timepoint (hr) Value: 29
  misc_feature: MA Experiment 20001559 PARAMETER Experiment Name: At_Drought_Soil_Dry_P Parameter: Post-Treatment Value: Re-Water vs. No Drought
  misc_feature: MA Experiment 20001559 PARAMETER Experiment Name: At_Drought_Soil_Dry_P Parameter: Timepoint (day) Value: 14
  misc_feature: MA Experiment 20001559 PARAMETER Experiment Name: At_Drought_Soil_Dry_P Parameter: Treatment Value: Drought vs. No Drought
  misc_feature: MA Experiment ID: 20001560 Result: Down-regulated in Transcription
  misc_feature: MA Experiment 20001560 PARAMETER Experiment Name: At_Drought_Soil_Dry_P Parameter: Age (day) Value: 28
  misc_feature: MA Experiment 20001560 PARAMETER Experiment Name: At_Drought_Soil_Dry_P Parameter: Organism Value: A. thaliana
  misc_feature: MA Experiment 20001560 PARAMETER Experiment Name: At_Drought_Soil_Dry_P Parameter: Plant Line Value: WS
  misc_feature: MA Experiment 20001560 PARAMETER Experiment Name: At_Drought_Soil_Dry_P Parameter: Post Timepoint (hr) Value: None
  misc_feature: MA Experiment 20001560 PARAMETER Experiment Name: At_Drought_Soil_Dry_P Parameter: Post-Treatment Value: None
  misc_feature: MA Experiment 20001560 PARAMETER Experiment Name: At_Drought_Soil_Dry_P Parameter: Timepoint (day) Value: 14
  misc_feature: MA Experiment 20001560 PARAMETER Experiment Name: At_Drought_Soil_Dry_P Parameter: Treatment Value: Drought vs. No Drought
  misc_feature: MA Experiment ID: 20001755 Result: Down-regulated in Transcription
  misc_feature: MA Experiment 20001755 PARAMETER Experiment Name: At_50mM_NH4NO3_L-to-H_P Parameter: Timepoint (hr) Value: 2
  misc_feature: MA Experiment 20001755 PARAMETER Experiment Name: At_50mM_NH4NO3_L-to-H_P Parameter: Tissue Value: Leaf
  misc_feature: MA Experiment 20001755 PARAMETER Experiment Name: At_50mM_NH4NO3_L-to-H_P Parameter: Treatment Value: 50mM NH4NO3 vs 100mM Mannitol
  misc_feature: MA Experiment ID: 20001757 Result: Up-regulated in Transcription
  misc_feature: MA Experiment 20001757 PARAMETER Experiment Name: At_50mM_NH4NO3_L-to-H_P Parameter: Timepoint (hr) Value: 6
  misc_feature: MA Experiment 20001757 PARAMETER Experiment Name: At_50mM_NH4NO3_L-to-H_P Parameter: Tissue Value: Leaf
  misc_feature: MA Experiment 20001757 PARAMETER Experiment Name: At_50mM_NH4NO3_L-to-H_P Parameter: Treatment Value: 50mM NH4NO3 vs 100mM Mannitol
  misc_feature: MA Experiment ID: 20001906 Result: Down-regulated in Transcription
  misc_feature: MA Experiment 20001906 PARAMETER Experiment Name: At_Drought_Reproduction_P Parameter: Age (day) Value: 35
  misc_feature: MA Experiment 20001906 PARAMETER Experiment Name: At_Drought_Reproduction_P Parameter: Organism Value: A. thaliana
  misc_feature: MA Experiment 20001906 PARAMETER Experiment Name: At_Drought_Reproduction_P Parameter: Plant Line Value: WS
  misc_feature: MA Experiment 20001906 PARAMETER Experiment Name: At_Drought_Reproduction_P Parameter: Timepoint (day) Value: 5
  misc_feature: MA Experiment 20001906 PARAMETER Experiment Name: At_Drought_Reproduction_P Parameter: Tissue Value: Siliques
  misc_feature: MA Experiment 20001906 PARAMETER Experiment Name: At_Drought_Reproduction_P Parameter: Treatment Value: Drought vs. No Drought
  misc_feature: MA Experiment ID: 20001907 Result: Down-regulated in Transcription
  misc_feature: MA Experiment 20001907 PARAMETER Experiment Name: At_Drought_Reproduction_P Parameter: Age (day) Value: 37
  misc_feature: MA Experiment 20001907 PARAMETER Experiment Name: At_Drought_Reproduction_P Parameter: Organism Value: A. thaliana
  misc_feature: MA Experiment 20001907 PARAMETER Experiment Name: At_Drought_Reproduction_P Parameter: Plant Line Value: WS
  misc_feature: MA Experiment 20001907 PARAMETER Experiment Name: At_Drought_Reproduction_P Parameter: Timepoint (day) Value: 7
  misc_feature: MA Experiment 20001907 PARAMETER Experiment Name: At_Drought_Reproduction_P Parameter: Tissue Value: Siliques
  misc_feature: MA Experiment 20001907 PARAMETER Experiment Name: At_Drought_Reproduction_P Parameter: Treatment Value: Drought vs. No Drought
  misc_feature: MA Experiment ID: 20001908 Result: Down-regulated in Transcription
  misc_feature: MA Experiment 20001908 PARAMETER Experiment Name: At_Drought_Reproduction_P Parameter: Age (day) Value: 40
  misc_feature: MA Experiment 20001908 PARAMETER Experiment Name: At_Drought_Reproduction_P Parameter: Organism Value: A. thaliana
  misc_feature: MA Experiment 20001908 PARAMETER Experiment Name: At_Drought_Reproduction_P Parameter: Plant Line Value: WS
  misc_feature: MA Experiment 20001908 PARAMETER Experiment Name: At_Drought_Reproduction_P Parameter: Timepoint (day) Value: 10
  misc_feature: MA Experiment 20001908 PARAMETER Experiment Name: At_Drought_Reproduction_P Parameter: Tissue Value: Siliques
  misc_feature: MA Experiment 20001908 PARAMETER Experiment Name: At_Drought_Reproduction_P Parameter: Treatment Value: Drought vs. No Drought

SEQ ID NO: 37092 - protein, 253 aa, Arabidopsis thaliana; identical to SEQ ID NO: 27098
  peptide (1)..(253): Ceres Seq. ID no. 12647741
  misc_feature (1)..(249): Homolog of NCBI NO: 18416995 NR Description: putative protein
  misc_feature (1)..(253): Homolog of NCBI NO: 18400774 NR Description: expressed protein
  misc_feature (1)..(249): Homolog of NCBI NO: 18416995 NR Description: putative protein
  misc_feature (1)..(253): Homolog of NCBI NO: 18400774 NR Description: expressed protein
  misc_feature (1)..(249): Homolog of NCBI NO: 18416995 NR Description: putative protein
  misc_feature (1)..(253): Homolog of NCBI NO: 18400774 NR Description: expressed protein

SEQ ID NO: 37093 - protein, 205 aa, Arabidopsis thaliana; identical to SEQ ID NO: 27099
  peptide (1)..(205): Ceres Seq. ID no. 12647742
  misc_feature (1)..(201): Homolog of NCBI NO: 18416995 NR Description: putative protein
  misc_feature (1)..(205): Homolog of NCBI NO: 18400774 NR Description: expressed protein
  misc_feature (1)..(201): Homolog of NCBI NO: 18416995 NR Description: putative protein
  misc_feature (1)..(205): Homolog of NCBI NO: 18400774 NR Description: expressed protein
  misc_feature (1)..(201): Homolog of NCBI NO: 18416995 NR Description: putative protein
  misc_feature (1)..(205): Homolog of NCBI NO: 18400774 NR Description: expressed protein

SEQ ID NO: 37094 - protein, 174 aa, Arabidopsis thaliana; identical to SEQ ID NO: 27100
  peptide (1)..(174): Ceres Seq. ID no. 12647743
  misc_feature (1)..(170): Homolog of NCBI NO: 18416995 NR Description: putative protein
  misc_feature (1)..(174): Homolog of NCBI NO: 18400774 NR Description: expressed protein
  misc_feature (1)..(170): Homolog of NCBI NO: 18416995 NR Description: putative protein
  misc_feature (1)..(174): Homolog of NCBI NO: 18400774 NR Description: expressed protein
  misc_feature (1)..(170): Homolog of NCBI NO: 18416995 NR Description: putative protein
  misc_feature (1)..(174): Homolog of NCBI NO: 18400774 NR Description: expressed protein

SEQ ID NO: 37095 - DNA, 740 bp, Arabidopsis thaliana
  misc_feature (1)..(740): Ceres Seq. ID no. 13646106
  misc_feature: MA Experiment ID: 20000355 Result: Up-regulated in Transcription
  misc_feature: MA Experiment 20000355 PARAMETER Experiment Name: At_Siliques_Sub_P Parameter: Age (day) Value: 21
  misc_feature: MA Experiment 20000355 PARAMETER Experiment Name: At_Siliques_Sub_P Parameter: Organism Value: A. thaliana
  misc_feature: MA Experiment 20000355 PARAMETER Experiment Name: At_Siliques_Sub_P Parameter: Plant Line Value: WS
  misc_feature: MA Experiment 20000355 PARAMETER Experiment Name: At_Siliques_Sub_P Parameter: Tissue Value: Less Than 5mm Siliques vs. Whole Plant
acggcgccaccattaaaatctctcgatctctatctgcgaaatttcacggtgagcttagtattactctcaattgttctcagtaggtatttgaaatggcgacagttccaggacaattgatctgggagatcgtgaagaacaacaactgtttcttggtgaagcagttcggtagaggaaactctaaggttcaattcagcaaggagactaacaacctcaccaacgttcactcttacaagcactctggtcttgcaaacaaaaagactgtgaccatccaggccgctgacaaggaccaagctgttgtgctcgccaccaccaagaccaagaagcagaacaagcctaagctctctgtcaacaagtctatcctcaagaaggaattccccaggatgtcaaaggctgttgctaaccaggtggtggacaactactacaggccggacttgaagaaagctgcacttgctagactcagcgccatcagcaaaggtctcagggttgccaagtccggtgccaagcaaagaaacagacaagcttaagcttcttcgtttcacaatctgttttttttgaagtaaaagattctgttgaacaggttttatgtaagttgttgctttgaagatgttccataatgctattctcctttttcattatccttattataaaggagttagaagtttatcttgttatgcttgatgtttctggtgtgcttgtgcttacattttgttagatccttctatcgaatcaggagctttctc

SEQ ID NO: 37096 - protein, 143 aa, Arabidopsis thaliana [sequence omitted]

SEQ ID NO: 37097 - DNA, 1714 bp, Arabidopsis thaliana
  misc_feature (1)..(1714): Ceres Seq. ID no. 12336512
  misc_feature: MA Experiment ID: 108434 Result: Up-regulated in Transcription
  misc_feature: MA Experiment 108434 PARAMETER Experiment Name: At_Root_Tips_cDNA_P Parameter: Tissue Value: Root Tips
  misc_feature: MA Experiment ID: 108461 Result: Down-regulated in Transcription
  misc_feature: MA Experiment 108461 PARAMETER Experiment Name: At_Germinating_Seeds_cDNA_P Parameter: Age (day) Value: 1 vs. 0
  misc_feature: MA Experiment 108461 PARAMETER Experiment Name: At_Germinating_Seeds_cDNA_P Parameter: Tissue Value: Germinating Seeds
  misc_feature: MA Experiment ID: 108462 Result: Down-regulated in Transcription
  misc_feature: MA Experiment 108462 PARAMETER Experiment Name: At_Germinating_Seeds_cDNA_P Parameter: Age (day) Value: 2 vs. 0
  misc_feature: MA Experiment 108462 PARAMETER Experiment Name: At_Germinating_Seeds_cDNA_P Parameter: Tissue Value: Germinating Seeds
  misc_feature: MA Experiment ID: 108463 Result: Down-regulated in Transcription
  misc_feature: MA Experiment 108463 PARAMETER Experiment Name: At_Germinating_Seeds_cDNA_P Parameter: Age (day) Value: 3 vs. 0
  misc_feature: MA Experiment 108463 PARAMETER Experiment Name: At_Germinating_Seeds_cDNA_P Parameter: Tissue Value: Germinating Seeds
  misc_feature: MA Experiment ID: 108464 Result: Down-regulated in Transcription
  misc_feature: MA Experiment 108464 PARAMETER Experiment Name: At_Germinating_Seeds_cDNA_P Parameter: Age (day) Value: 4 vs. 0
  misc_feature: MA Experiment 108464 PARAMETER Experiment Name: At_Germinating_Seeds_cDNA_P Parameter: Tissue Value: Germinating Seeds
  misc_feature: MA Experiment ID: 108569 Result: Down-regulated in Transcription
  misc_feature: MA Experiment 108569 PARAMETER Experiment Name: At_0.001%_MeJA__cDNA_P Parameter: Timepoint (hr) Value: 6
  misc_feature: MA Experiment 108569 PARAMETER Experiment Name: At_0.001%_MeJA__cDNA_P Parameter: Tissue Value: Aerial
  misc_feature: MA Experiment 108569 PARAMETER Experiment Name: At_0.001%_MeJA__cDNA_P Parameter: Treatment Value: 0.001% MeJA vs. No Treatment
  misc_feature: MA Experiment ID: 20000113 Result: Up-regulated in Transcription
  misc_feature: MA Experiment 20000113 PARAMETER Experiment Name: At_42deg_Heat_cDNA_P Parameter: Temperature (deg C) Value: 42 vs. 22
  misc_feature: MA Experiment 20000113 PARAMETER Experiment Name: At_42deg_Heat_cDNA_P Parameter: Timepoint (hr) Value: 8
  misc_feature: MA Experiment 20000113 PARAMETER Experiment Name: At_42deg_Heat_cDNA_P Parameter: Tissue Value: Aerial
  misc_feature: MA Experiment ID: 20000179 Result: Down-regulated in Transcription
  misc_feature: MA Experiment 20000179 PARAMETER Experiment Name: At_Germinating_Seeds_P Parameter: Age (hr) Value: 6 vs. 0
  misc_feature: MA Experiment 20000179 PARAMETER Experiment Name: At_Germinating_Seeds_P Parameter: Tissue Value: Germinating Seeds
  misc_feature: MA Experiment ID: 20000180 Result: Down-regulated in Transcription
  misc_feature: MA Experiment 20000180 PARAMETER Experiment Name: At_Germinating_Seeds_P Parameter: Age (hr) Value: 24 vs. 0
  misc_feature: MA Experiment 20000180 PARAMETER Experiment Name: At_Germinating_Seeds_P Parameter: Tissue Value: Germinating Seeds
  misc_feature: MA Experiment ID: 20000184 Result: Down-regulated in Transcription
  misc_feature: MA Experiment 20000184 PARAMETER Experiment Name: At_Shoots__P Parameter: Age (day) Value: 7
  misc_feature: MA Experiment 20000184 PARAMETER Experiment Name: At_Shoots__P Parameter: Tissue Value: Shoots vs. Whole Plant
  misc_feature: MA Experiment ID: 20000224 Result: Up-regulated in Transcription
  misc_feature: MA Experiment ID: 20000438 Result: Down-regulated in Transcription
  misc_feature: MA Experiment 20000438 PARAMETER Experiment Name: At_Shoots__P Parameter: Age (day) Value: 14
  misc_feature: MA Experiment 20000438 PARAMETER Experiment Name: At_Shoots__P Parameter: Tissue Value: Shoots vs. Whole Plant
  misc_feature: MA Experiment ID: 20001248 Result: Up-regulated in Transcription
  misc_feature: MA Experiment 20001248 PARAMETER Experiment Name: At_Far-red-induction_P Parameter: Age (day) Value: 7
  misc_feature: MA Experiment 20001248 PARAMETER Experiment Name: At_Far-red-induction_P Parameter: Light Value: Far-red vs. White
  misc_feature: MA Experiment 20001248 PARAMETER Experiment Name: At_Far-red-induction_P Parameter: Organism Value: A. thaliana
  misc_feature: MA Experiment 20001248 PARAMETER Experiment Name: At_Far-red-induction_P Parameter: Plant Line Value: Columbia
  misc_feature: MA Experiment 20001248 PARAMETER Experiment Name: At_Far-red-induction_P Parameter: Timepoint (hr) Value: 4
  misc_feature: MA Experiment 20001248 PARAMETER Experiment Name: At_Far-red-induction_P Parameter: Tissue Value: Whole Plant
  misc_feature: MA Experiment ID: 20001450 Result: Up-regulated in Transcription
  misc_feature: MA Experiment 20001450 PARAMETER Experiment Name: At_Far-red-induction_P Parameter: Age (day) Value: 7
  misc_feature: MA Experiment 20001450 PARAMETER Experiment Name: At_Far-red-induction_P Parameter: Light Value: Far-red vs. White
  misc_feature: MA Experiment 20001450 PARAMETER Experiment Name: At_Far-red-induction_P Parameter: Organism Value: A. thaliana
  misc_feature: MA Experiment 20001450 PARAMETER Experiment Name: At_Far-red-induction_P Parameter: Plant Line Value: Columbia
  misc_feature: MA Experiment 20001450 PARAMETER Experiment Name: At_Far-red-induction_P Parameter: Timepoint (hr) Value: 8
  misc_feature: MA Experiment 20001450 PARAMETER Experiment Name: At_Far-red-induction_P Parameter: Tissue Value: Whole Plant
  misc_feature: MA Experiment ID: 20001451 Result: Up-regulated in Transcription
  misc_feature: MA Experiment 20001451 PARAMETER Experiment Name: At_Far-red-induction_P Parameter: Age (day) Value: 7
  misc_feature: MA Experiment 20001451 PARAMETER Experiment Name: At_Far-red-induction_P Parameter: Light Value: Far-red vs. White
  misc_feature: MA Experiment 20001451 PARAMETER Experiment Name: At_Far-red-induction_P Parameter: Organism Value: A. thaliana
  misc_feature: MA Experiment 20001451 PARAMETER Experiment Name: At_Far-red-induction_P Parameter: Plant Line Value: Columbia
  misc_feature: MA Experiment 20001451 PARAMETER Experiment Name: At_Far-red-induction_P Parameter: Timepoint (hr) Value: 24
  misc_feature: MA Experiment 20001451 PARAMETER Experiment Name: At_Far-red-induction_P Parameter: Tissue Value: Whole Plant
  misc_feature: MA Experiment ID: 20001911 Result: Up-regulated in Transcription
  misc_feature: MA Experiment 20001911 PARAMETER Experiment Name: At_Drought_Reproduction_P Parameter: Age (day) Value: 40
  misc_feature: MA Experiment 20001911 PARAMETER Experiment Name: At_Drought_Reproduction_P Parameter: Organism Value: A. thaliana
  misc_feature: MA Experiment 20001911 PARAMETER Experiment Name: At_Drought_Reproduction_P Parameter: Plant Line Value: WS
  misc_feature: MA Experiment 20001911 PARAMETER Experiment Name: At_Drought_Reproduction_P Parameter: Timepoint (day) Value: 10
  misc_feature: MA Experiment 20001911 PARAMETER Experiment Name: At_Drought_Reproduction_P Parameter: Tissue Value: Flowers
  misc_feature: MA Experiment 20001911 PARAMETER Experiment Name: At_Drought_Reproduction_P Parameter: Treatment Value: Drought vs. No Drought
aatctctctctccctctttcttcctcttctctcattgaaatcgaacgaggatggggaagaagaaatcgaaggaaacggagccggaatctcaaaacgatgaatctcagacaatcttctccactctcttctccggcgaggttgaaagctctggctttgcgagtctcttctccgctgataaccctttccggcgaaaacaacctcaagaaatcaaagagtcgtcaattcctgatgagaagaaaggggataaacgaaatgcagagcaacgaagaaggagaagaagaaacagatttgcctgtgaagacgaagaaatctaaaaaggaaaaaaagcttacagattccggcgacaagaaagagacgatttcggaggctgtagaagaaagtgggttggtttcaaagaggaagaagaggaagagagatgagattgagaacgaatacgagacgaagaagtatggaagcgttgagatgaaagagaagaaggttggtgagaagaggaagaaagctgatgaagtagctgatacaatggtttcaaaggaaggttttgatgatgagagtaagcttcttagaactgttttcgttgggaatttgcctttgaaggttaagaaaaaagtcatcttgaaggagtttagtaaatttggtgaggttgaatctgtgaggatacgctctgtgcctattgttgattcgaagaggacaaggaaaggagctataatgctgaaacaaatcaatgagaaagcttcaagtgttcatgcttatgttgtgtttgaaacagagcaatctgctgcagcttctctggcacataacatgtctctgattgatgggaatcatgtccgcgttgatagagcatgtccgcctcgtaagaaacagaaagggcatgatgatactcatttgtatgatcctaagaggacagtctttatgggtaatctccctttcgatgtgaaggacgaggaagtgtatcaactgtttacgggtaagagtaatctggagaacagtatagaagctgttcgtgtcattagagatcctcacttgaacattgggaaaggaatagcttacgtcttgtttaaaacacgggaagctgcaaatctcgtactcaagaaaggatacttgaagcttagagaaagagagttacggatttctcgagtcaaacctgatacgccatcaaagagaaagagcaatccgtctgaagcttactcgccggcccagaaaagactgcagaaggacaaagtggtcacaccaactccaacagggaaggctaatctttcatatcaaggtgtacgagcttcaagatctggtgatgataagaaaacaccttatcagaaaagctccgcgcagacaaagatgagacctagaggtagcagcagcaatgacaacaaaaaatctgggaataatagtgcttcaaaggaaagaagtcagaagcgaccagctgttgcagcaagaaaggcgaaagcaaacgcaaaaggttcaaaagagagcggtggtaagcggtttgcagggacaaagcgtaaacaagaaaaccggacgcctgaaatcttntctaagaagaaaaaaacaaaacggttttagncggtttctttcaaccataatggtgaacctctttcttcttccttagttttgatactagtagtcgttttgtattgttctcttatatcaatcaatgatgatatactgtaatgttgcaacaattatgttttcgtgcaagtttaaaaggaaagctattttg

SEQ ID NO: 37098 - protein, 518 aa, Arabidopsis thaliana
  peptide (1)..(518): Ceres Seq. ID no. 12336513
  misc_feature (190)..(277): Pfam Name: RNA recognition motif. (a.k.a. RRM, RBD, or RNP domain) Pfam Description: RNA recognition motif. (a.k.a. RRM, RBD, or RNP
  misc_feature (91)..(379): Homolog of NCBI NO: 7498869 NR Description: hypothetical protein F11A10.2 - Caenorhabditis
  misc_feature (89)..(402): Homolog of NCBI NO: 34863377 NR Description: similar to DNA segment, Chr 8, ERATO Doi 233,
  misc_feature (91)..(442): Homolog of NCBI NO: 17539754 NR Description: RNA recognition motif containing protein (43.9
  misc_feature (78)..(378): Homolog of NCBI NO: 27370124 NR Description: RIKEN cDNA 4930547K05 [Mus musculus]
  misc_feature (83)..(442): Homolog of NCBI NO: 39593884 NR Description: Hypothetical protein CBG06224 [Caenorhabditis
  misc_feature (79)..(446): Homolog of NCBI NO: 37549473 NR Description: similar to DNA segment, Chr 8, ERATO Doi 233,
  misc_feature (81)..(471): Homolog of NCBI NO: 19115130 NR Description: putative RNA-binding protein [Schizosaccharomyces
  misc_feature (120)..(517): Homolog of NCBI NO: 29126350 NR Description: unknown protein [Oryza sativa (japonica
  misc_feature (79)..(518): Homolog of NCBI NO: 15237960 NR Description: RRM-containing protein
  misc_feature (79)..(518): Homolog of NCBI NO: 21554835 NR Description: unknown [Arabidopsis thaliana]
  misc_feature (509)..(509): Xaa is any aa, unknown or other
NLSLPLSSSSLIEIERGWGRRNRRKRSRNLKTMNLRQSSPLSSPARLKALALRVSSPLITLSGENNLKKSKSRQFLMRRKGINEMQSNEEGEEETDLPVKTKKSKKEKKLTDSGDKKETISEAVEESGLVSKRKKRKRDEIENEYETKKYGSVEMKEKKVGEKRKKADEVADTMVSKEGFDDESKLLRTVFVGNLPLKVKKKVILKEFSKFGEVESVRIRSVPIVDSKRTRKGAIMLKQINEKASSVHAYVVFETEQSAAASLAHNMSLIDGNHVRVDRACPPRKKQKGHDDTHLYDPKRTVFMGNLPFDVKDEEVYQLFTGKSNLENSIEAVRVIRDPHLNIGKGIAYVLFKTREAANLVLKKGYLKLRERELRISRVKPDTPSKRKSNPSEAYSPAQKRLQKDKVVTPTPTGKANLSYQGVRASRSGDDKKTPYQKSSAQTKMRPRGSSSNDNKKSGNNSASKERSQKRPAVAARKAKANAKGSKESGGKRFAGTKRKQENRTPEIXSKKKKTKRF

SEQ ID NO: 37099 - protein, 486 aa, Arabidopsis thaliana
  peptide (1)..(486): Ceres Seq. ID no. 12336514
  misc_feature (158)..(245): Pfam Name: RNA recognition motif. (a.k.a. RRM, RBD, or RNP domain) Pfam Description: RNA recognition motif. (a.k.a. RRM, RBD, or RNP
  misc_feature (59)..(347): Homolog of NCBI NO: 7498869 NR Description: hypothetical protein F11A10.2 - Caenorhabditis
  misc_feature (57)..(370): Homolog of NCBI NO: 34863377 NR Description: similar to DNA segment, Chr 8, ERATO Doi 233,
  misc_feature (59)..(410): Homolog of NCBI NO: 17539754 NR Description: RNA recognition motif containing protein (43.9
  misc_feature (46)..(346): Homolog of NCBI NO: 27370124 NR Description: RIKEN cDNA 4930547K05 [Mus musculus]
  misc_feature (51)..(410): Homolog of NCBI NO: 39593884 NR Description: Hypothetical protein CBG06224 [Caenorhabditis
  misc_feature (47)..(414): Homolog of NCBI NO: 37549473 NR Description: similar to DNA segment, Chr 8, ERATO Doi 233,
  misc_feature (49)..(439): Homolog of NCBI NO: 19115130 NR Description: putative RNA-binding protein [Schizosaccharomyces
  misc_feature (88)..(485): Homolog of NCBI NO: 29126350 NR Description: unknown protein [Oryza sativa (japonica
  misc_feature (47)..(486): Homolog of NCBI NO: 15237960 NR Description: RRM-containing protein
  misc_feature (47)..(486): Homolog of NCBI NO: 21554835 NR Description: unknown [Arabidopsis thaliana]
  misc_feature (477)..(477): Xaa is any aa, unknown or other
MNLRQSSPLSSPARLKALALRVSSPLITLSGENNLKKSKSRQFLMRRKGINEMQSNEEGEEETDLPVKTKKSKKEKKLTDSGDKKETISEAVEESGLVSKRKKRKRDEIENEYETKKYGSVEMKEKKVGEKRKKADEVADTMVSKEGFDDESKLLRTVFVGNLPLKVKKKVILKEFSKFGEVESVRIRSVPIVDSKRTRKGAIMLKQINEKASSVHAYVVFETEQSAAASLAHNMSLIDGNHVRVDRACPPRKKQKGHDDTHLYDPKRTVFMGNLPFDVKDEEVYQLFTGKSNLENSIEAVRVIRDPHLNIGKGIAYVLFKTREAANLVLKKGYLKLRERELRISRVKPDTPSKRKSNPSEAYSPAQKRLQKDKVVTPTPTGKANLSYQGVRASRSGDDKKTPYQKSSAQTKMRPRGSSSNDNKKSGNNSASKERSQKRPAVAARKAKANAKGSKESGGKRFAGTKRKQENRTPEIXSKKKKTKRF

SEQ ID NO: 37100 - protein, 442 aa, Arabidopsis thaliana
  peptide (1)..(442): Ceres Seq. ID no. 12336515
  misc_feature (114)..(201): Pfam Name: RNA recognition motif. (a.k.a. RRM, RBD, or RNP domain) Pfam Description: RNA recognition motif. (a.k.a. RRM, RBD, or RNP
  misc_feature (15)..(303): Homolog of NCBI NO: 7498869 NR Description: hypothetical protein F11A10.2 - Caenorhabditis
  misc_feature (13)..(326): Homolog of NCBI NO: 34863377 NR Description: similar to DNA segment, Chr 8, ERATO Doi 233,
  misc_feature (15)..(366): Homolog of NCBI NO: 17539754 NR Description: RNA recognition motif containing protein (43.9
  misc_feature (2)..(302): Homolog of NCBI NO: 27370124 NR Description: RIKEN cDNA 4930547K05 [Mus musculus]
  misc_feature (7)..(366): Homolog of NCBI NO: 39593884 NR Description: Hypothetical protein CBG06224 [Caenorhabditis
  misc_feature (3)..(370): Homolog of NCBI NO: 37549473 NR Description: similar to DNA segment, Chr 8, ERATO Doi 233,
  misc_feature (5)..(395): Homolog of NCBI NO: 19115130 NR Description: putative RNA-binding protein [Schizosaccharomyces
  misc_feature (44)..(441): Homolog of NCBI NO: 29126350 NR Description: unknown protein [Oryza sativa (japonica
  misc_feature (3)..(442): Homolog of NCBI NO: 15237960 NR Description: RRM-containing protein
  misc_feature (3)..(442): Homolog of NCBI NO: 21554835 NR Description: unknown [Arabidopsis thaliana]
  misc_feature (433)..(433): Xaa is any aa, unknown or other
MRRKGINEMQSNEEGEEETDLPVKTKKSKKEKKLTDSGDKKETISEAVEESGLVSKRKKRKRDEIENEYETKKYGSVEMKEKKVGEKRKKADEVADTMVSKEGFDDESKLLRTVFVGNLPLKVKKKVILKEFSKFGEVESVRIRSVPIVDSKRTRKGAIMLKQINEKASSVHAYVVFETEQSAAASLAHNMSLIDGNHVRVDRACPPRKKQKGHDDTHLYDPKRTVFMGNLPFDVKDEEVYQLFTGKSNLENSIEAVRVIRDPHLNIGKGIAYVLFKTREAANLVLKKGYLKLRERELRISRVKPDTPSKRKSNPSEAYSPAQKRLQKDKVVTPTPTGKANLSYQGVRASRSGDDKKTPYQKSSAQTKMRPRGSSSNDNKKSGNNSASKERSQKRPAVAARKAKANAKGSKESGGKRFAGTKRKQENRTPEIXSKKKKTKRF

SEQ ID NO: 37101 - DNA, 1123 bp, Arabidopsis thaliana
  misc_feature (1)..(1123): Ceres Seq. ID no. 12336416
  misc_feature: MA Experiment ID: 108461 Result: Up-regulated in Transcription
  misc_feature: MA Experiment 108461 PARAMETER Experiment Name: At_Germinating_Seeds_cDNA_P Parameter: Age (day) Value: 1 vs. 0
  misc_feature: MA Experiment 108461 PARAMETER Experiment Name: At_Germinating_Seeds_cDNA_P Parameter: Tissue Value: Germinating Seeds
  misc_feature: MA Experiment ID: 108462 Result: Up-regulated in Transcription
  misc_feature: MA Experiment 108462 PARAMETER Experiment Name: At_Germinating_Seeds_cDNA_P Parameter: Age (day) Value: 2 vs. 0
  misc_feature: MA Experiment 108462 PARAMETER Experiment Name: At_Germinating_Seeds_cDNA_P Parameter: Tissue Value: Germinating Seeds
  misc_feature: MA Experiment ID: 108463 Result: Up-regulated in Transcription
  misc_feature: MA Experiment 108463 PARAMETER Experiment Name: At_Germinating_Seeds_cDNA_P Parameter: Age (day) Value: 3 vs. 0
  misc_feature: MA Experiment 108463 PARAMETER Experiment Name: At_Germinating_Seeds_cDNA_P Parameter: Tissue Value: Germinating Seeds
  misc_feature: MA Experiment ID: 108464 Result: Up-regulated in Transcription
  misc_feature: MA Experiment 108464 PARAMETER Experiment Name: At_Germinating_Seeds_cDNA_P Parameter: Age (day) Value: 4 vs. 0
  misc_feature: MA Experiment 108464 PARAMETER Experiment Name: At_Germinating_Seeds_cDNA_P Parameter: Tissue Value: Germinating Seeds
  misc_feature: MA Experiment ID: 108594 Result: Down-regulated in Transcription
  misc_feature: MA Experiment 108594 PARAMETER Experiment Name: At_Ler-rhl_Root_cDNA_P Parameter: Plant Line Value: null
  misc_feature: MA Experiment ID: 108595 Result: Down-regulated in Transcription
  misc_feature: MA Experiment 108595 PARAMETER Experiment Name: At_Ler-pi_Ovule_cDNA_P Parameter: Plant Line Value: null
  misc_feature: MA Experiment ID: 108668 Result: Up-regulated in Transcription
  misc_feature: MA Experiment 108668 PARAMETER Experiment Name: At_2mM_SA_cDNA_P Parameter: Plant Line Value: WS
  misc_feature: MA Experiment 108668 PARAMETER Experiment Name: At_2mM_SA_cDNA_P Parameter: Timepoint (hr) Value: 6
  misc_feature: MA Experiment 108668 PARAMETER Experiment Name: At_2mM_SA_cDNA_P Parameter: Treatment Value: 2mM SA vs. No Treatment
  misc_feature: MA Experiment ID: 20000069 Result: Down-regulated in Transcription
  misc_feature: MA Experiment 20000069 PARAMETER Experiment Name: At_100uM_ABA_Mutants_cDNA_P Parameter: Plant Line Value: CS23
  misc_feature: MA Experiment 20000069 PARAMETER Experiment Name: At_100uM_ABA_Mutants_cDNA_P Parameter: Timepoint (hr) Value: 6
  misc_feature: MA Experiment 20000069 PARAMETER Experiment Name: At_100uM_ABA_Mutants_cDNA_P Parameter: Tissue Value: Aerial
  misc_feature: MA Experiment 20000069 PARAMETER Experiment Name: At_100uM_ABA_Mutants_cDNA_P Parameter: Treatment Value: 100uM ABA vs. No Treatment
  misc_feature: MA Experiment ID: 20000070 Result: Down-regulated in Transcription
  misc_feature: MA Experiment 20000070 PARAMETER Experiment Name: At_100uM_ABA_Mutants_cDNA_P Parameter: Plant Line Value: CS24
  misc_feature: MA Experiment 20000070 PARAMETER Experiment Name: At_100uM_ABA_Mutants_cDNA_P Parameter: Timepoint (hr) Value: 6
  misc_feature: MA Experiment 20000070 PARAMETER Experiment Name: At_100uM_ABA_Mutants_cDNA_P Parameter: Tissue Value: Aerial
  misc_feature: MA Experiment 20000070 PARAMETER Experiment Name: At_100uM_ABA_Mutants_cDNA_P Parameter: Treatment Value: 100uM ABA vs. No Treatment
  misc_feature: MA Experiment ID: 20000071 Result: Down-regulated in Transcription
  misc_feature: MA Experiment 20000071 PARAMETER Experiment Name: At_100uM_ABA_Mutants_cDNA_P Parameter: Plant Line Value: CS8104
  misc_feature: MA Experiment 20000071 PARAMETER Experiment Name: At_100uM_ABA_Mutants_cDNA_P Parameter: Timepoint (hr) Value: 6
  misc_feature: MA Experiment 20000071 PARAMETER Experiment Name: At_100uM_ABA_Mutants_cDNA_P Parameter: Tissue Value: Aerial
  misc_feature: MA Experiment 20000071 PARAMETER Experiment Name: At_100uM_ABA_Mutants_cDNA_P Parameter: Treatment Value: 100uM ABA vs. No Treatment
  misc_feature: MA Experiment ID: 20000087 Result: Down-regulated in Transcription
  misc_feature: MA Experiment 20000087 PARAMETER Experiment Name: At_100uM_ABA_Mutants_cDNA_P Parameter: Plant Line Value: WS
  misc_feature: MA Experiment 20000087 PARAMETER Experiment Name: At_100uM_ABA_Mutants_cDNA_P Parameter: Timepoint (hr) Value: 6
  misc_feature: MA Experiment 20000087 PARAMETER Experiment Name: At_100uM_ABA_Mutants_cDNA_P Parameter: Tissue Value: Aerial
  misc_feature: MA Experiment 20000087 PARAMETER Experiment Name: At_100uM_ABA_Mutants_cDNA_P Parameter: Treatment Value: 100uM ABA vs. No Treatment
  misc_feature: MA Experiment ID: 20000089 Result: Down-regulated in Transcription
  misc_feature: MA Experiment ID: 20000117 Result: Down-regulated in Transcription
  misc_feature: MA Experiment 20000117 PARAMETER Experiment Name: At_100uM_ABA_Mutants_cDNA_P Parameter: Plant Line Value: Columbia
  misc_feature: MA Experiment 20000117 PARAMETER Experiment Name: At_100uM_ABA_Mutants_cDNA_P Parameter: Timepoint (hr) Value: 6
  misc_feature: MA Experiment 20000117 PARAMETER Experiment Name: At_100uM_ABA_Mutants_cDNA_P Parameter: Tissue Value: Aerial
  misc_feature: MA Experiment 20000117 PARAMETER Experiment Name: At_100uM_ABA_Mutants_cDNA_P Parameter: Treatment Value: 100uM ABA vs. No Treatment
aaagttctcagctaatctaaattcctctgttcattttctgggttgtgcgatagtttctgaacagagttaggtttctttgttcatgtctgatttcgcaaaactctgtttgccataatttgtaggtggtttaccagttcatattcttcgtaatcacggctcttttcaaatttgatcaagtcactgactttgctggtagcacaaacttcgttatacttgctgtgttaacacttgttctcaaagcctcttggcattttcgacagatagtattgactttgctagttgtggtatggggtcttcgcttggggattttccttctaatgaggatcttgcaatggggggaagatcgtcgctttgatgaacagcgtggaaatatagtgagactaatcattttctggactcttcaggctgtgtgggtttggacggttagcttacctttaacacttgttaatgcaagtgatggtggtggatctcttaaacccgcagatgttatcggttggactatgtgggttttcggtttcttgattgaagctgcagctgatcaacagaagctatcattcaaaaactctcctgaaaacagaggaaaatggtgtgatgttggagtctggaagtattcaagacatccaaactacttcggtgagatgttactgtggtggggaatctttgtggctgcatcgcctgtgcttgaaggtgcagagtatcttgtcatattcggaccactctttctcactttgctacttctattcgtcagcggcataccattactcgaggcatcggctgacaaaaaacatggaaactcaggagcttacagatcctacaagaagacaacaagtcctctgattctgttcccaagaggagtgtatgggaacttaccaggatggttcaagacggtctttctcttcgagtttccattttacagccgaaatctccctcaagagttagggtagactccaaaacagcaaagagaaagaagtaaaagatgactgatttgtgatactcatatttgagttattgttcttcacaacactctttgataaaatttgtgtaaaaaattgcccgtaagaaactgaatttgtttgaaatattggacagtcttgacagattatctcagttgtatttggttctc

SEQ ID NO: 37102 - protein, 208 aa, Arabidopsis thaliana
  peptide (1)..(208): Ceres Seq. ID no. 12336417
  misc_feature (1)..(205): Homolog of NCBI NO: 13937298 NR Description: unknown protein [Oryza sativa]
  misc_feature (171)..(206): Homolog of NCBI NO: 9719732 NR Description: T10F20.18 [Arabidopsis thaliana]
  misc_feature (1)..(170): Homolog of NCBI NO: 9719732 NR Description: T10F20.18 [Arabidopsis thaliana]
  misc_feature (1)..(150): Homolog of NCBI NO: 25406281 NR Description: unknown protein F25P22.7 [imported] - Arabidopsis
  misc_feature (171)..(206): Homolog of NCBI NO: 25402844 NR Description: protein T10O22.15 [imported] - Arabidopsis
  misc_feature (1)..(170): Homolog of NCBI NO: 25402844 NR Description: protein T10O22.15 [imported] - Arabidopsis
  misc_feature (1)..(206): Homolog of NCBI NO: 15221003 NR Description: hypothetical protein; protein id: At1g18180.1
  misc_feature (1)..(207): Homolog of NCBI NO: 21537359 NR Description: unknown [Arabidopsis thaliana]
  misc_feature (1)..(207): Homolog of NCBI NO: 18410409 NR Description: expressed protein
  misc_feature (1)..(208): Homolog of NCBI NO: 30698953 NR Description: expressed protein [Arabidopsis thaliana]
MRILQWGEDRRFDEQRGNIVRLIIFWTLQAVWVWTVSLPLTLVNASDGGGSLKPADVIGWTMWVFGFLIEAAADQQKLSFKNSPENRGKWCDVGVWKYSRHPNYFGEMLLWWGIFVAASPVLEGAEYLVIFGPLFLTLLLLFVSGIPLLEASADKKHGNSGAYRSYKKTTSPLILFPRGVYGNLPGWFKTVFLFEFPFYSRNLPQELG

SEQ ID NO: 37103 - protein, 147 aa, Arabidopsis thaliana
  peptide (1)..(147): Ceres Seq. ID no. 12336418
  misc_feature (1)..(144): Homolog of NCBI NO: 13937298 NR Description: unknown protein [Oryza sativa]
  misc_feature (110)..(145): Homolog of NCBI NO: 9719732 NR Description: T10F20.18 [Arabidopsis thaliana]
  misc_feature (1)..(109): Homolog of NCBI NO: 9719732 NR Description: T10F20.18 [Arabidopsis thaliana]
  misc_feature (1)..(89): Homolog of NCBI NO: 25406281 NR Description: unknown protein F25P22.7 [imported] - Arabidopsis
  misc_feature (110)..(145): Homolog of NCBI NO: 25402844 NR Description: protein T10O22.15 [imported] - Arabidopsis
  misc_feature (1)..(109): Homolog of NCBI NO: 25402844 NR Description: protein T10O22.15 [imported] - Arabidopsis
  misc_feature (1)..(145): Homolog of NCBI NO: 15221003 NR Description: hypothetical protein; protein id: At1g18180.1
  misc_feature (1)..(146): Homolog of NCBI NO: 21537359 NR Description: unknown [Arabidopsis thaliana]
  misc_feature (1)..(146): Homolog of NCBI NO: 18410409 NR Description: expressed protein
  misc_feature (1)..(147): Homolog of NCBI NO: 30698953 NR Description: expressed protein [Arabidopsis thaliana]
MWVFGFLIEAAADQQKLSFKNSPENRGKWCDVGVWKYSRHPNYFGEMLLWWGIFVAASPVLEGAEYLVIFGPLFLTLLLLFVSGIPLLEASADKKHGNSGAYRSYKKTTSPLILFPRGVYGNLPGWFKTVFLFEFPFYSRNLPQELG

SEQ ID NO: 37104 - DNA, 741 bp, Arabidopsis thaliana
  misc_feature (1)..(741): Ceres Seq. ID no. 12603380
  misc_feature: MA Experiment ID: 108434 Result: Up-regulated in Transcription
  misc_feature: MA Experiment 108434 PARAMETER Experiment Name: At_Root_Tips_cDNA_P Parameter: Tissue Value: Root Tips
  misc_feature: MA Experiment ID: 108464 Result: Down-regulated in Transcription
  misc_feature: MA Experiment 108464 PARAMETER Experiment Name: At_Germinating_Seeds_cDNA_P Parameter: Age (day) Value: 4 vs. 0
  misc_feature: MA Experiment 108464 PARAMETER Experiment Name: At_Germinating_Seeds_cDNA_P Parameter: Tissue Value: Germinating Seeds
  misc_feature: MA Experiment ID: 108576 Result: Down-regulated in Transcription
  misc_feature: MA Experiment 108576 PARAMETER Experiment Name: At_42deg_Heat_cDNA_P Parameter: Temperature (deg C) Value: 42 vs. 22
  misc_feature: MA Experiment 108576 PARAMETER Experiment Name: At_42deg_Heat_cDNA_P Parameter: Timepoint (hr) Value: 1
  misc_feature: MA Experiment 108576 PARAMETER Experiment Name: At_42deg_Heat_cDNA_P Parameter: Tissue Value: Aerial
  misc_feature: MA Experiment ID: 108668 Result: Down-regulated in Transcription
  misc_feature: MA Experiment 108668 PARAMETER Experiment Name: At_2mM_SA_cDNA_P Parameter: Plant Line Value: WS
  misc_feature: MA Experiment 108668 PARAMETER Experiment Name: At_2mM_SA_cDNA_P Parameter: Timepoint (hr) Value: 6
  misc_feature: MA Experiment 108668 PARAMETER Experiment Name: At_2mM_SA_cDNA_P Parameter: Treatment Value: 2mM SA vs. No Treatment
  misc_feature: MA Experiment ID: 20000184 Result: Up-regulated in Transcription
  misc_feature: MA Experiment 20000184 PARAMETER Experiment Name: At_Shoots__P Parameter: Age (day) Value: 7
  misc_feature: MA Experiment 20000184 PARAMETER Experiment Name: At_Shoots__P Parameter: Tissue Value: Shoots vs. Whole Plant
  misc_feature: MA Experiment ID: 20000224 Result: Down-regulated in Transcription
  misc_feature: MA Experiment ID: 20000451 Result: Down-regulated in Transcription
  misc_feature: MA Experiment 20000451 PARAMETER Experiment Name: At_CS6879_Shoots-Roots_P Parameter: Age (day) Value: 14
  misc_feature: MA Experiment 20000451 PARAMETER Experiment Name: At_CS6879_Shoots-Roots_P Parameter: Organism Value: A. thaliana
  misc_feature: MA Experiment 20000451 PARAMETER Experiment Name: At_CS6879_Shoots-Roots_P Parameter: Plant Line Value: CS6879 vs. WS
  misc_feature: MA Experiment 20000451 PARAMETER Experiment Name: At_CS6879_Shoots-Roots_P Parameter: Tissue Value: Roots
  misc_feature: MA Experiment ID: 20000452 Result: Down-regulated in Transcription
  misc_feature: MA Experiment 20000452 PARAMETER Experiment Name: At_CS6879_Shoots-Roots_P Parameter: Age (day) Value: 14
  misc_feature: MA Experiment 20000452 PARAMETER Experiment Name: At_CS6879_Shoots-Roots_P Parameter: Organism Value: A. thaliana
  misc_feature: MA Experiment 20000452 PARAMETER Experiment Name: At_CS6879_Shoots-Roots_P Parameter: Plant Line Value: CS6879 vs. WS
  misc_feature: MA Experiment 20000452 PARAMETER Experiment Name: At_CS6879_Shoots-Roots_P Parameter: Tissue Value: Shoots
aatcaatctatcttttttttaaccattgcgtttctttttttccctttccgagcagatctgagccgaaggttaactacatgaccggcgctgagaacggcgtgagaatgacgtcaccagagacgtcttcaacatcttccctcgccaccacaagtgtccacgtaagcgctctcgacggactcgtgaacgtgaactctctcttcaccatcgccgtcttcgttggtctttccttagcgactccaggacaacacagcctcgaacaacgatccagctgcgacgcaagtgctgacgtcgccaagaagctactggtcttcgaagtcgtctccttcagcttcttcctcttctcctctcttgtagctcagggtcttaagcttgccttaaaccttcttaatagcaaagacgtcaacgagattttcagagctcacatcaatatcaaggttttgagatggggaatgatggcttctgctgtcggatctgtaatgggctgtctcttcttgatgctctctatggttaatgtgattcagatccgtcttggtttgctctcttgcggcagcaaatcggcggctcaagctgttgcaacgctcgtcactctggtttcctctgctctgctgatttacatctctaccgccatttacgctttctggcattgatgctatgtcaaaattggataatgtccatggctttgttttgattagccaatgtgtaatttcatcatcaatgccttccaatctagttttttgttcc

SEQ ID NO: 37105 - protein, 214 aa, Arabidopsis thaliana
  peptide (1)..(214): Ceres Seq. ID no. 12603381
  misc_feature (51)..(212): Homolog of NCBI NO: 15232676 NR Description: putative protein; protein id: At3g46890.1
  misc_feature (145)..(214): Homolog of NCBI NO: 38345578 NR Description: OSJNBa0027H06.14 [Oryza sativa (japonica
  misc_feature (51)..(132): Homolog of NCBI NO: 38345578 NR Description: OSJNBa0027H06.14 [Oryza sativa (japonica
  misc_feature (49)..(212): Homolog of NCBI NO: 34900646 NR Description: hypothetical protein~similar to Arabidopsis
  misc_feature (49)..(212): Homolog of NCBI NO: 34395171 NR Description: unknown protein [Oryza sativa (japonica
  misc_feature (48)..(212): Homolog of NCBI NO: 15239293 NR Description: putative protein
  misc_feature (30)..(212): Homolog of NCBI NO: 15226312 NR Description: hypothetical protein; protein id: At2g01580.1
  misc_feature (28)..(214): Homolog of NCBI NO: 37531676 NR Description: hypothetical protein [Oryza sativa (japonica
  misc_feature (35)..(214): Homolog of NCBI NO: 6041846 NR Description: unknown protein [Arabidopsis thaliana]
  misc_feature (26)..(214): Homolog of NCBI NO: 18397969 NR Description: expressed protein
SIYLFFNHCVSFFPFPSRSEPKVNYMTGAENGVRMTSPETSSTSSLATTSVHVSALDGLVNVNSLFTIAVFVGLSLATPGQHSLEQRSSCDASADVAKKLLVFEVVSFSFFLFSSLVAQGLKLALNLLNSKDVNEIFRAHINIKVLRWGMMASAVGSVMGCLFLMLSMVNVIQIRLGLLSCGSKSAAQAVATLVTLVSSALLIYISTAIYAFWH

SEQ ID NO: 37106 - protein, 189 aa, Arabidopsis thaliana
  peptide (1)..(189): Ceres Seq. ID no. 12603382
  misc_feature (26)..(187): Homolog of NCBI NO: 15232676 NR Description: putative protein; protein id: At3g46890.1
  misc_feature (120)..(189): Homolog of NCBI NO: 38345578 NR Description: OSJNBa0027H06.14 [Oryza sativa (japonica
  misc_feature (26)..(107): Homolog of NCBI NO: 38345578 NR Description: OSJNBa0027H06.14 [Oryza sativa (japonica
  misc_feature (24)..(187): Homolog of NCBI NO: 34900646 NR Description: hypothetical protein~similar to Arabidopsis
  misc_feature (24)..(187): Homolog of NCBI NO: 34395171 NR Description: unknown protein [Oryza sativa (japonica
  misc_feature (23)..(187): Homolog of NCBI NO: 15239293 NR Description: putative protein
  misc_feature (5)..(187): Homolog of NCBI NO: 15226312 NR Description: hypothetical protein; protein id: At2g01580.1
  misc_feature (3)..(189): Homolog of NCBI NO: 37531676 NR Description: hypothetical protein [Oryza sativa (japonica
  misc_feature (10)..(189): Homolog of NCBI NO: 6041846 NR Description: unknown protein [Arabidopsis thaliana]
  misc_feature (1)..(189): Homolog of NCBI NO: 18397969 NR Description: expressed protein
MTGAENGVRMTSPETSSTSSLATTSVHVSALDGLVNVNSLFTIAVFVGLSLATPGQHSLEQRSSCDASADVAKKLLVFEVVSFSFFLFSSLVAQGLKLALNLLNSKDVNEIFRAHINIKVLRWGMMASAVGSVMGCLFLMLSMVNVIQIRLGLLSCGSKSAAQAVATLVTLVSSALLIYISTAIYAFWH

SEQ ID NO: 37107 - protein, 180 aa, Arabidopsis thaliana
  peptide (1)..(180): Ceres Seq. ID no. 12603383
  misc_feature (17)..(178): Homolog of NCBI NO: 15232676 NR Description: putative protein; protein id: At3g46890.1
  misc_feature (111)..(180): Homolog of NCBI NO: 38345578 NR Description: OSJNBa0027H06.14 [Oryza sativa (japonica
  misc_feature (17)..(98): Homolog of NCBI NO: 38345578 NR Description: OSJNBa0027H06.14 [Oryza sativa (japonica
  misc_feature (15)..(178): Homolog of NCBI NO: 34900646 NR Description: hypothetical protein~similar to Arabidopsis
  misc_feature (15)..(178): Homolog of NCBI NO: 34395171 NR Description: unknown protein [Oryza sativa (japonica
  misc_feature (14)..(178): Homolog of NCBI NO: 15239293 NR Description: putative protein
  misc_feature (1)..(178): Homolog of NCBI NO: 15226312 NR Description: hypothetical protein; protein id: At2g01580.1
  misc_feature (1)..(180): Homolog of NCBI NO: 37531676 NR Description: hypothetical protein [Oryza sativa (japonica
  misc_feature (1)..(180): Homolog of NCBI NO: 6041846 NR Description: unknown protein [Arabidopsis thaliana]
  misc_feature (1)..(180): Homolog of NCBI NO: 18397969 NR Description: expressed protein
MTSPETSSTSSLATTSVHVSALDGLVNVNSLFTIAVFVGLSLATPGQHSLEQRSSCDASADVAKKLLVFEVVSFSFFLFSSLVAQGLKLALNLLNSKDVNEIFRAHINIKVLRWGMMASAVGSVMGCLFLMLSMVNVIQIRLGLLSCGSKSAAQAVATLVTLVSSALLIYISTAIYAFWH

SEQ ID NO: 37108 - DNA, 838 bp, Arabidopsis thaliana
  misc_feature (1)..(838): Ceres Seq. ID no. 13613583
  misc_feature: MA Experiment ID: 20000180 Result: Down-regulated in Transcription
  misc_feature: MA Experiment 20000180 PARAMETER Experiment Name: At_Germinating_Seeds_P Parameter: Age (hr) Value: 24 vs. 0
  misc_feature: MA Experiment 20000180 PARAMETER Experiment Name: At_Germinating_Seeds_P Parameter: Tissue Value: Germinating Seeds
  misc_feature: MA Experiment ID: 20001451 Result: Down-regulated in Transcription
  misc_feature: MA Experiment 20001451 PARAMETER Experiment Name: At_Far-red-induction_P Parameter: Age (day) Value: 7
  misc_feature: MA Experiment 20001451 PARAMETER Experiment Name: At_Far-red-induction_P Parameter: Light Value: Far-red vs. White
  misc_feature: MA Experiment 20001451 PARAMETER Experiment Name: At_Far-red-induction_P Parameter: Organism Value: A. thaliana
  misc_feature: MA Experiment 20001451 PARAMETER Experiment Name: At_Far-red-induction_P Parameter: Plant Line Value: Columbia
  misc_feature: MA Experiment 20001451 PARAMETER Experiment Name: At_Far-red-induction_P Parameter: Timepoint (hr) Value: 24
  misc_feature: MA Experiment 20001451 PARAMETER Experiment Name: At_Far-red-induction_P Parameter: Tissue Value: Whole Plant
  misc_feature: MA Experiment ID: 20001558 Result: Up-regulated in Transcription
  misc_feature: MA Experiment 20001558 PARAMETER Experiment Name: At_Drought_Soil_Dry_P Parameter: Age (day) Value: 27
  misc_feature: MA Experiment 20001558 PARAMETER Experiment Name: At_Drought_Soil_Dry_P Parameter: Organism Value: A. thaliana
  misc_feature: MA Experiment 20001558 PARAMETER Experiment Name: At_Drought_Soil_Dry_P Parameter: Plant Line Value: WS
  misc_feature: MA Experiment 20001558 PARAMETER Experiment Name: At_Drought_Soil_Dry_P Parameter: Post Timepoint (hr) Value: 6
  misc_feature: MA Experiment 20001558 PARAMETER Experiment Name: At_Drought_Soil_Dry_P Parameter: Post-Treatment Value: Re-Water vs. No Drought
  misc_feature: MA Experiment 20001558 PARAMETER Experiment Name: At_Drought_Soil_Dry_P Parameter: Timepoint (day) Value: 13
  misc_feature: MA Experiment 20001558 PARAMETER Experiment Name: At_Drought_Soil_Dry_P Parameter: Treatment Value: Drought vs. No Drought
acacaactgcaaaaccctaatctcaagttttctgtcgattttgatcttttggttgtaattttgtttgtgaaagtttcggacttttggaatttgaggtagaagagatgaacagaggaagaaggaatctgaaacaagcggcgtcggaccaggatttcacgcttgaggaatgtcagagcattgcccaagtcgtctctctcagaggttccaatcaaattgagataatggatgcaaaaggagagaactcattagctttgtttccagccaagtttcgtgagagcatgtggatcagacgaggaagctttgtagtgattgaccatacaggaaaggaaaaggctcaagagtctggtagcaaagttacatctattgtatgtaaagttctattctttgagcaagtccgtcttcttcaaaagtctccggaatggccagaaatcttcaaagatactagaccgattccagctgagaaaagctcacccattgaacagcatgaagatgacggtgaagttgattcgagtgatgatgatgatggtatgcctccattgcaagcaaacacaaacagattgagaccgtttggggtgaagtgtgatgcagaaactgattcagggtcagattccgattcatagaaacatccggtacatttcttttcgcagcctcaacttaatttctcaatataggggatttatagttgcaagctgtattttataaacagtatgtaaccaacacagatctgctgataaagcagagttttgctttgcactaaatcgataattgatttatataacatgcttctcattctcttcttgcaattcttgataagtcttaataaggagtcagaaaagtt

SEQ ID NO: 37109 - protein, 171 aa, Arabidopsis thaliana
  peptide (1)..(171): Ceres Seq. ID no. 13613584
  misc_feature (8)..(116): Homolog of NCBI NO: 31236123 NR Description: ENSANGP00000006162 [Anopheles gambiae]
  misc_feature (5)..(150): Homolog of NCBI NO: 34861445 NR Description: similar to 2010003J03Rik protein [Rattus
  misc_feature (23)..(151): Homolog of NCBI NO: 13477313 NR Description: MGC11102 protein [Homo sapiens]
  misc_feature (5)..(151): Homolog of NCBI NO: 31377656 NR Description: hypothetical protein MGC11102 [Homo sapiens]
  misc_feature (5)..(171): Homolog of NCBI NO: 20884771 NR Description: RIKEN cDNA 2010003J03 [Mus musculus]
  misc_feature (5)..(171): Homolog of NCBI NO: 12842024 NR Description: unnamed protein product [Mus musculus]
  misc_feature (5)..(168): Homolog of NCBI NO: 24581558 NR Description: CG31957-PA [Drosophila melanogaster]
  misc_feature (5)..(170): Homolog of NCBI NO: 32766657 NR Description: Unknown (protein for MGC:63631) [Danio rerio]
  misc_feature (1)..(167): Homolog of NCBI NO: 34902168 NR Description: Hypothetical protein [Oryza sativa (japonica
  misc_feature (1)..(171): Homolog of NCBI NO: 15226743 NR Description: translation initiation factor -related
MNRGRRNLKQAASDQDFTLEECQSIAQVVSLRGSNQIEIMDAKGENSLALFPAKFRESMWIRRGSFVVIDHTGKEKAQESGSKVTSIVCKVLFFEQVRLLQKSPEWPEIFKDTRPIPAEKSSPIEQHEDDGEVDSSDDDDGMPPLQANTNRLRPFGVKCDAETDSGSDSDS

SEQ ID NO: 37110 - protein, 132 aa, Arabidopsis thaliana
  peptide (1)..(132): Ceres Seq. ID no. 13613585
  misc_feature (1)..(77): Homolog of NCBI NO: 31236123 NR Description: ENSANGP00000006162 [Anopheles gambiae]
  misc_feature (1)..(111): Homolog of NCBI NO: 34861445 NR Description: similar to 2010003J03Rik protein [Rattus
  misc_feature (1)..(112): Homolog of NCBI NO: 13477313 NR Description: MGC11102 protein [Homo sapiens]
  misc_feature (1)..(112): Homolog of NCBI NO: 31377656 NR Description: hypothetical protein MGC11102 [Homo sapiens]
  misc_feature (1)..(132): Homolog of NCBI NO: 20884771 NR Description: RIKEN cDNA 2010003J03 [Mus musculus]
  misc_feature (1)..(132): Homolog of NCBI NO: 12842024 NR Description: unnamed protein product [Mus musculus]
  misc_feature (1)..(129): Homolog of NCBI NO: 24581558 NR Description: CG31957-PA [Drosophila melanogaster]
  misc_feature (1)..(131): Homolog of NCBI NO: 32766657 NR Description: Unknown (protein for MGC:63631) [Danio rerio]
  misc_feature (1)..(128): Homolog of NCBI NO: 34902168 NR Description: Hypothetical protein [Oryza sativa (japonica
  misc_feature (1)..(132): Homolog of NCBI NO: 15226743 NR Description: translation initiation factor -related
MDAKGENSLALFPAKFRESMWIRRGSFVVIDHTGKEKAQESGSKVTSIVCKVLFFEQVRLLQKSPEWPEIFKDTRPIPAEKSSPIEQHEDDGEVDSSDDDDGMPPLQANTNRLRPFGVKCDAETDSGSDSDS

SEQ ID NO: 37111 - protein, 113 aa, Arabidopsis thaliana
  peptide (1)..(113): Ceres Seq. ID no. 13613586
  misc_feature (1)..(58): Homolog of NCBI NO: 31236123 NR Description: ENSANGP00000006162 [Anopheles gambiae]
  misc_feature (1)..(92): Homolog of NCBI NO: 34861445 NR Description: similar to 2010003J03Rik protein [Rattus
  misc_feature (1)..(93): Homolog of NCBI NO: 13477313 NR Description: MGC11102 protein [Homo sapiens]
  misc_feature (1)..(93): Homolog of NCBI NO: 31377656 NR Description: hypothetical protein MGC11102 [Homo sapiens]
  misc_feature (1)..(113): Homolog of NCBI NO: 20884771 NR Description: RIKEN cDNA 2010003J03 [Mus musculus]
  misc_feature (1)..(113): Homolog of NCBI NO: 12842024 NR Description: unnamed protein product [Mus musculus]
  misc_feature (1)..(110): Homolog of NCBI NO: 24581558 NR Description: CG31957-PA [Drosophila melanogaster]
  misc_feature (1)..(112): Homolog of NCBI NO: 32766657 NR Description: Unknown (protein for MGC:63631) [Danio rerio]
  misc_feature (1)..(109): Homolog of NCBI NO: 34902168 NR Description: Hypothetical protein [Oryza sativa (japonica
  misc_feature (1)..(113): Homolog of NCBI NO: 15226743 NR Description: translation initiation factor -related
MWIRRGSFVVIDHTGKEKAQESGSKVTSIVCKVLFFEQVRLLQKSPEWPEIFKDTRPIPAEKSSPIEQHEDDGEVDSSDDDDGMPPLQANTNRLRPFGVKCDAETDSGSDSDS

SEQ ID NO: 37112 - DNA, 1211 bp, Arabidopsis thaliana
  misc_feature (1)..(1211): Ceres Seq. ID no. 13593431
  misc_feature: MA Experiment ID: 20000184 Result: Down-regulated in Transcription
  misc_feature: MA Experiment 20000184 PARAMETER Experiment Name: At_Shoots__P Parameter: Age (day) Value: 7
  misc_feature: MA Experiment 20000184 PARAMETER Experiment Name: At_Shoots__P Parameter: Tissue Value: Shoots vs. Whole Plant
  misc_feature: MA Experiment ID: 20000185 Result: Down-regulated in Transcription
  misc_feature: MA Experiment 20000185 PARAMETER Experiment Name: At_Roots__P Parameter: Age (day) Value: 7 vs. 21
  misc_feature: MA Experiment 20000185 PARAMETER Experiment Name: At_Roots__P Parameter: Organism Value: A. thaliana
  misc_feature: MA Experiment 20000185 PARAMETER Experiment Name: At_Roots__P Parameter: Tissue Value: Roots vs. Whole Plant
  misc_feature: MA Experiment ID: 20000227 Result: Down-regulated in Transcription
  misc_feature: MA Experiment 20000227 PARAMETER Experiment Name: At_Root-Tips-vs-Tops_P Parameter: Tissue Value: Root Tips vs. Root Tops
  misc_feature: MA Experiment ID: 20000264 Result: Down-regulated in Transcription
  misc_feature: MA Experiment 20000264 PARAMETER Experiment Name: At_Open_Flower_P Parameter: Age (day) Value: 21
  misc_feature: MA Experiment 20000264 PARAMETER Experiment Name: At_Open_Flower_P Parameter: Plant Line Value: WS
  misc_feature: MA Experiment 20000264 PARAMETER Experiment Name: At_Open_Flower_P Parameter: Tissue Value: Open Flower vs. Whole Plant
  misc_feature: MA Experiment ID: 20000265 Result: Down-regulated in Transcription
  misc_feature: MA Experiment 20000265 PARAMETER Experiment Name: At_Open_Flower_P Parameter: Age (day) Value: 21
  misc_feature: MA Experiment 20000265 PARAMETER Experiment Name: At_Open_Flower_P Parameter: Plant Line Value: WS
  misc_feature: MA Experiment 20000265 PARAMETER Experiment Name: At_Open_Flower_P Parameter: Tissue Value: Closed Flower vs. Whole Plant
  misc_feature: MA Experiment ID: 20000286 Result: Down-regulated in Transcription
  misc_feature: MA Experiment 20000286 PARAMETER Experiment Name: At_Open_Flower_P Parameter: Age (day) Value: 21
  misc_feature: MA Experiment 20000286 PARAMETER Experiment Name: At_Open_Flower_P Parameter: Plant Line Value: WS
  misc_feature: MA Experiment 20000286 PARAMETER Experiment Name: At_Open_Flower_P Parameter: Tissue Value: Half Open vs. Whole Plant
  misc_feature: MA Experiment ID: 20000437 Result: Down-regulated in Transcription
  misc_feature: MA Experiment 20000437 PARAMETER Experiment Name: At_Drought_P Parameter: Age (day) Value: 8
  misc_feature: MA Experiment 20000437 PARAMETER Experiment Name: At_Drought_P Parameter: Organism Value: A. thaliana
  misc_feature: MA Experiment 20000437 PARAMETER Experiment Name: At_Drought_P Parameter: Plant Line Value: WS
  misc_feature: MA Experiment 20000437 PARAMETER Experiment Name: At_Drought_P Parameter: Timepoint (hr) Value: 24
  misc_feature: MA Experiment 20000437 PARAMETER Experiment Name: At_Drought_P Parameter: Tissue Value: Whole Plant
  misc_feature: MA Experiment 20000437 PARAMETER Experiment Name: At_Drought_P Parameter: Treatment Value: Drought vs. No Drought
  misc_feature: MA Experiment ID: 20000438 Result: Down-regulated in Transcription
  misc_feature: MA Experiment 20000438 PARAMETER Experiment Name: At_Shoots__P Parameter: Age (day) Value: 14
  misc_feature: MA Experiment 20000438 PARAMETER Experiment Name: At_Shoots__P Parameter: Tissue Value: Shoots vs. Whole Plant
  misc_feature: MA Experiment ID: 20000439 Result: Down-regulated in Transcription
  misc_feature: MA Experiment 20000439 PARAMETER Experiment Name: At_Roots__P Parameter: Age (day) Value: 14 vs. 21
  misc_feature: MA Experiment 20000439 PARAMETER Experiment Name: At_Roots__P Parameter: Organism Value: A. thaliana
  misc_feature: MA Experiment 20000439 PARAMETER Experiment Name: At_Roots__P Parameter: Tissue Value: Roots vs. Whole Plant
  misc_feature: MA Experiment ID: 20000573 Result: Down-regulated in Transcription
  misc_feature: MA Experiment 20000573 PARAMETER Experiment Name: At_100uM_ABA_Mutants__P Parameter: Organism Value: A. thaliana
  misc_feature: MA Experiment 20000573 PARAMETER Experiment Name: At_100uM_ABA_Mutants__P Parameter: Plant Line Value: CS22 vs. Ler wt
  misc_feature: MA Experiment 20000573 PARAMETER Experiment Name: At_100uM_ABA_Mutants__P Parameter: Timepoint (hr) Value: N/A
  misc_feature: MA Experiment 20000573 PARAMETER Experiment Name: At_100uM_ABA_Mutants__P Parameter: Tissue Value: Whole Plant
  misc_feature: MA Experiment 20000573 PARAMETER Experiment Name: At_100uM_ABA_Mutants__P Parameter: Treatment Value: None
  misc_feature: MA Experiment ID: 20000574 Result: Down-regulated in Transcription
  misc_feature: MA Experiment 20000574 PARAMETER Experiment Name: At_100uM_ABA_Mutants__P Parameter: Organism Value: A. thaliana
  misc_feature: MA Experiment 20000574 PARAMETER Experiment Name: At_100uM_ABA_Mutants__P Parameter: Plant Line Value: CS23 vs. Ler wt
  misc_feature: MA Experiment 20000574 PARAMETER Experiment Name: At_100uM_ABA_Mutants__P Parameter: Timepoint (hr) Value: N/A
  misc_feature: MA Experiment 20000574 PARAMETER Experiment Name: At_100uM_ABA_Mutants__P Parameter: Tissue Value: Whole Plant
  misc_feature: MA Experiment 20000574 PARAMETER Experiment Name: At_100uM_ABA_Mutants__P Parameter: Treatment Value: None
  misc_feature: MA Experiment ID: 20000794 Result: Down-regulated in Transcription
  misc_feature: MA Experiment 20000794 PARAMETER Experiment Name: At_Petals_P Parameter: Age (day) Value: 23-25 days
  misc_feature: MA Experiment 20000794 PARAMETER Experiment Name: At_Petals_P Parameter: Plant Line Value: WS
  misc_feature: MA Experiment 20000794 PARAMETER Experiment Name: At_Petals_P Parameter: Tissue Value: Petals vs. Whole plant
  misc_feature: MA Experiment ID: 20001560 Result: Down-regulated in Transcription
  misc_feature: MA Experiment 20001560 PARAMETER Experiment Name: At_Drought_Soil_Dry_P Parameter: Age (day) Value: 28
  misc_feature: MA Experiment 20001560 PARAMETER Experiment Name: At_Drought_Soil_Dry_P Parameter: Organism Value: A. thaliana
  misc_feature: MA Experiment 20001560 PARAMETER Experiment Name: At_Drought_Soil_Dry_P Parameter: Plant Line Value: WS
  misc_feature: MA Experiment 20001560 PARAMETER Experiment Name: At_Drought_Soil_Dry_P Parameter: Post Timepoint (hr) Value: None
  misc_feature: MA Experiment 20001560 PARAMETER Experiment Name: At_Drought_Soil_Dry_P Parameter: Post-Treatment Value: None
  misc_feature: MA Experiment 20001560 PARAMETER Experiment Name: At_Drought_Soil_Dry_P Parameter: Timepoint (day) Value: 14
  misc_feature: MA Experiment 20001560 PARAMETER Experiment Name: At_Drought_Soil_Dry_P Parameter: Treatment Value: Drought vs. No Drought
  misc_feature: MA Experiment ID: 20001904 Result: Down-regulated in Transcription
  misc_feature: MA Experiment 20001904 PARAMETER Experiment Name: At_Drought_Reproduction_P Parameter: Age (day) Value: 37
  misc_feature: MA Experiment 20001904 PARAMETER Experiment Name: At_Drought_Reproduction_P Parameter: Organism Value: A. thaliana
  misc_feature: MA Experiment 20001904 PARAMETER Experiment Name: At_Drought_Reproduction_P Parameter: Plant Line Value: WS
  misc_feature: MA Experiment 20001904 PARAMETER Experiment Name: At_Drought_Reproduction_P Parameter: Timepoint (day) Value: 7
  misc_feature: MA Experiment 20001904 PARAMETER Experiment Name: At_Drought_Reproduction_P Parameter: Tissue Value: Rosettes
  misc_feature: MA Experiment 20001904 PARAMETER Experiment Name: At_Drought_Reproduction_P Parameter: Treatment Value: Drought vs. No Drought
  misc_feature: MA Experiment ID: 20001905 Result: Down-regulated in Transcription
  misc_feature: MA Experiment 20001905 PARAMETER Experiment Name: At_Drought_Reproduction_P Parameter: Age (day) Value: 40
  misc_feature: MA Experiment 20001905 PARAMETER Experiment Name: At_Drought_Reproduction_P Parameter: Organism Value: A. thaliana
  misc_feature: MA Experiment 20001905 PARAMETER Experiment Name: At_Drought_Reproduction_P Parameter: Plant Line Value: WS
  misc_feature: MA Experiment 20001905 PARAMETER Experiment Name: At_Drought_Reproduction_P Parameter: Timepoint (day) Value: 10
  misc_feature: MA Experiment 20001905 PARAMETER Experiment Name: At_Drought_Reproduction_P Parameter: Tissue Value: Rosettes
  misc_feature: MA Experiment 20001905 PARAMETER Experiment Name: At_Drought_Reproduction_P Parameter: Treatment Value: Drought vs. No Drought
  misc_feature: MA Experiment ID: 20001906 Result: Down-regulated in Transcription
  misc_feature: MA Experiment 20001906 PARAMETER Experiment Name: At_Drought_Reproduction_P Parameter: Age (day) Value: 35
  misc_feature: MA Experiment 20001906 PARAMETER Experiment Name: At_Drought_Reproduction_P Parameter: Organism Value: A. thaliana
  misc_feature: MA Experiment 20001906 PARAMETER Experiment Name: At_Drought_Reproduction_P Parameter: Plant Line Value: WS
  misc_feature: MA Experiment 20001906 PARAMETER Experiment Name: At_Drought_Reproduction_P Parameter: Timepoint (day) Value: 5
  misc_feature: MA Experiment 20001906 PARAMETER Experiment Name: At_Drought_Reproduction_P Parameter: Tissue Value: Siliques
  misc_feature: MA Experiment 20001906 PARAMETER Experiment Name: At_Drought_Reproduction_P Parameter: Treatment Value: Drought vs. No Drought
atttcctcattcgcatcaacgaagtcaaaaccatttataaacccaaaatcttcttcgatctctccataattctcgtttgcgtcattcattcatcacatatcaaccaccacagagacagaggaatagtctcaaaactttctcagaaatggcaggcagtaatattctccataagattaagttgaaggctgggttctgtggatctgctcctgacatgggaagaggcaaaagcaagatgtggaagaacatcacccacggttttcactgtgtgaagggcaagtccagccatccgatggaggactatgtagtgtctgaattcaagaaacttgaaggtcatgaattgggtttgtttgctatctttgatggtcacttggggcatgatgtggctaaatacttgcagactaatctctttgacaacattcttaaagagaaggatttttggactgacacagagaatgctataaggaatgcctacagatcaacagatgccgtgatattgcagcagtcccttaagcttggtaaaggcggatcaacagctgtaacgggaattctaattgatggtaaaaagctagttgttgctaatgttggagactccagagcagtgatgtctaagaatggtgttgcgcatcagctatctgtcgatcatgaaccaagcaaggagaaaaaagaaatagagagccgaggtggctttgtgtcaaatattccaggggatgttccacgagtggatggacagttagcggttgcaagagcatttggagataagagcttaaagttacatctgagctcagaaccggacataacacaccagacaattgatgatcacactgaattcatccttttcgcaagcgatggtatttggaaagtattatcaaaccaagaagcggttgatgctatcaagagtatcaaagatcctcatgcagctgcaaagcacttgatagaggaagctatatctaggaagagcaaagatgacatctcatgtatcgttgtaaagttccactaatcttctcttcttcttatcaaaagctattttgtctataagttaccatcaagttgcaagatagagaaatatatgctcaagctgtgtctgtaaaaacccagtaatgaggtttcccagaagatgtaatatattatcgaaatcgcaacagccttaagatacaaaagaaagaactgaaattaaaaaaatgaaataaaacaaatcgcaacagccttaagat

SEQ ID NO: 37113 - protein, 283 aa, Arabidopsis thaliana
  peptide (1)..(283): Ceres Seq. ID no. 13593432
  misc_feature (34)..(275): Pfam Name: Protein phosphatase 2C Pfam Description: Protein phosphatase 2C
  misc_feature (19)..(282): Homolog of NCBI NO: 21537096 NR Description: protein phosphatase type 2C, putative
  misc_feature (19)..(282): Homolog of NCBI NO: 18395099 NR Description: protein phosphatase 2C (PP2C), putative
  misc_feature (1)..(282): Homolog of NCBI NO: 23307574 NR Description: putative protein phosphatase 2C homolog
  misc_feature (1)..(282): Homolog of NCBI NO: 21539551 NR Description: putative protein phosphatase type 2C [Arabidopsis
  misc_feature (1)..(282): Homolog of NCBI NO: 15232538 NR Description: protein phosphatase 2C (PP2C), putative
  misc_feature (1)..(281): Homolog of NCBI NO: 4336436 NR Description: protein phosphatase type 2C [Lotus japonicus]
  misc_feature (1)..(282): Homolog of NCBI NO: 25411985 NR Description: probable protein phosphatase 2C [imported] -
  misc_feature (1)..(282): Homolog of NCBI NO: 18399423 NR Description: protein phosphatase 2C (PP2C), putative
  misc_feature (30)..(283): Homolog of NCBI NO: 7488280 NR Description: protein phosphatase 2C homolog F20O9.80 -
  misc_feature (1)..(283): Homolog of NCBI NO: 18417190 NR Description: protein phosphatase 2C (PP2C), putative
MAGSNILHKIKLKAGFCGSAPDMGRGKSKMWKNITHGFHCVKGKSSHPMEDYVVSEFKKLEGHELGLFAIFDGHLGHDVAKYLQTNLFDNILKEKDFWTDTENAIRNAYRSTDAVILQQSLKLGKGGSTAVTGILIDGKKLVVANVGDSRAVMSKNGVAHQLSVDHEPSKEKKEIESRGGFVSNIPGDVPRVDGQLAVARAFGDKSLKLHLSSEPDITHQTIDDHTEFILFASDGIWKVLSNQEAVDAIKSIKDPHAAAKHLIEEAISRKSKDDISCIVVKFH

SEQ ID NO: 37114 - protein, 261 aa, Arabidopsis thaliana
  peptide (1)..(261): Ceres Seq. ID no. 13593433
  misc_feature (12)..(253): Pfam Name: Protein phosphatase 2C Pfam Description: Protein phosphatase 2C
  misc_feature (1)..(260): Homolog of NCBI NO: 21537096 NR Description: protein phosphatase type 2C, putative
  misc_feature (1)..(260): Homolog of NCBI NO: 18395099 NR Description: protein phosphatase 2C (PP2C), putative
  misc_feature (1)..(260): Homolog of NCBI NO: 23307574 NR Description: putative protein phosphatase 2C homolog
  misc_feature (1)..(260): Homolog of NCBI NO: 21539551 NR Description: putative protein phosphatase type 2C [Arabidopsis
  misc_feature (1)..(260): Homolog of NCBI NO: 15232538 NR Description: protein phosphatase 2C (PP2C), putative
  misc_feature (1)..(259): Homolog of NCBI NO: 4336436 NR Description: protein phosphatase type 2C [Lotus japonicus]
  misc_feature (1)..(260): Homolog of NCBI NO: 25411985 NR Description: probable protein phosphatase 2C [imported] -
  misc_feature (1)..(260): Homolog of NCBI NO: 18399423 NR Description: protein phosphatase 2C (PP2C), putative
  misc_feature (8)..(261): Homolog of NCBI NO: 7488280 NR Description: protein phosphatase 2C homolog F20O9.80 -
  misc_feature (1)..(261): Homolog of NCBI NO: 18417190 NR Description: protein phosphatase 2C (PP2C), putative
MGRGKSKMWKNITHGFHCVKGKSSHPMEDYVVSEFKKLEGHELGLFAIFDGHLGHDVAKYLQTNLFDNILKEKDFWTDTENAIRNAYRSTDAVILQQSLKLGKGGSTAVTGILIDGKKLVVANVGDSRAVMSKNGVAHQLSVDHEPSKEKKEIESRGGFVSNIPGDVPRVDGQLAVARAFGDKSLKLHLSSEPDITHQTIDDHTEFILFASDGIWKVLSNQEAVDAIKSIKDPHAAAKHLIEEAISRKSKDDISCIVVKFH

SEQ ID NO: 37115 - protein, 254 aa, Arabidopsis thaliana
  peptide (1)..(254): Ceres Seq. ID no. 13593434
  misc_feature (5)..(246): Pfam Name: Protein phosphatase 2C Pfam Description: Protein phosphatase 2C
  misc_feature (1)..(253): Homolog of NCBI NO: 21537096 NR Description: protein phosphatase type 2C, putative
  misc_feature (1)..(253): Homolog of NCBI NO: 18395099 NR Description: protein phosphatase 2C (PP2C), putative
  misc_feature (1)..(253): Homolog of NCBI NO: 23307574 NR Description: putative protein phosphatase 2C homolog
  misc_feature (1)..(253): Homolog of NCBI NO: 21539551 NR Description: putative protein phosphatase type 2C [Arabidopsis
  misc_feature (1)..(253): Homolog of NCBI NO: 15232538 NR Description: protein phosphatase 2C (PP2C), putative
  misc_feature (1)..(252): Homolog of NCBI NO: 4336436 NR Description: protein phosphatase type 2C [Lotus japonicus]
  misc_feature (1)..(253): Homolog of NCBI NO: 25411985 NR Description: probable protein phosphatase 2C [imported] -
  misc_feature (1)..(253): Homolog of NCBI NO: 18399423 NR Description: protein phosphatase 2C (PP2C), putative
  misc_feature (1)..(254): Homolog of NCBI NO: 7488280 NR Description: protein phosphatase 2C homolog F20O9.80 -
  misc_feature (1)..(254): Homolog of NCBI NO: 18417190 NR Description: protein phosphatase 2C (PP2C), putative
MWKNITHGFHCVKGKSSHPMEDYVVSEFKKLEGHELGLFAIFDGHLGHDVAKYLQTNLFDNILKEKDFWTDTENAIRNAYRSTDAVILQQSLKLGKGGSTAVTGILIDGKKLVVANVGDSRAVMSKNGVAHQLSVDHEPSKEKKEIESRGGFVSNIPGDVPRVDGQLAVARAFGDKSLKLHLSSEPDITHQTIDDHTEFILFASDGIWKVLSNQEAVDAIKSIKDPHAAAKHLIEEAISRKSKDDISCIVVKFH

SEQ ID NO: 37116 - DNA, 905 bp, Arabidopsis thaliana
  misc_feature (1)..(905): Ceres Seq. ID no. 13593425
  misc_feature: MA Experiment ID: 20001807 Result: Up-regulated in Transcription
  misc_feature: MA Experiment 20001807 PARAMETER Experiment Name: At_50mM_NH4NO3_L-to-H_Sub_P Parameter: Timepoint (hr) Value: 6
  misc_feature: MA Experiment 20001807 PARAMETER Experiment Name: At_50mM_NH4NO3_L-to-H_Sub_P Parameter: Tissue Value: Leaf
  misc_feature: MA Experiment 20001807 PARAMETER Experiment Name: At_50mM_NH4NO3_L-to-H_Sub_P Parameter: Treatment Value: 50mM NH4NO3 vs 100mM Mannitol
atatataaagtcgccattgaagtgaagctgagatcttttcgaagagcggaagctaaggagaggcgaattcgaatcgagaagatggtgtctggctcagggatatgttcaaagcgtgtcgttgttgacgcacgtcaccatatgtgtggtcgtcttgcttcgatcatagctaaagagttgctcaatggacagagtgttgttgttgtccgatgtgaggagatttgtttgtctggtggtttggttcgtcagaagatgaagtacatgaggtttcttaggaaacgcatgaacactaaaccttctcatggtcctattcatttccgtgctccgtctaagatcttctggcgtaccgttcgtgggatgattccacacaagaccaagcgtggtgctgctgctcttgcacgtttgaaggtgtttgagggagtaccacctccttatgacaaggtcaagagaatggtcattcctgatgctctcaaggtgttgaggcttcaggctggtcacaagtactgcttgttgggacgtttgtcttctgaagttggctggaaccattacgataccatcaaggagcttgaggtgaagagaaaggagaggtcacaagctttgtatgagcgtaagaagcaactcaccaagctcagggcaaaggccgagaaggttgcagaggagaaacttggatcccagctcgatgttcttgcatcgatcaagtactgaagaaaatcagcatctatcttttggtttaactcttgttttggtttttatctattcagattttgttttcttccttgtatcactgttgaagtttatcacctcatttcagttttatttatcagttgatacttcaatccttagggatgagctctacaaaaaaaaaaaaaaaaatatcgataccgtcgacctcgagggggggcccggta

SEQ ID NO: 37117 - protein, 233 aa, Arabidopsis thaliana
  peptide (1)..(233): Ceres Seq. ID no. 13593426
  misc_feature (38)..(154): Pfam Name: Ribosomal protein L13 Pfam Description: Ribosomal protein L13
  misc_feature (28)..(186): Homolog of NCBI NO: 34899414 NR Description: putative 60S ribosomal protein
  misc_feature (28)..(233): Homolog of NCBI NO: 3914535 NR Description: 60S RIBOSOMAL PROTEIN L13A
  misc_feature (28)..(233): Homolog of NCBI NO: 37718812 NR Description: putative ribosomal protein L13a
  misc_feature (28)..(233): Homolog of NCBI NO: 33146452 NR Description: putative 60S ribosomal protein
  misc_feature (28)..(233): Homolog of NCBI NO: 21326116 NR Description: putative 60S ribosomal protein [Sorghum bicolor]
  misc_feature (28)..(233): Homolog of NCBI NO: 15239698 NR Description: 60S ribosomal protein L13A (RPL13aD) [Arabidopsis
  misc_feature (28)..(233): Homolog of NCBI NO: 15235617 NR Description: 60S ribosomal protein L13A (RPL13aC) [Arabidopsis
  misc_feature (28)..(233): Homolog of NCBI NO: 15231394 NR Description: 60S ribosomal protein L13A (RPL13aA) [Arabidopsis
  misc_feature (28)..(233): Homolog of NCBI NO: 19423912 NR Description: putative 60S ribosomal protein [Arabidopsis
  misc_feature (28)..(233): Homolog of NCBI NO: 15230197 NR Description: 60S ribosomal protein L13A (RPL13aB) [Arabidopsis
IYKVAIEVKLRSFRRAEAKERRIRIEKMVSGSGICSKRVVVDARHHMCGRLASIIAKELLNGQSVVVVRCEEICLSGGLVRQKMKYMRFLRKRMNTKPSHGPIHFRAPSKIFWRTVRGMIPHKTKRGAAALARLKVFEGVPPPYDKVKRMVIPDALKVLRLQAGHKYCLLGRLSSEVGWNHYDTIKELEVKRKERSQALYERKKQLTKLRAKAEKVAEEKLGSQLDVLASIKY

SEQ ID NO: 37118 - protein, 206 aa, Arabidopsis thaliana [sequence omitted]

SEQ ID NO: 37119 - protein, 187 aa, Arabidopsis thaliana
  peptide (1)..(187): Ceres Seq. ID no. 13593428
  misc_feature (1)..(108): Pfam Name: Ribosomal protein L13 Pfam Description: Ribosomal protein L13
  misc_feature (1)..(140): Homolog of NCBI NO: 34899414 NR Description: putative 60S ribosomal protein
  misc_feature (1)..(187): Homolog of NCBI NO: 3914535 NR Description: 60S RIBOSOMAL PROTEIN L13A
  misc_feature (1)..(187): Homolog of NCBI NO: 37718812 NR Description: putative ribosomal protein L13a
  misc_feature (1)..(187): Homolog of NCBI NO: 33146452 NR Description: putative 60S ribosomal protein
  misc_feature (1)..(187): Homolog of NCBI NO: 21326116 NR Description: putative 60S ribosomal protein [Sorghum bicolor]
  misc_feature (1)..(187): Homolog of NCBI NO: 15239698 NR Description: 60S ribosomal protein L13A (RPL13aD) [Arabidopsis
  misc_feature (1)..(187): Homolog of NCBI NO: 15235617 NR Description: 60S ribosomal protein L13A (RPL13aC) [Arabidopsis
  misc_feature (1)..(187): Homolog of NCBI NO: 15231394 NR Description: 60S ribosomal protein L13A (RPL13aA) [Arabidopsis
  misc_feature (1)..(187): Homolog of NCBI NO: 19423912 NR Description: putative 60S ribosomal protein [Arabidopsis
  misc_feature (1)..(187): Homolog of NCBI NO: 15230197 NR Description: 60S ribosomal protein L13A (RPL13aB) [Arabidopsis
MCGRLASIIAKELLNGQSVVVVRCEEICLSGGLVRQKMKYMRFLRKRMNTKPSHGPIHFRAPSKIFWRTVRGMIPHKTKRGAAALARLKVFEGVPPPYDKVKRMVIPDALKVLRLQAGHKYCLLGRLSSEVGWNHYDTIKELEVKRKERSQALYERKKQLTKLRAKAEKVAEEKLGSQLDVLASIKY

SEQ ID NO: 37120 - DNA, 1338 bp, Arabidopsis thaliana
  misc_feature (1)..(1338): Ceres Seq. ID no. 12397162
  misc_feature: MA Experiment ID: 108574 Result: Up-regulated in Transcription
  misc_feature: MA Experiment 108574 PARAMETER Experiment Name: At_Wounding__cDNA_P Parameter: Timepoint (hr) Value: 1
  misc_feature: MA Experiment 108574 PARAMETER Experiment Name: At_Wounding__cDNA_P Parameter: Tissue Value: Aerial
  misc_feature: MA Experiment 108574 PARAMETER Experiment Name: At_Wounding__cDNA_P Parameter: Treatment Value: Wounding vs. No Wounding
  misc_feature: MA Experiment ID: 108595 Result: Down-regulated in Transcription
  misc_feature: MA Experiment 108595 PARAMETER Experiment Name: At_Ler-pi_Ovule_cDNA_P Parameter: Plant Line Value: null
  misc_feature: MA Experiment ID: 20000144 Result: Down-regulated in Transcription
  misc_feature: MA Experiment 20000144 PARAMETER Experiment Name: At_42deg_Heat_cDNA_P Parameter: Temperature (deg C) Value: 42 vs. 22
  misc_feature: MA Experiment 20000144 PARAMETER Experiment Name: At_42deg_Heat_cDNA_P Parameter: Timepoint (hr) Value: 1
  misc_feature: MA Experiment 20000144 PARAMETER Experiment Name: At_42deg_Heat_cDNA_P Parameter: Tissue Value: Aerial
  misc_feature: MA Experiment ID: 20001451 Result: Down-regulated in Transcription
  misc_feature: MA Experiment 20001451 PARAMETER Experiment Name: At_Far-red-induction_P Parameter: Age (day) Value: 7
  misc_feature: MA Experiment 20001451 PARAMETER Experiment Name: At_Far-red-induction_P Parameter: Light Value: Far-red vs. White
  misc_feature: MA Experiment 20001451 PARAMETER Experiment Name: At_Far-red-induction_P Parameter: Organism Value: A. thaliana
  misc_feature: MA Experiment 20001451 PARAMETER Experiment Name: At_Far-red-induction_P Parameter: Plant Line Value: Columbia
  misc_feature: MA Experiment 20001451 PARAMETER Experiment Name: At_Far-red-induction_P Parameter: Timepoint (hr) Value: 24
  misc_feature: MA Experiment 20001451 PARAMETER Experiment Name: At_Far-red-induction_P Parameter: Tissue Value: Whole Plant
  misc_feature: MA Experiment ID: 20001557 Result: Up-regulated in Transcription
  misc_feature: MA Experiment 20001557 PARAMETER Experiment Name: At_Drought_Soil_Dry_P Parameter: Age (day) Value: 27
  misc_feature: MA Experiment 20001557 PARAMETER Experiment Name: At_Drought_Soil_Dry_P Parameter: Organism Value: A. thaliana
  misc_feature: MA Experiment 20001557 PARAMETER Experiment Name: At_Drought_Soil_Dry_P Parameter: Plant Line Value: WS
  misc_feature: MA Experiment 20001557 PARAMETER Experiment Name: At_Drought_Soil_Dry_P Parameter: Post Timepoint (hr) Value: 3
  misc_feature: MA Experiment 20001557 PARAMETER Experiment Name: At_Drought_Soil_Dry_P Parameter: Post-Treatment Value: Re-Water vs. No Drought
  misc_feature: MA Experiment 20001557 PARAMETER Experiment Name: At_Drought_Soil_Dry_P Parameter: Timepoint (day) Value: 13
  misc_feature: MA Experiment 20001557 PARAMETER Experiment Name: At_Drought_Soil_Dry_P Parameter: Treatment Value: Drought vs. No Drought
  misc_feature: MA Experiment ID: 20001757 Result: Up-regulated in Transcription
  misc_feature: MA Experiment 20001757 PARAMETER Experiment Name: At_50mM_NH4NO3_L-to-H_P Parameter: Timepoint (hr) Value: 6
  misc_feature: MA Experiment 20001757 PARAMETER Experiment Name: At_50mM_NH4NO3_L-to-H_P Parameter: Tissue Value: Leaf
  misc_feature: MA Experiment 20001757 PARAMETER Experiment Name: At_50mM_NH4NO3_L-to-H_P Parameter: Treatment Value: 50mM NH4NO3 vs 100mM Mannitol
atggcgacctaaattttctaattccagaaagtaagcaactttaagcttcctcctcctctttttcaattacattaccattttttggtgtagctttttaaatcagtgcatcagaatcgaatctcacaccttttttgttccttcctcttaacccatcttttgatttcacaaaactccagatctgactgatttcatcgaagaaacaaatccgtgggtcattagaaaaatccgattttttgattaaaagatgtggtcggtgatgggtttagtgagacgtacggctatgtcctccaccgtgaataaagcttctccggttaggtctttgcttggtgggtttagatgtctcaacgttgagtctaaggaagaagatgagaaaaaggatatgactgtgttagaagctaagaagttaatgagattagtgaatgttgaagatatgaagaagaagcttattggtatgggtgataaagaaatggttacttacactacacttattgaagcatctcaaggtttaggtatcgctagatctcttgatgaagctcatgcttttgctcgtgttcttgatgatgctggtgttattttgatctttcgtgataaagtctatcttcatcctcataaggtggtggatttgattagaaaggcagtgcctttaggtttgaatccagatgatgagttgattagagaagagtttgataagatgagaagtatgaaggaagagattgatgtgttagctcatcaacaagtgaggaagattctatggggtggtcttggttactcagtggttcaaattggaatctttgttaggctaactttttgggagttttcttgggatgtgatggaaccaataacgtttttcactacagctactgggattattgtgggttatgcttatttcttgatgacttctagagatccaacgtatcaagatttcatgaaaaggttgtttctttccaggcagaggaagttgcttaagagtcataagtttgatgctgagaggtttaaagaactggagaacaagtggaagataacgtcttgctcttcttcttcgtgccacgctaatgcatcgattcggaatcgtgttggtgttgatcttgatttggaggattctttgcagagtcatcacagagattgattggttctaaccatttttcacttttgatgatattacttaaccagattttcttctctctggaggttgatcaagtttgattatttggtgttgattgatccaaagagttggagtagtcatggtgatttttatttgataatcttgagctactcttatttaaatcagctcatgtgttaatcttttctatggttaaggattttgacggattataatag

SEQ ID NO: 37121 - protein, 293 aa, Arabidopsis thaliana
  peptide (1)..(293): Ceres Seq. ID no. 12397163
  misc_feature (84)..(266): Pfam Name: Protein of unknown function, DUF607 Pfam Description: Protein of unknown function, DUF607
  misc_feature (46)..(267): Homolog of NCBI NO: 15240047 NR Description: putative protein
  misc_feature (46)..(267): Homolog of NCBI NO: 14596231 NR Description: Unknown protein [Arabidopsis thaliana]
  misc_feature (37)..(254): Homolog of NCBI NO: 15234535 NR Description: putative protein; protein id: At4g36820.1
  misc_feature (41)..(270): Homolog of NCBI NO: 24496456 NR Description: hypothetical protein [Arabidopsis thaliana]
  misc_feature (1)..(270): Homolog of NCBI NO: 15224063 NR Description: hypothetical protein; protein id: At2g23790.1
  misc_feature (40)..(258): Homolog of NCBI NO: 34909244 NR Description: B1148D12.10 [Oryza sativa (japonica
  misc_feature (13)..(241): Homolog of NCBI NO: 25402554 NR Description: hypothetical protein [imported] - Arabidopsis
  misc_feature (1)..(293): Homolog of NCBI NO: 18391039 NR Description: Expressed protein
  misc_feature (5)..(293): Homolog of NCBI NO: 25404155 NR Description: hypothetical protein T8L23.8 [imported] -
  misc_feature (1)..(293): Homolog of NCBI NO: 22330290 NR Description: hypothetical protein
MWSVMGLVRRTAMSSTVNKASPVRSLLGGFRCLNVESKEEDEKKDMTVLEAKKLMRLVNVEDMKKKLIGMGDKEMVTYTTLIEASQGLGIARSLDEAHAFARVLDDAGVILIFRDKVYLHPHKVVDLIRKAVPLGLNPDDELIREEFDKMRSMKEEIDVLAHQQVRKILWGGLGYSVVQIGIFVRLTFWEFSWDVMEPITFFTTATGIIVGYAYFLMTSRDPTYQDFMKRLFLSRQRKLLKSHKFDAERFKELENKWKITSCSSSSCHANASIRNRVGVDLDLEDSLQSHHRD

SEQ ID NO: 37122 - protein, 289 aa, Arabidopsis thaliana
  peptide (1)..(289): Ceres Seq. ID no. 12397164
  misc_feature (80)..(262): Pfam Name: Protein of unknown function, DUF607 Pfam Description: Protein of unknown function, DUF607
  misc_feature (42)..(263): Homolog of NCBI NO: 15240047 NR Description: putative protein
  misc_feature (42)..(263): Homolog of NCBI NO: 14596231 NR Description: Unknown protein [Arabidopsis thaliana]
  misc_feature (33)..(250): Homolog of NCBI NO: 15234535 NR Description: putative protein; protein id: At4g36820.1
  misc_feature (37)..(266): Homolog of NCBI NO: 24496456 NR Description: hypothetical protein [Arabidopsis thaliana]
  misc_feature (1)..(266): Homolog of NCBI NO: 15224063 NR Description: hypothetical protein; protein id: At2g23790.1
  misc_feature (36)..(254): Homolog of NCBI NO: 34909244 NR Description: B1148D12.10 [Oryza sativa (japonica
  misc_feature (9)..(237): Homolog of NCBI NO: 25402554 NR Description: hypothetical protein [imported] - Arabidopsis
  misc_feature (1)..(289): Homolog of NCBI NO: 18391039 NR Description: Expressed protein
  misc_feature (1)..(289): Homolog of NCBI NO: 25404155 NR Description: hypothetical protein T8L23.8 [imported] -
  misc_feature (1)..(289): Homolog of NCBI NO: 22330290 NR Description: hypothetical protein
MGLVRRTAMSSTVNKASPVRSLLGGFRCLNVESKEEDEKKDMTVLEAKKLMRLVNVEDMKKKLIGMGDKEMVTYTTLIEASQGLGIARSLDEAHAFARVLDDAGVILIFRDKVYLHPHKVVDLIRKAVPLGLNPDDELIREEFDKMRSMKEEIDVLAHQQVRKILWGGLGYSVVQIGIFVRLTFWEFSWDVMEPITFFTTATGIIVGYAYFLMTSRDPTYQDFMKRLFLSRQRKLLKSHKFDAERFKELENKWKITSCSSSSCHANASIRNRVGVDLDLEDSLQSHHRD

SEQ ID NO: 37123 - protein, 281 aa, Arabidopsis thaliana
  peptide (1)..(281): Ceres Seq. ID no. 12397165
  misc_feature (72)..(254): Pfam Name: Protein of unknown function, DUF607 Pfam Description: Protein of unknown function, DUF607
  misc_feature (34)..(255): Homolog of NCBI NO: 15240047 NR Description: putative protein
  misc_feature (34)..(255): Homolog of NCBI NO: 14596231 NR Description: Unknown protein [Arabidopsis thaliana]
  misc_feature (25)..(242): Homolog of NCBI NO: 15234535 NR Description: putative protein; protein id: At4g36820.1
  misc_feature (29)..(258): Homolog of NCBI NO: 24496456 NR Description: hypothetical protein [Arabidopsis thaliana]
  misc_feature (1)..(258): Homolog of NCBI NO: 15224063 NR Description: hypothetical protein; protein id: At2g23790.1
  misc_feature (28)..(246): Homolog of NCBI NO: 34909244 NR Description: B1148D12.10 [Oryza sativa (japonica
  misc_feature (1)..(229): Homolog of NCBI NO: 25402554 NR Description: hypothetical protein [imported] - Arabidopsis
  misc_feature (1)..(281): Homolog of NCBI NO: 18391039 NR Description: Expressed protein
  misc_feature (1)..(281): Homolog of NCBI NO: 25404155 NR Description: hypothetical protein T8L23.8 [imported] -
  misc_feature (1)..(281): Homolog of NCBI NO: 22330290 NR Description: hypothetical protein
MSSTVNKASPVRSLLGGFRCLNVESKEEDEKKDMTVLEAKKLMRLVNVEDMKKKLIGMGDKEMVTYTTLIEASQGLGIARSLDEAHAFARVLDDAGVILIFRDKVYLHPHKVVDLIRKAVPLGLNPDDELIREEFDKMRSMKEEIDVLAHQQVRKILWGGLGYSVVQIGIFVRLTFWEFSWDVMEPITFFTTATGIIVGYAYFLMTSRDPTYQDFMKRLFLSRQRKLLKSHKFDAERFKELENKWKITSCSSSSCHANASIRNRVGVDLDLEDSLQSHHRD

SEQ ID NO: 37124 - DNA, 903 bp, Arabidopsis thaliana
  misc_feature (1)..(903): Ceres Seq. ID no. 13592914
  misc_feature: MA Experiment ID: 20000171 Result: Up-regulated in Transcription
  misc_feature: MA Experiment 20000171 PARAMETER Experiment Name: At_42deg_Heat_P Parameter: Age (day) Value: 14
  misc_feature: MA Experiment 20000171 PARAMETER Experiment Name: At_42deg_Heat_P Parameter: Organism Value: A. thaliana
  misc_feature: MA Experiment 20000171 PARAMETER Experiment Name: At_42deg_Heat_P Parameter: Plant Line Value: WS
  misc_feature: MA Experiment 20000171 PARAMETER Experiment Name: At_42deg_Heat_P Parameter: Temperature (deg C) Value: 42 vs. 22
  misc_feature: MA Experiment 20000171 PARAMETER Experiment Name: At_42deg_Heat_P Parameter: Timepoint (hr) Value: 1
  misc_feature: MA Experiment 20000171 PARAMETER Experiment Name: At_42deg_Heat_P Parameter: Tissue Value: Aerial
  misc_feature: MA Experiment ID: 20000173 Result: Up-regulated in Transcription
  misc_feature: MA Experiment 20000173 PARAMETER Experiment Name: At_42deg_Heat_P Parameter: Age (day) Value: 14
  misc_feature: MA Experiment 20000173 PARAMETER Experiment Name: At_42deg_Heat_P Parameter: Organism Value: A. thaliana
  misc_feature: MA Experiment 20000173 PARAMETER Experiment Name: At_42deg_Heat_P Parameter: Plant Line Value: WS
  misc_feature: MA Experiment 20000173 PARAMETER Experiment Name: At_42deg_Heat_P Parameter: Temperature (deg C) Value: 42 vs. 22
  misc_feature: MA Experiment 20000173 PARAMETER Experiment Name: At_42deg_Heat_P Parameter: Timepoint (hr) Value: 6
  misc_feature: MA Experiment 20000173 PARAMETER Experiment Name: At_42deg_Heat_P Parameter: Tissue Value: Aerial
  misc_feature: MA Experiment ID: 20000456 Result: Up-regulated in Transcription
  misc_feature: MA Experiment 20000456 PARAMETER Experiment Name: At_100uM_BA_P Parameter: Age (day) Value: 14
  misc_feature: MA Experiment 20000456 PARAMETER Experiment Name: At_100uM_BA_P Parameter: Organism Value: A. thaliana
  misc_feature: MA Experiment 20000456 PARAMETER Experiment Name: At_100uM_BA_P Parameter: Plant Line Value: WS
  misc_feature: MA Experiment 20000456 PARAMETER Experiment Name: At_100uM_BA_P Parameter: Timepoint (hr) Value: 6
  misc_feature: MA Experiment 20000456 PARAMETER Experiment Name: At_100uM_BA_P Parameter: Tissue Value: Aerial
  misc_feature: MA Experiment 20000456 PARAMETER Experiment Name: At_100uM_BA_P Parameter: Treatment Value: 100uM BA vs. No Treatment
  misc_feature: MA Experiment ID: 20000709 Result: Up-regulated in Transcription
  misc_feature: MA Experiment 20000709 PARAMETER Experiment Name: At_15mM_NH4NO3_L-to-H_P Parameter: Age (hr) Value: 14
  misc_feature: MA Experiment 20000709 PARAMETER Experiment Name: At_15mM_NH4NO3_L-to-H_P Parameter: Organism Value: A. thaliana
  misc_feature: MA Experiment 20000709 PARAMETER Experiment Name: At_15mM_NH4NO3_L-to-H_P Parameter: Plant Line Value: WS
  misc_feature: MA Experiment 20000709 PARAMETER Experiment Name: At_15mM_NH4NO3_L-to-H_P Parameter: Timepoint (hr) Value: 4
  misc_feature: MA Experiment 20000709 PARAMETER Experiment Name: At_15mM_NH4NO3_L-to-H_P Parameter: Tissue Value: Aerial
  misc_feature: MA Experiment 20000709 PARAMETER Experiment Name: At_15mM_NH4NO3_L-to-H_P Parameter: Treatment Value: 15mM NH4NO3 vs. 30mM Mannitol
  misc_feature: MA Experiment ID: 20001248 Result: Down-regulated in Transcription
  misc_feature: MA Experiment 20001248 PARAMETER Experiment Name: At_Far-red-induction_P Parameter: Age (day) Value: 7
  misc_feature: MA Experiment 20001248 PARAMETER Experiment Name: At_Far-red-induction_P Parameter: Light Value: Far-red vs. White
  misc_feature: MA Experiment 20001248 PARAMETER Experiment Name: At_Far-red-induction_P Parameter: Organism Value: A. thaliana
  misc_feature: MA Experiment 20001248 PARAMETER Experiment Name: At_Far-red-induction_P Parameter: Plant Line Value: Columbia
  misc_feature: MA Experiment 20001248 PARAMETER Experiment Name: At_Far-red-induction_P Parameter: Timepoint (hr) Value: 4
  misc_feature: MA Experiment 20001248 PARAMETER Experiment Name: At_Far-red-induction_P Parameter: Tissue Value: Whole Plant
  misc_feature: MA Experiment ID: 20001555 Result: Up-regulated in Transcription
  misc_feature: MA Experiment 20001555 PARAMETER Experiment Name: At_Drought_Soil_Dry_P Parameter: Age (day) Value: 24
  misc_feature: MA Experiment 20001555 PARAMETER Experiment Name: At_Drought_Soil_Dry_P Parameter: Organism Value: A. thaliana
  misc_feature: MA Experiment 20001555 PARAMETER Experiment Name: At_Drought_Soil_Dry_P Parameter: Plant Line Value: WS
  misc_feature: MA Experiment 20001555 PARAMETER Experiment Name: At_Drought_Soil_Dry_P Parameter: Post Timepoint (hr) Value: None
  misc_feature: MA Experiment 20001555 PARAMETER Experiment Name: At_Drought_Soil_Dry_P Parameter: Post-Treatment Value: None
  misc_feature: MA Experiment 20001555 PARAMETER Experiment Name: At_Drought_Soil_Dry_P Parameter: Timepoint (day) Value: 10
  misc_feature: MA Experiment 20001555 PARAMETER Experiment Name: At_Drought_Soil_Dry_P Parameter: Treatment Value: Drought vs. No Drought
gcacacagttctcagataaatactaaactcactgttaaaactttctcaacaaagcttcctgtttagatacaaatggcatctgctctcgctcttaagagactcctatcatcctccatcgctccacgttcccgtagtgttcttcgtccagctgtttcctctcgcctcttcaacaccaacgccgttaggagctacgacgacgacggcgaaaatggagacggcgttgatttatatcgccgctctgttcctcgccgccgtggtgatttcttctcagatgtgtttgatccgttttcgccgacgaggagcgttagtcaagtgctgaatctgatggaccagttcatggagaatcctctgttatcagctactcgtggcatgggagcttcaggagctcgtcgtggttgggatataaaagagaaagacgatgctctgtacctgagaatcgacatgcctgggctgagcagagaggatgtgaagctggctttggagcaggacactctggtgattagaggagaaggaaaaaacgaggaagatggtggcgaggaaggagagagcggtaatcggagattcacaagcaggattggattaccggataagatttacaagatcgatgagattaaggcggagatgaagaacggagtgttgaaagttgtgatcccgaagatgaaagaacaagagagaaatgatgttcgtcagatcgagatcaactaaaaacgtcgacgtttttttctgttctagttatgttgataggtctttgaataagatgtgtgtgtagtttggcacggtcgatgttgagtcatgtagtctctaaagactaaaaggttatatgtttctttcttgagacggtggttttttgtcttgcttaaaccaaaatttgcattccaaatcaaagcactaattaaataaaac

SEQ ID NO: 37125 - protein, 210 aa, Arabidopsis thaliana
  peptide (1)..(210): Ceres Seq. ID no. 13592915
  misc_feature (1)..(209): Homolog of NCBI NO: 3122228 NR Description: Heat shock 22 kDa protein, mitochondrial
  misc_feature (1)..(210): Homolog of NCBI NO: 123564 NR Description: Small heat shock protein, chloroplast precursor
  misc_feature (3)..(209): Homolog of NCBI NO: 7441310 NR Description: heat shock protein MTSHP precursor, mitochondrial
  misc_feature (1)..(209): Homolog of NCBI NO: 7159338 NR Description: LMW heat shock protein [Euphorbia esula]
  misc_feature (1)..(210): Homolog of NCBI NO: 1170368 NR Description: Heat shock 22 kDa protein, mitochondrial
  misc_feature (2)..(210): Homolog of NCBI NO: 15242086 NR Description: heat shock protein, putative [Arabidopsis
  misc_feature (2)..(210): Homolog of NCBI NO: 21554988 NR Description: mitochondrial heat shock 22 kd protein-like
  misc_feature (31)..(210): Homolog of NCBI NO: 2326361 NR Description: hypothetical protein [Arabidopsis thaliana]
  misc_feature (1)..(210): Homolog of NCBI NO: 2326354 NR Description: LMW heat shock protein [Arabidopsis thaliana]
  misc_feature (1)..(210): Homolog of NCBI NO: 15234969 NR Description: mitochondrion-localized small heat shock protein
MASALALKRLLSSSIAPRSRSVLRPAVSSRLFNTNAVRSYDDDGENGDGVDLYRRSVPRRRGDFFSDVFDPFSPTRSVSQVLNLMDQFMENPLLSATRGMGASGARRGWDIKEKDDALYLRIDMPGLSREDVKLALEQDTLVIRGEGKNEEDGGEEGESGNRRFTSRIGLPDKIYKIDEIKAEMKNGVLKVVIPKMKEQERNDVRQIEIN

SEQ ID NO: 37126 - protein, 126 aa, Arabidopsis thaliana
  peptide (1)..(126): Ceres Seq. ID no. 13592916
  misc_feature (1)..(125): Homolog of NCBI NO: 3122228 NR Description: Heat shock 22 kDa protein, mitochondrial
  misc_feature (1)..(126): Homolog of NCBI NO: 123564 NR Description: Small heat shock protein, chloroplast precursor
  misc_feature (1)..(125): Homolog of NCBI NO: 7441310 NR Description: heat shock protein MTSHP precursor, mitochondrial
  misc_feature (1)..(125): Homolog of NCBI NO: 7159338 NR Description: LMW heat shock protein [Euphorbia esula]
  misc_feature (1)..(126): Homolog of NCBI NO: 1170368 NR Description: Heat shock 22 kDa protein, mitochondrial
  misc_feature (1)..(126): Homolog of NCBI NO: 15242086 NR Description: heat shock protein, putative [Arabidopsis
  misc_feature (1)..(126): Homolog of NCBI NO: 21554988 NR Description: mitochondrial heat shock 22 kd protein-like
  misc_feature (1)..(126): Homolog of NCBI NO: 2326361 NR Description: hypothetical protein [Arabidopsis thaliana]
  misc_feature (1)..(126): Homolog of NCBI NO: 2326354 NR Description: LMW heat shock protein [Arabidopsis thaliana]
  misc_feature (1)..(126): Homolog of NCBI NO: 15234969 NR Description: mitochondrion-localized small heat shock protein
MDQFMENPLLSATRGMGASGARRGWDIKEKDDALYLRIDMPGLSREDVKLALEQDTLVIRGEGKNEEDGGEEGESGNRRFTSRIGLPDKIYKIDEIKAEMKNGVLKVVIPKMKEQERNDVRQIEIN

SEQ ID NO: 37127 - protein, 122 aa, Arabidopsis thaliana
  peptide (1)..(122): Ceres Seq. ID no. 13592917
  misc_feature (1)..(121): Homolog of NCBI NO: 3122228 NR Description: Heat shock 22 kDa protein, mitochondrial
  misc_feature (1)..(122): Homolog of NCBI NO: 123564 NR Description: Small heat shock protein, chloroplast precursor
  misc_feature (1)..(121): Homolog of NCBI NO: 7441310 NR Description: heat shock protein MTSHP precursor, mitochondrial
  misc_feature (1)..(121): Homolog of NCBI NO: 7159338 NR Description: LMW heat shock protein [Euphorbia esula]
  misc_feature (1)..(122): Homolog of NCBI NO: 1170368 NR Description: Heat shock 22 kDa protein, mitochondrial
  misc_feature (1)..(122): Homolog of NCBI NO: 15242086 NR Description: heat shock protein, putative [Arabidopsis
  misc_feature (1)..(122): Homolog of NCBI NO: 21554988 NR Description: mitochondrial heat shock 22 kd protein-like
  misc_feature (1)..(122): Homolog of NCBI NO: 2326361 NR Description: hypothetical protein [Arabidopsis thaliana]
  misc_feature (1)..(122): Homolog of NCBI NO: 2326354 NR Description: LMW heat shock protein [Arabidopsis thaliana]
  misc_feature (1)..(122): Homolog of NCBI NO: 15234969 NR Description: mitochondrion-localized small heat shock protein
MENPLLSATRGMGASGARRGWDIKEKDDALYLRIDMPGLSREDVKLALEQDTLVIRGEGKNEEDGGEEGESGNRRFTSRIGLPDKIYKIDEIKAEMKNGVLKVVIPKMKEQERNDVRQIEIN

SEQ ID NO: 37128 - DNA, 1188 bp, Arabidopsis thaliana
  misc_feature (1)..(1188): Ceres Seq. ID no. 12336419
  misc_feature: MA Experiment ID: 108463 Result: Down-regulated in Transcription
  misc_feature: MA Experiment 108463 PARAMETER Experiment Name: At_Germinating_Seeds_cDNA_P Parameter: Age (day) Value: 3 vs. 0
  misc_feature: MA Experiment 108463 PARAMETER Experiment Name: At_Germinating_Seeds_cDNA_P Parameter: Tissue Value: Germinating Seeds
  misc_feature: MA Experiment ID: 108595 Result: Down-regulated in Transcription
  misc_feature: MA Experiment 108595 PARAMETER Experiment Name: At_Ler-pi_Ovule_cDNA_P Parameter: Plant Line Value: null
  misc_feature: MA Experiment ID: 20000227 Result: Up-regulated in Transcription
  misc_feature: MA Experiment 20000227 PARAMETER Experiment Name: At_Root-Tips-vs-Tops_P Parameter: Tissue Value: Root Tips vs. Root Tops
  misc_feature: MA Experiment ID: 20000495 Result: Up-regulated in Transcription
  misc_feature: MA Experiment 20000495 PARAMETER Experiment Name: At_Guard_Cells_P Parameter: Harvest Date Value: 8/2/2002
  misc_feature: MA Experiment 20000495 PARAMETER Experiment Name: At_Guard_Cells_P Parameter: Organism Value: A. thaliana
  misc_feature: MA Experiment 20000495 PARAMETER Experiment Name: At_Guard_Cells_P Parameter: Tissue Value: Guard Cells vs. Leaves
  misc_feature: MA Experiment ID: 20001560 Result: Up-regulated in Transcription
  misc_feature: MA Experiment 20001560 PARAMETER Experiment Name: At_Drought_Soil_Dry_P Parameter: Age (day) Value: 28
  misc_feature: MA Experiment 20001560 PARAMETER Experiment Name: At_Drought_Soil_Dry_P Parameter: Organism Value: A. thaliana
  misc_feature: MA Experiment 20001560 PARAMETER Experiment Name: At_Drought_Soil_Dry_P Parameter: Plant Line Value: WS
  misc_feature: MA Experiment 20001560 PARAMETER Experiment Name: At_Drought_Soil_Dry_P Parameter: Post Timepoint (hr) Value: None
  misc_feature: MA Experiment 20001560 PARAMETER Experiment Name: At_Drought_Soil_Dry_P Parameter: Post-Treatment Value: None
  misc_feature: MA Experiment 20001560 PARAMETER Experiment Name: At_Drought_Soil_Dry_P Parameter: Timepoint (day) Value: 14
  misc_feature: MA Experiment 20001560 PARAMETER Experiment Name: At_Drought_Soil_Dry_P Parameter: Treatment Value: Drought vs. No Drought
ctttcgtgtatggttccgggaaggaaaaggggaagtggattgttttcatcggcgataagtctcttctcctctgggattgaggttggtggtgtgaggtaaagcttcggtagttagagatgaatgcgtccggcttaactgttactccgcccagatttcactttcgatggcgttctgatcgttttggtacatctcagagaagctctcaagcttttactgttcttagcaaattgaataatcgaaattccgcttggcctgttcttaaaagttctcgtttggcgcttcctacacaaagaagaaatgctatgatcactcgtgccatgagtgcttcctttggtgatatggcagacgattcagctgctatcttccctcggatcaatgtcaaagacccatataaacggcttgggataagccggatggcctcagaggatgagattcaaggagcgaggaactttctcattcagcaatacgcagggcacaaacccagtgttgatgcaatcgaatcagctcatgacaagattatcatgcagaagtttcatgagaggaaaaaccccaagattgacatatcgaaaaaggttcgccaagtgaggcagtccaaagttgtcaactttgttttcgagagattccaaactcctcccaatgcagtccttgtcaaaacagcagtcacgtttgcagttcttggcgttctaaccgttctgttcccgacagaagaaggaccgaccttgcaggttttgttatcactaatagctaccttttacttcatccaccaaaggctccagaagaagctctggactttcctttacggagcgggagctttcatcttctcgtggctggttgggactttcttgatggtatctgtgatcccaccgttcatcaaaggaccaagaggttttgaagtcatgtcttcgctcctaagctatgttttgctttgggtcgcttcgagttacctccggtagcgtgctagcttttttcttttccccgtcttttgggccagaaattcaagtgttatctcggatatatgaaaacacacgaacagagaaaaaatgcatcattttcatgtgacagagagagagagagagagagatatgatttgtggtcttggagttgttatttcacggagacctcattaactttcaaagctcagtttccaagttgtggctacaaacaaagaatagtaagagttgattacgc

SEQ ID NO: 37129 - protein, 278 aa, Arabidopsis thaliana
  peptide (1)..(278): Ceres Seq. ID no. 12336420
  misc_feature (92)..(278): Homolog of NCBI NO: 23039527 NR Description: hypothetical protein [Trichodesmium erythraeum
  misc_feature (169)..(278): Homolog of NCBI NO: 37573058 NR Description: unknown protein [Oryza sativa (japonica
  misc_feature (83)..(278): Homolog of NCBI NO: 16329734 NR Description: unknown protein [Synechocystis sp. PCC 6803]
  misc_feature (89)..(278): Homolog of NCBI NO: 23129945 NR Description: hypothetical protein [Nostoc punctiforme]
  misc_feature (89)..(278): Homolog of NCBI NO: 17230751 NR Description: hypothetical protein [Nostoc sp. PCC 7120]
  misc_feature (47)..(278): Homolog of NCBI NO: 15237199 NR Description: putative protein; protein id: At5g23040.1
  misc_feature (47)..(278): Homolog of NCBI NO: 11357625 NR Description: hypothetical protein F24M12.180 - Arabidopsis
  misc_feature (1)..(278): Homolog of NCBI NO: 18409276 NR Description: putative protein
MNASGLTVTPPRFHFRWRSDRFGTSQRSSQAFTVLSKLNNRNSAWPVLKSSRLALPTQRRNAMITRAMSASFGDMADDSAAIFPRINVKDPYKRLGISRMASEDEIQGARNFLIQQYAGHKPSVDAIESAHDKIIMQKFHERKNPKIDISKKVRQVRQSKVVNFVFERFQTPPNAVLVKTAVTFAVLGVLTVLFPTEEGPTLQVLLSLIATFYFIHQRLQKKLWTFLYGAGAFIFSWLVGTFLMVSVIPPFIKGPRGFEVMSSLLSYVLLWVASSYLR

SEQ ID NO: 37130 - protein, 216 aa, Arabidopsis thaliana
  peptide (1)..(216): Ceres Seq. ID no. 12336421
  misc_feature (30)..(216): Homolog of NCBI NO: 23039527 NR Description: hypothetical protein [Trichodesmium erythraeum
  misc_feature (107)..(216): Homolog of NCBI NO: 37573058 NR Description: unknown protein [Oryza sativa (japonica
  misc_feature (21)..(216): Homolog of NCBI NO: 16329734 NR Description: unknown protein [Synechocystis sp. PCC 6803]
  misc_feature (27)..(216): Homolog of NCBI NO: 23129945 NR Description: hypothetical protein [Nostoc punctiforme]
  misc_feature (27)..(216): Homolog of NCBI NO: 17230751 NR Description: hypothetical protein [Nostoc sp. PCC 7120]
  misc_feature (1)..(216): Homolog of NCBI NO: 15237199 NR Description: putative protein; protein id: At5g23040.1
  misc_feature (1)..(216): Homolog of NCBI NO: 11357625 NR Description: hypothetical protein F24M12.180 - Arabidopsis
  misc_feature (1)..(216): Homolog of NCBI NO: 18409276 NR Description: putative protein
MITRAMSASFGDMADDSAAIFPRINVKDPYKRLGISRMASEDEIQGARNFLIQQYAGHKPSVDAIESAHDKIIMQKFHERKNPKIDISKKVRQVRQSKVVNFVFERFQTPPNAVLVKTAVTFAVLGVLTVLFPTEEGPTLQVLLSLIATFYFIHQRLQKKLWTFLYGAGAFIFSWLVGTFLMVSVIPPFIKGPRGFEVMSSLLSYVLLWVASSYLR

SEQ ID NO: 37131 - protein, 211 aa, Arabidopsis thaliana
  peptide (1)..(211): Ceres Seq. ID no. 12336422
  misc_feature (25)..(211): Homolog of NCBI NO: 23039527 NR Description: hypothetical protein [Trichodesmium erythraeum
  misc_feature (102)..(211): Homolog of NCBI NO: 37573058 NR Description: unknown protein [Oryza sativa (japonica
  misc_feature (16)..(211): Homolog of NCBI NO: 16329734 NR Description: unknown protein [Synechocystis sp. PCC 6803]
  misc_feature (22)..(211): Homolog of NCBI NO: 23129945 NR Description: hypothetical protein [Nostoc punctiforme]
  misc_feature (22)..(211): Homolog of NCBI NO: 17230751 NR Description: hypothetical protein [Nostoc sp. PCC 7120]
  misc_feature (1)..(211): Homolog of NCBI NO: 15237199 NR Description: putative protein; protein id: At5g23040.1
  misc_feature (1)..(211): Homolog of NCBI NO: 11357625 NR Description: hypothetical protein F24M12.180 - Arabidopsis
  misc_feature (1)..(211): Homolog of NCBI NO: 18409276 NR Description: putative protein
MSASFGDMADDSAAIFPRINVKDPYKRLGISRMASEDEIQGARNFLIQQYAGHKPSVDAIESAHDKIIMQKFHERKNPKIDISKKVRQVRQSKVVNFVFERFQTPPNAVLVKTAVTFAVLGVLTVLFPTEEGPTLQVLLSLIATFYFIHQRLQKKLWTFLYGAGAFIFSWLVGTFLMVSVIPPFIKGPRGFEVMSSLLSYVLLWVASSYLR

SEQ ID NO: 37132 - DNA, 1429 bp, Arabidopsis thaliana
  misc_feature (1)..(1429): Ceres Seq. ID no. 13491563
  misc_feature: MA Experiment ID: 108577 Result: Down-regulated in Transcription
  misc_feature: MA Experiment 108577 PARAMETER Experiment Name: At_42deg_Heat_cDNA_P Parameter: Temperature (deg C) Value: 42 vs. 22
  misc_feature: MA Experiment 108577 PARAMETER Experiment Name: At_42deg_Heat_cDNA_P Parameter: Timepoint (hr) Value: 6
  misc_feature: MA Experiment 108577 PARAMETER Experiment Name: At_42deg_Heat_cDNA_P Parameter: Tissue Value: Aerial
  misc_feature: MA Experiment ID: 108595 Result: Down-regulated in Transcription
  misc_feature: MA Experiment 108595 PARAMETER Experiment Name: At_Ler-pi_Ovule_cDNA_P Parameter: Plant Line Value: null
  misc_feature: MA Experiment ID: 20000173 Result: Down-regulated in Transcription
  misc_feature: MA Experiment 20000173 PARAMETER Experiment Name: At_42deg_Heat_P Parameter: Age (day) Value: 14
  misc_feature: MA Experiment 20000173 PARAMETER Experiment Name: At_42deg_Heat_P Parameter: Organism Value: A. thaliana
  misc_feature: MA Experiment 20000173 PARAMETER Experiment Name: At_42deg_Heat_P Parameter: Plant Line Value: WS
  misc_feature: MA Experiment 20000173 PARAMETER Experiment Name: At_42deg_Heat_P Parameter: Temperature (deg C) Value: 42 vs. 22
  misc_feature: MA Experiment 20000173 PARAMETER Experiment Name: At_42deg_Heat_P Parameter: Timepoint (hr) Value: 6
  misc_feature: MA Experiment 20000173 PARAMETER Experiment Name: At_42deg_Heat_P Parameter: Tissue Value: Aerial
  misc_feature: MA Experiment ID: 20000179 Result: Up-regulated in Transcription
  misc_feature: MA Experiment 20000179 PARAMETER Experiment Name: At_Germinating_Seeds_P Parameter: Age (hr) Value: 6 vs. 0
  misc_feature: MA Experiment 20000179 PARAMETER Experiment Name: At_Germinating_Seeds_P Parameter: Tissue Value: Germinating Seeds
  misc_feature: MA Experiment ID: 20000180 Result: Up-regulated in Transcription
  misc_feature: MA Experiment 20000180 PARAMETER Experiment Name: At_Germinating_Seeds_P Parameter: Age (hr) Value: 24 vs. 0
  misc_feature: MA Experiment 20000180 PARAMETER Experiment Name: At_Germinating_Seeds_P Parameter: Tissue Value: Germinating Seeds
  misc_feature: MA Experiment ID: 20000185 Result: Down-regulated in Transcription
  misc_feature: MA Experiment 20000185 PARAMETER Experiment Name: At_Roots__P Parameter: Age (day) Value: 7 vs. 21
  misc_feature: MA Experiment 20000185 PARAMETER Experiment Name: At_Roots__P Parameter: Organism Value: A. thaliana
  misc_feature: MA Experiment 20000185 PARAMETER Experiment Name: At_Roots__P Parameter: Tissue Value: Roots vs. Whole Plant
  misc_feature: MA Experiment ID: 20000227 Result: Down-regulated in Transcription
  misc_feature: MA Experiment 20000227 PARAMETER Experiment Name: At_Root-Tips-vs-Tops_P Parameter: Tissue Value: Root Tips vs. Root Tops
  misc_feature: MA Experiment ID: 20000234 Result: Up-regulated in Transcription
  misc_feature: MA Experiment 20000234 PARAMETER Experiment Name: At_Siliques_P Parameter: Age (day) Value: 21
  misc_feature: MA Experiment 20000234 PARAMETER Experiment Name: At_Siliques_P Parameter: Organism Value: A. thaliana
  misc_feature: MA Experiment 20000234 PARAMETER Experiment Name: At_Siliques_P Parameter: Plant Line Value: WS
  misc_feature: MA Experiment 20000234 PARAMETER Experiment Name: At_Siliques_P Parameter: Tissue Value: Less Than 5mm Siliques vs. Whole Plant
  misc_feature: MA Experiment ID: 20000235 Result: Up-regulated in Transcription
  misc_feature: MA Experiment 20000235 PARAMETER Experiment Name: At_Siliques_P Parameter: Age (day) Value: 21
  misc_feature: MA Experiment 20000235 PARAMETER Experiment Name: At_Siliques_P Parameter: Organism Value: A. thaliana
  misc_feature: MA Experiment 20000235 PARAMETER Experiment Name: At_Siliques_P Parameter: Plant Line Value: WS
  misc_feature: MA Experiment 20000235 PARAMETER Experiment Name: At_Siliques_P Parameter: Tissue Value: 5-10mm Siliques vs. Whole Plant
  misc_feature: MA Experiment ID: 20000437 Result: Down-regulated in Transcription
  misc_feature: MA Experiment 20000437 PARAMETER Experiment Name: At_Drought_P Parameter: Age (day) Value: 8
  misc_feature: MA Experiment 20000437 PARAMETER Experiment Name: At_Drought_P Parameter: Organism Value: A. thaliana
  misc_feature: MA Experiment 20000437 PARAMETER Experiment Name: At_Drought_P Parameter: Plant Line Value: WS
  misc_feature: MA Experiment 20000437 PARAMETER Experiment Name: At_Drought_P Parameter: Timepoint (hr) Value: 24
  misc_feature: MA Experiment 20000437 PARAMETER Experiment Name: At_Drought_P Parameter: Tissue Value: Whole Plant
  misc_feature: MA Experiment 20000437 PARAMETER Experiment Name: At_Drought_P Parameter: Treatment Value: Drought vs. No Drought
  misc_feature: MA Experiment ID: 20000439 Result: Down-regulated in Transcription
  misc_feature: MA Experiment 20000439 PARAMETER Experiment Name: At_Roots__P Parameter: Age (day) Value: 14 vs. 21
  misc_feature: MA Experiment 20000439 PARAMETER Experiment Name: At_Roots__P Parameter: Organism Value: A. thaliana
  misc_feature: MA Experiment 20000439 PARAMETER Experiment Name: At_Roots__P Parameter: Tissue Value: Roots vs. Whole Plant
  misc_feature: MA Experiment ID: 20001248 Result: Down-regulated in Transcription
  misc_feature: MA Experiment 20001248 PARAMETER Experiment Name: At_Far-red-induction_P Parameter: Age (day) Value: 7
  misc_feature: MA Experiment 20001248 PARAMETER Experiment Name: At_Far-red-induction_P Parameter: Light Value: Far-red vs. White
  misc_feature: MA Experiment 20001248 PARAMETER Experiment Name: At_Far-red-induction_P Parameter: Organism Value: A. thaliana
  misc_feature: MA Experiment 20001248 PARAMETER Experiment Name: At_Far-red-induction_P Parameter: Plant Line Value: Columbia
  misc_feature: MA Experiment 20001248 PARAMETER Experiment Name: At_Far-red-induction_P Parameter: Timepoint (hr) Value: 4
  misc_feature: MA Experiment 20001248 PARAMETER Experiment Name: At_Far-red-induction_P Parameter: Tissue Value: Whole Plant
  misc_feature: MA Experiment ID: 20001450 Result: Down-regulated in Transcription
  misc_feature: MA Experiment 20001450 PARAMETER Experiment Name: At_Far-red-induction_P Parameter: Age (day) Value: 7
  misc_feature: MA Experiment 20001450 PARAMETER Experiment Name: At_Far-red-induction_P Parameter: Light Value: Far-red vs. White
  misc_feature: MA Experiment 20001450 PARAMETER Experiment Name: At_Far-red-induction_P Parameter: Organism Value: A. thaliana
  misc_feature: MA Experiment 20001450 PARAMETER Experiment Name: At_Far-red-induction_P Parameter: Plant Line Value: Columbia
  misc_feature: MA Experiment 20001450 PARAMETER Experiment Name: At_Far-red-induction_P Parameter: Timepoint (hr) Value: 8
  misc_feature: MA Experiment 20001450 PARAMETER Experiment Name: At_Far-red-induction_P Parameter: Tissue Value: Whole Plant
  misc_feature: MA Experiment ID: 20001757 Result: Up-regulated in Transcription
  misc_feature: MA Experiment 20001757 PARAMETER Experiment Name: At_50mM_NH4NO3_L-to-H_P Parameter: Timepoint (hr) Value: 6
  misc_feature: MA Experiment 20001757 PARAMETER Experiment Name: At_50mM_NH4NO3_L-to-H_P Parameter: Tissue Value: Leaf
  misc_feature: MA Experiment 20001757 PARAMETER Experiment Name: At_50mM_NH4NO3_L-to-H_P Parameter: Treatment Value: 50mM NH4NO3 vs 100mM Mannitol
  misc_feature: MA Experiment ID: 20001905 Result: Down-regulated in Transcription
  misc_feature: MA Experiment 20001905 PARAMETER Experiment Name: At_Drought_Reproduction_P Parameter: Age (day) Value: 40
  misc_feature: MA Experiment 20001905 PARAMETER Experiment Name: At_Drought_Reproduction_P Parameter: Organism Value: A. thaliana
  misc_feature: MA Experiment 20001905 PARAMETER Experiment Name: At_Drought_Reproduction_P Parameter: Plant Line Value: WS
  misc_feature: MA Experiment 20001905 PARAMETER Experiment Name: At_Drought_Reproduction_P Parameter: Timepoint (day) Value: 10
  misc_feature: MA Experiment 20001905 PARAMETER Experiment Name: At_Drought_Reproduction_P Parameter: Tissue Value: Rosettes
  misc_feature: MA Experiment 20001905 PARAMETER Experiment Name: At_Drought_Reproduction_P Parameter: Treatment Value: Drought vs. No Drought
  misc_feature: MA Experiment ID: 20001911 Result: Down-regulated in Transcription
  misc_feature: MA Experiment 20001911 PARAMETER Experiment Name: At_Drought_Reproduction_P Parameter: Age (day) Value: 40
  misc_feature: MA Experiment 20001911 PARAMETER Experiment Name: At_Drought_Reproduction_P Parameter: Organism Value: A. thaliana
  misc_feature: MA Experiment 20001911 PARAMETER Experiment Name: At_Drought_Reproduction_P Parameter: Plant Line Value: WS
  misc_feature: MA Experiment 20001911 PARAMETER Experiment Name: At_Drought_Reproduction_P Parameter: Timepoint (day) Value: 10
  misc_feature: MA Experiment 20001911 PARAMETER Experiment Name: At_Drought_Reproduction_P Parameter: Tissue Value: Flowers
  misc_feature: MA Experiment 20001911 PARAMETER Experiment Name: At_Drought_Reproduction_P Parameter: Treatment Value: Drought vs. No Drought
atggcttccatttccagaatcttaccaacagatggcagattaagtcaatgcagaatcaacacctcgtgggttccttctacaaccagaactcaaactcacttagattttcccaagttagtttctgttagtaactctgggataagtttgaggattcagaatagtaaacctattagccctgtctttgctcttgaagcaacttcctccaggagggttgtttgcaaagctgctgctggtgtgtcaggtgacttacctgagagtactcctaaggaacttagtcagtatgagaagattattgagcttttgacaaccctttttccactttgggttattttgggaacacttgttggcatcttcaagccatccttggttacatggttggaaacagatctctttactctaggtcttggatttcttatgctttccatgggtttgactcttacgtttgaagatttcagaagatgtttacgtaatccatggacggtgggtgttggttttcttgctcaatatatgatcaagccaattctaggttttctcattgcaatgactcttaagctttcggcacctcttgcgactggccttatcctagtctcatgctgccctggaggacaggcgtcaaacgttgctacttacatttccaaggggaatgtagcgctctctgtactcatgacaacgtgttcaaccattggggctattataatgactcctcttcttactaagcttcttgctggtcagcttgttcccgttgacgctgctggacttgctcttagtacgttccaagtagtgttggttcctaccataattggagttctggcaaatgagttctttcctaaatttacgtctaagatcataacagtgacgcctctaatcggagtcattctgactactctgctctgtgccagccctattggacaagttgcagatgttttgaaaacccaaggagctcaacttatactcccggtggcactccttcatgctgcagcctttgctattggctattggatttcaaagttttctttcggcgagtccacttcgcgtaccatttctatagaatgtggaatgcaaagttcagcgctcgggttcttgcttgcacaaaagcatttcacaaaccctctagttgctgttccttctgcagtcagtgttgtctgtatggcgcttggcgggagcggcctggccgtgttctggagaaacctaccgattccggcagatgacaaggatgacttcaaagagtaaatgaagtaggaaaggctgtttgcatcttctccaaacgatgtgattgttttgttgtaatgttagtaaacattacaaaatttgtgttgaaaaacatgaaacaaaatgtgtttaagagacatagaaacaagggcgtgcatgatgacaactttgtggtcaaccttttttttatttctcaattaatggacaaatcttttttggc

SEQ ID NO: 37133 - protein, 409 aa, Arabidopsis thaliana; identical to SEQ ID NO: 22580
  peptide (1)..(409): Ceres Seq. ID no. 13491564
  misc_feature (132)..(309): Pfam Name: Sodium Bile acid symporter family Pfam Description: Sodium Bile acid symporter family
  misc_feature (98)..(395): Homolog of NCBI NO: 33865169 NR Description: Sodium/bile acid cotransporter family
  misc_feature (47)..(402): Homolog of NCBI NO: 38346633 NR Description: OSJNBa0072D21.3 [Oryza sativa (japonica
  misc_feature (92)..(397): Homolog of NCBI NO: 24217327 NR Description: conserved hypothetical protein
  misc_feature (41)..(403): Homolog of NCBI NO: 18412023 NR Description: bile acid:sodium symporter family [Arabidopsis
  misc_feature (139)..(409): Homolog of NCBI NO: 28393076 NR Description: putative Na+ dependent ileal bile acid
  misc_feature (62)..(409): Homolog of NCBI NO: 34911708 NR Description: P0707D10.18 [Oryza sativa (japonica
  misc_feature (1)..(38): Homolog of NCBI NO: 7485401 NR Description: hypothetical protein At2g26900 [imported] -
  misc_feature (67)..(385): Homolog of NCBI NO: 7485401 NR Description: hypothetical protein At2g26900 [imported] -
  misc_feature (1)..(409): Homolog of NCBI NO: 20269901 NR Description: putative sodium-dependent bile acid symporter
  misc_feature (1)..(409): Homolog of NCBI NO: 30683305 NR Description: bile acid:sodium symporter family [Arabidopsis

SEQ ID NO: 37134 - protein, 271 aa, Arabidopsis thaliana; identical to SEQ ID NO: 22581
  peptide (1)..(271): Ceres Seq. ID no. 13491565
  misc_feature (1)..(171): Pfam Name: Sodium Bile acid symporter family Pfam Description: Sodium Bile acid symporter family
  misc_feature (1)..(257): Homolog of NCBI NO: 22298669 NR Description: ORF_ID:tll1126~probable sodium-dependent
  misc_feature (1)..(257): Homolog of NCBI NO: 33865169 NR Description: Sodium/bile acid cotransporter family
  misc_feature (1)..(264): Homolog of NCBI NO: 38346633 NR Description: OSJNBa0072D21.3 [Oryza sativa (japonica
  misc_feature (1)..(259): Homolog of NCBI NO: 24217327 NR Description: conserved hypothetical protein
  misc_feature (1)..(265): Homolog of NCBI NO: 18412023 NR Description: bile acid:sodium symporter family [Arabidopsis
  misc_feature (1)..(271): Homolog of NCBI NO: 28393076 NR Description: putative Na+ dependent ileal bile acid
  misc_feature (1)..(271): Homolog of NCBI NO: 34911708 NR Description: P0707D10.18 [Oryza sativa (japonica
  misc_feature (1)..(247): Homolog of NCBI NO: 7485401 NR Description: hypothetical protein At2g26900 [imported] -
  misc_feature (1)..(271): Homolog of NCBI NO: 20269901 NR Description: putative sodium-dependent bile acid symporter
  misc_feature (1)..(271): Homolog of NCBI NO: 30683305 NR Description: bile acid:sodium symporter family [Arabidopsis

SEQ ID NO: 37135 - protein, 268 aa, Arabidopsis thaliana; identical to SEQ ID NO: 22582
  peptide (1)..(268): Ceres Seq. ID no. 13491566
  misc_feature (1)..(168): Pfam Name: Sodium Bile acid symporter family Pfam Description: Sodium Bile acid symporter family
  misc_feature (1)..(254): Homolog of NCBI NO: 22298669 NR Description: ORF_ID:tll1126~probable sodium-dependent
  misc_feature (1)..(254): Homolog of NCBI NO: 33865169 NR Description: Sodium/bile acid cotransporter family
  misc_feature (1)..(261): Homolog of NCBI NO: 38346633 NR Description: OSJNBa0072D21.3 [Oryza sativa (japonica
  misc_feature (1)..(256): Homolog of NCBI NO: 24217327 NR Description: conserved hypothetical protein
  misc_feature (1)..(262): Homolog of NCBI NO: 18412023 NR Description: bile acid:sodium symporter family [Arabidopsis
  misc_feature (1)..(268): Homolog of NCBI NO: 28393076 NR Description: putative Na+ dependent ileal bile acid
  misc_feature (1)..(268): Homolog of NCBI NO: 34911708 NR Description: P0707D10.18 [Oryza sativa (japonica
  misc_feature (1)..(244): Homolog of NCBI NO: 7485401 NR Description: hypothetical protein At2g26900 [imported] -
  misc_feature (1)..(268): Homolog of NCBI NO: 20269901 NR Description: putative sodium-dependent bile acid symporter
  misc_feature (1)..(268): Homolog of NCBI NO: 30683305 NR Description: bile acid:sodium symporter family [Arabidopsis

SEQ ID NO: 37136 - DNA, 1325 bp, Arabidopsis thaliana
  misc_feature (1)..(1325): Ceres Seq. ID no. 12395299
  misc_feature: MA Experiment ID: 108434 Result: Up-regulated in Transcription
  misc_feature: MA Experiment 108434 PARAMETER Experiment Name: At_Root_Tips_cDNA_P Parameter: Tissue Value: Root Tips
  misc_feature: MA Experiment ID: 108462 Result: Down-regulated in Transcription
  misc_feature: MA Experiment 108462 PARAMETER Experiment Name: At_Germinating_Seeds_cDNA_P Parameter: Age (day) Value: 2 vs. 0
  misc_feature: MA Experiment 108462 PARAMETER Experiment Name: At_Germinating_Seeds_cDNA_P Parameter: Tissue Value: Germinating Seeds
  misc_feature: MA Experiment ID: 108463 Result: Down-regulated in Transcription
  misc_feature: MA Experiment 108463 PARAMETER Experiment Name: At_Germinating_Seeds_cDNA_P Parameter: Age (day) Value: 3 vs. 0
  misc_feature: MA Experiment 108463 PARAMETER Experiment Name: At_Germinating_Seeds_cDNA_P Parameter: Tissue Value: Germinating Seeds
  misc_feature: MA Experiment ID: 108464 Result: Down-regulated in Transcription
  misc_feature: MA Experiment 108464 PARAMETER Experiment Name: At_Germinating_Seeds_cDNA_P Parameter: Age (day) Value: 4 vs. 0
  misc_feature: MA Experiment 108464 PARAMETER Experiment Name: At_Germinating_Seeds_cDNA_P Parameter: Tissue Value: Germinating Seeds
  misc_feature: MA Experiment ID: 20000090 Result: Up-regulated in Transcription
  misc_feature: MA Experiment ID: 20000180 Result: Down-regulated in Transcription
  misc_feature: MA Experiment 20000180 PARAMETER Experiment Name: At_Germinating_Seeds_P Parameter: Age (hr) Value: 24 vs. 0
  misc_feature: MA Experiment 20000180 PARAMETER Experiment Name: At_Germinating_Seeds_P Parameter: Tissue Value: Germinating Seeds
  misc_feature: MA Experiment ID: 20000227 Result: Up-regulated in Transcription
  misc_feature: MA Experiment 20000227 PARAMETER Experiment Name: At_Root-Tips-vs-Tops_P Parameter: Tissue Value: Root Tips vs. Root Tops
  misc_feature: MA Experiment ID: 20000794 Result: Down-regulated in Transcription
  misc_feature: MA Experiment 20000794 PARAMETER Experiment Name: At_Petals_P Parameter: Age (day) Value: 23-25 days
  misc_feature: MA Experiment 20000794 PARAMETER Experiment Name: At_Petals_P Parameter: Plant Line Value: WS
  misc_feature: MA Experiment 20000794 PARAMETER Experiment Name: At_Petals_P Parameter: Tissue Value: Petals vs. Whole plant
  misc_feature: MA Experiment ID: 20001556 Result: Up-regulated in Transcription
  misc_feature: MA Experiment 20001556 PARAMETER Experiment Name: At_Drought_Soil_Dry_P Parameter: Age (day) Value: 26
  misc_feature: MA Experiment 20001556 PARAMETER Experiment Name: At_Drought_Soil_Dry_P Parameter: Organism Value: A. thaliana
  misc_feature: MA Experiment 20001556 PARAMETER Experiment Name: At_Drought_Soil_Dry_P Parameter: Plant Line Value: WS
  misc_feature: MA Experiment 20001556 PARAMETER Experiment Name: At_Drought_Soil_Dry_P Parameter: Post Timepoint (hr) Value: None
  misc_feature: MA Experiment 20001556 PARAMETER Experiment Name: At_Drought_Soil_Dry_P Parameter: Post-Treatment Value: None
  misc_feature: MA Experiment 20001556 PARAMETER Experiment Name: At_Drought_Soil_Dry_P Parameter: Timepoint (day) Value: 12
  misc_feature: MA Experiment 20001556 PARAMETER Experiment Name: At_Drought_Soil_Dry_P Parameter: Treatment Value: Drought vs. No Drought
  misc_feature: MA Experiment ID: 20001557 Result: Up-regulated in Transcription
  misc_feature: MA Experiment 20001557 PARAMETER Experiment Name: At_Drought_Soil_Dry_P Parameter: Age (day) Value: 27
  misc_feature: MA Experiment 20001557 PARAMETER Experiment Name: At_Drought_Soil_Dry_P Parameter: Organism Value: A. thaliana
  misc_feature: MA Experiment 20001557 PARAMETER Experiment Name: At_Drought_Soil_Dry_P Parameter: Plant Line Value: WS
  misc_feature: MA Experiment 20001557 PARAMETER Experiment Name: At_Drought_Soil_Dry_P Parameter: Post Timepoint (hr) Value: 3
  misc_feature: MA Experiment 20001557 PARAMETER Experiment Name: At_Drought_Soil_Dry_P Parameter: Post-Treatment Value: Re-Water vs. No Drought
  misc_feature: MA Experiment 20001557 PARAMETER Experiment Name: At_Drought_Soil_Dry_P Parameter: Timepoint (day) Value: 13
  misc_feature: MA Experiment 20001557 PARAMETER Experiment Name: At_Drought_Soil_Dry_P Parameter: Treatment Value: Drought vs. No Drought
  misc_feature: MA Experiment ID: 20001558 Result: Up-regulated in Transcription
  misc_feature: MA Experiment 20001558 PARAMETER Experiment Name: At_Drought_Soil_Dry_P Parameter: Age (day) Value: 27
  misc_feature: MA Experiment 20001558 PARAMETER Experiment Name: At_Drought_Soil_Dry_P Parameter: Organism Value: A. thaliana
  misc_feature: MA Experiment 20001558 PARAMETER Experiment Name: At_Drought_Soil_Dry_P Parameter: Plant Line Value: WS
  misc_feature: MA Experiment 20001558 PARAMETER Experiment Name: At_Drought_Soil_Dry_P Parameter: Post Timepoint (hr) Value: 6
  misc_feature: MA Experiment 20001558 PARAMETER Experiment Name: At_Drought_Soil_Dry_P Parameter: Post-Treatment Value: Re-Water vs. No Drought
  misc_feature: MA Experiment 20001558 PARAMETER Experiment Name: At_Drought_Soil_Dry_P Parameter: Timepoint (day) Value: 13
  misc_feature: MA Experiment 20001558 PARAMETER Experiment Name: At_Drought_Soil_Dry_P Parameter: Treatment Value: Drought vs. No Drought
  misc_feature: MA Experiment ID: 20001560 Result: Up-regulated in Transcription
  misc_feature: MA Experiment 20001560 PARAMETER Experiment Name: At_Drought_Soil_Dry_P Parameter: Age (day) Value: 28
  misc_feature: MA Experiment 20001560 PARAMETER Experiment Name: At_Drought_Soil_Dry_P Parameter: Organism Value: A. thaliana
  misc_feature: MA Experiment 20001560 PARAMETER Experiment Name: At_Drought_Soil_Dry_P Parameter: Plant Line Value: WS
  misc_feature: MA Experiment 20001560 PARAMETER Experiment Name: At_Drought_Soil_Dry_P Parameter: Post Timepoint (hr) Value: None
  misc_feature: MA Experiment 20001560 PARAMETER Experiment Name: At_Drought_Soil_Dry_P Parameter: Post-Treatment Value: None
  misc_feature: MA Experiment 20001560 PARAMETER Experiment Name: At_Drought_Soil_Dry_P Parameter: Timepoint (day) Value: 14
  misc_feature: MA Experiment 20001560 PARAMETER Experiment Name: At_Drought_Soil_Dry_P Parameter: Treatment Value: Drought vs. No Drought
aaaaaccctagaaaacctctggagctatggagatgatgcaggattcgttccaagtccataggattccacaatcgaagtatgtcgatggagttagatggcttccacaagcttctgctttgaatcgtttcttcgcaacagcgtcctatgacgcggattgtgattcttcatcaatcgagatccaatcgctcgacccaaaccctagagggaatcacaacacgaacccgttaatcgagtcgttatcttcatggacttcaccttctcgcgtttcgtctctagaagtcgcgggaaacggcggtggtggcggttcattcaaaccaatggtttcagcagctacgtcttctggttctcttcacgttctgatgattgatttggtggaaggagctgcgattgaagaggtttacgcggcggaaggggagaggtttcatgtgggacgcgtggaaggtgtggattggagagagggaggagaatgtgttactgttggtgaagatgggagagtgaatgtagtgaagattgtgaatggtgaaggtttaaggtatagaaaggtctttgatgggaatggattggtggcttatagagctgtgaaatgggcttctccgactgagtttgttactggaggatatggttttggtttgcaattgtgggatcagaggaagtctggtgaagctgtttcacaactcaaagggaactggtttcaaggcaaaacttctgcaattgtccactccattgacattcatccatctcggaagcacacttgcattgcgggaggttcttcaggtactgtatttgcttgggatcttcggtggccacagcaacccattgttctttctggggttggagcaagtgagaatataaacaatcctctgtctgaaagtgaggtatgggaagttcagtatgactcatacacaaaatccaacgtctcatcctcaaggattctccctgttatgacctgctctgaagatggaatccttggtatcatagaacaaggggaaagaaccaatcgagcttctggctgaaccttgtgccattaacagttttgacatcgacaggcaaaatccacaggatgtgatatgtagcttggagtgggaatcaatagcagttttctcaaggccttagtataatatggaactgtgcacggtatgctatgttttcttctgcgagctacaacgaagaaattgaggaaggtagtgatagatgatgagagacaagtttaaggaagagggtgtggaatgtgtttataagtttcattataacaagatcttaaaatacattctgcacaaacagagttttgtattcatcttaaagttagtgtgatcttgaagatttgc

SEQ ID NO: 37137 - protein, 328 aa, Arabidopsis thaliana
  peptide (1)..(328): Ceres Seq. ID no. 12395300
  misc_feature (147)..(289): Homolog of NCBI NO: 27923818 NR Description: Nucleoporin Nup43
  misc_feature (147)..(289): Homolog of NCBI NO: 30851621 NR Description: 2610529I12Rik protein [Mus musculus]
  misc_feature (246)..(321): Homolog of NCBI NO: 25372649 NR Description: hypothetical protein AT4g30840 [imported] -
  misc_feature (1)..(244): Homolog of NCBI NO: 25372649 NR Description: hypothetical protein AT4g30840 [imported] -
  misc_feature (4)..(321): Homolog of NCBI NO: 21554881 NR Description: unknown [Arabidopsis thaliana]
  misc_feature (1)..(321): Homolog of NCBI NO: 18417678 NR Description: expressed protein
MEMMQDSFQVHRIPQSKYVDGVRWLPQASALNRFFATASYDADCDSSSIEIQSLDPNPRGNHNTNPLIESLSSWTSPSRVSSLEVAGNGGGGGSFKPMVSAATSSGSLHVLMIDLVEGAAIEEVYAAEGERFHVGRVEGVDWREGGECVTVGEDGRVNVVKIVNGEGLRYRKVFDGNGLVAYRAVKWASPTEFVTGGYGFGLQLWDQRKSGEAVSQLKGNWFQGKTSAIVHSIDIHPSRKHTCIAGGSSGTVFAWDLRWPQQPIVLSGVGASENINNPLSESEVWEVQYDSYTKSNVSSSRILPVMTCSEDGILGIIEQGERTNRASG

SEQ ID NO: 37138 - protein, 326 aa, Arabidopsis thaliana
  peptide (1)..(326): Ceres Seq. ID no. 12395301
  misc_feature (145)..(287): Homolog of NCBI NO: 27923818 NR Description: Nucleoporin Nup43
  misc_feature (145)..(287): Homolog of NCBI NO: 30851621 NR Description: 2610529I12Rik protein [Mus musculus]
  misc_feature (244)..(319): Homolog of NCBI NO: 25372649 NR Description: hypothetical protein AT4g30840 [imported] -
  misc_feature (1)..(242): Homolog of NCBI NO: 25372649 NR Description: hypothetical protein AT4g30840 [imported] -
  misc_feature (2)..(319): Homolog of NCBI NO: 21554881 NR Description: unknown [Arabidopsis thaliana]
  misc_feature (1)..(319): Homolog of NCBI NO: 18417678 NR Description: expressed protein
MMQDSFQVHRIPQSKYVDGVRWLPQASALNRFFATASYDADCDSSSIEIQSLDPNPRGNHNTNPLIESLSSWTSPSRVSSLEVAGNGGGGGSFKPMVSAATSSGSLHVLMIDLVEGAAIEEVYAAEGERFHVGRVEGVDWREGGECVTVGEDGRVNVVKIVNGEGLRYRKVFDGNGLVAYRAVKWASPTEFVTGGYGFGLQLWDQRKSGEAVSQLKGNWFQGKTSAIVHSIDIHPSRKHTCIAGGSSGTVFAWDLRWPQQPIVLSGVGASENINNPLSESEVWEVQYDSYTKSNVSSSRILPVMTCSEDGILGIIEQGERTNRASG

SEQ ID NO: 37139 - protein, 325 aa, Arabidopsis thaliana
  peptide (1)..(325): Ceres Seq. ID no. 12395302
  misc_feature (144)..(286): Homolog of NCBI NO: 27923818 NR Description: Nucleoporin Nup43
  misc_feature (144)..(286): Homolog of NCBI NO: 30851621 NR Description: 2610529I12Rik protein [Mus musculus]
  misc_feature (243)..(318): Homolog of NCBI NO: 25372649 NR Description: hypothetical protein AT4g30840 [imported] -
  misc_feature (1)..(241): Homolog of NCBI NO: 25372649 NR Description: hypothetical protein AT4g30840 [imported] -
  misc_feature (1)..(318): Homolog of NCBI NO: 21554881 NR Description: unknown [Arabidopsis thaliana]
  misc_feature (1)..(318): Homolog of NCBI NO: 18417678 NR Description: expressed protein
MQDSFQVHRIPQSKYVDGVRWLPQASALNRFFATASYDADCDSSSIEIQSLDPNPRGNHNTNPLIESLSSWTSPSRVSSLEVAGNGGGGGSFKPMVSAATSSGSLHVLMIDLVEGAAIEEVYAAEGERFHVGRVEGVDWREGGECVTVGEDGRVNVVKIVNGEGLRYRKVFDGNGLVAYRAVKWASPTEFVTGGYGFGLQLWDQRKSGEAVSQLKGNWFQGKTSAIVHSIDIHPSRKHTCIAGGSSGTVFAWDLRWPQQPIVLSGVGASENINNPLSESEVWEVQYDSYTKSNVSSSRILPVMTCSEDGILGIIEQGERTNRASG

SEQ ID NO: 37140 - DNA, 542 bp, Arabidopsis thaliana
  misc_feature (1)..(542): Ceres Seq. ID no. 12395297
  misc_feature: MA Experiment ID: 108462 Result: Down-regulated in Transcription
  misc_feature: MA Experiment 108462 PARAMETER Experiment Name: At_Germinating_Seeds_cDNA_P Parameter: Age (day) Value: 2 vs. 0
  misc_feature: MA Experiment 108462 PARAMETER Experiment Name: At_Germinating_Seeds_cDNA_P Parameter: Tissue Value: Germinating Seeds
  misc_feature: MA Experiment ID: 108488 Result: Down-regulated in Transcription
  misc_feature: MA Experiment ID: 108572 Result: Down-regulated in Transcription
  misc_feature: MA Experiment 108572 PARAMETER Experiment Name: At_Drought_cDNA_P Parameter: Timepoint (hr) Value: 1
  misc_feature: MA Experiment 108572 PARAMETER Experiment Name: At_Drought_cDNA_P Parameter: Tissue Value: Aerial
  misc_feature: MA Experiment 108572 PARAMETER Experiment Name: At_Drought_cDNA_P Parameter: Treatment Value: Drought vs. No Drought
  misc_feature: MA Experiment ID: 108573 Result: Down-regulated in Transcription
  misc_feature: MA Experiment 108573 PARAMETER Experiment Name: At_Drought_cDNA_P Parameter: Timepoint (hr) Value: 6
  misc_feature: MA Experiment 108573 PARAMETER Experiment Name: At_Drought_cDNA_P Parameter: Tissue Value: Aerial
  misc_feature: MA Experiment 108573 PARAMETER Experiment Name: At_Drought_cDNA_P Parameter: Treatment Value: Drought vs. No Drought
  misc_feature: MA Experiment ID: 108577 Result: Down-regulated in Transcription
  misc_feature: MA Experiment 108577 PARAMETER Experiment Name: At_42deg_Heat_cDNA_P Parameter: Temperature (deg C) Value: 42 vs. 22
  misc_feature: MA Experiment 108577 PARAMETER Experiment Name: At_42deg_Heat_cDNA_P Parameter: Timepoint (hr) Value: 6
  misc_feature: MA Experiment 108577 PARAMETER Experiment Name: At_42deg_Heat_cDNA_P Parameter: Tissue Value: Aerial
  misc_feature: MA Experiment ID: 108579 Result: Up-regulated in Transcription
  misc_feature: MA Experiment 108579 PARAMETER Experiment Name: At_4deg_Cold_cDNA_P Parameter: Temperature (deg C) Value: 4 vs. 22
  misc_feature: MA Experiment 108579 PARAMETER Experiment Name: At_4deg_Cold_cDNA_P Parameter: Timepoint (hr) Value: 6
  misc_feature: MA Experiment 108579 PARAMETER Experiment Name: At_4deg_Cold_cDNA_P Parameter: Tissue Value: Aerial
  misc_feature: MA Experiment ID: 108605 Result: Down-regulated in Transcription
  misc_feature: MA Experiment 108605 PARAMETER Experiment Name: At_100uM_ABA_cDNA_P Parameter: Timepoint (hr) Value: 6
  misc_feature: MA Experiment 108605 PARAMETER Experiment Name: At_100uM_ABA_cDNA_P Parameter: Tissue Value: Aerial
  misc_feature: MA Experiment 108605 PARAMETER Experiment Name: At_100uM_ABA_cDNA_P Parameter: Treatment Value: 100uM ABA vs. No Treatment
  misc_feature: MA Experiment ID: 108607 Result: Down-regulated in Transcription
  misc_feature: MA Experiment 108607 PARAMETER Experiment Name: At_100uM_ABA_cDNA_P Parameter: Timepoint (hr) Value: 4
  misc_feature: MA Experiment 108607 PARAMETER Experiment Name: At_100uM_ABA_cDNA_P Parameter: Tissue Value: Aerial
  misc_feature: MA Experiment 108607 PARAMETER Experiment Name: At_100uM_ABA_cDNA_P Parameter: Treatment Value: 100uM ABA vs. No Treatment
  misc_feature: MA Experiment ID: 108608 Result: Down-regulated in Transcription
  misc_feature: MA Experiment 108608 PARAMETER Experiment Name: At_100uM_ABA_cDNA_P Parameter: Timepoint (hr) Value: 1
  misc_feature: MA Experiment 108608 PARAMETER Experiment Name: At_100uM_ABA_cDNA_P Parameter: Tissue Value: Aerial
  misc_feature: MA Experiment 108608 PARAMETER Experiment Name: At_100uM_ABA_cDNA_P Parameter: Treatment Value: 100uM ABA vs. No Treatment
  misc_feature: MA Experiment ID: 20000069 Result: Up-regulated in Transcription
  misc_feature: MA Experiment 20000069 PARAMETER Experiment Name: At_100uM_ABA_Mutants_cDNA_P Parameter: Plant Line Value: CS23
  misc_feature: MA Experiment 20000069 PARAMETER Experiment Name: At_100uM_ABA_Mutants_cDNA_P Parameter: Timepoint (hr) Value: 6
  misc_feature: MA Experiment 20000069 PARAMETER Experiment Name: At_100uM_ABA_Mutants_cDNA_P Parameter: Tissue Value: Aerial
  misc_feature: MA Experiment 20000069 PARAMETER Experiment Name: At_100uM_ABA_Mutants_cDNA_P Parameter: Treatment Value: 100uM ABA vs. No Treatment
  misc_feature: MA Experiment ID: 20000070 Result: Up-regulated in Transcription
  misc_feature: MA Experiment 20000070 PARAMETER Experiment Name: At_100uM_ABA_Mutants_cDNA_P Parameter: Plant Line Value: CS24
  misc_feature: MA Experiment 20000070 PARAMETER Experiment Name: At_100uM_ABA_Mutants_cDNA_P Parameter: Timepoint (hr) Value: 6
  misc_feature: MA Experiment 20000070 PARAMETER Experiment Name: At_100uM_ABA_Mutants_cDNA_P Parameter: Tissue Value: Aerial
  misc_feature: MA Experiment 20000070 PARAMETER Experiment Name: At_100uM_ABA_Mutants_cDNA_P Parameter: Treatment Value: 100uM ABA vs. No Treatment
  misc_feature: MA Experiment ID: 20000071 Result: Up-regulated in Transcription
  misc_feature: MA Experiment 20000071 PARAMETER Experiment Name: At_100uM_ABA_Mutants_cDNA_P Parameter: Plant Line Value: CS8104
  misc_feature: MA Experiment 20000071 PARAMETER Experiment Name: At_100uM_ABA_Mutants_cDNA_P Parameter: Timepoint (hr) Value: 6
  misc_feature: MA Experiment 20000071 PARAMETER Experiment Name: At_100uM_ABA_Mutants_cDNA_P Parameter: Tissue Value: Aerial
  misc_feature: MA Experiment 20000071 PARAMETER Experiment Name: At_100uM_ABA_Mutants_cDNA_P Parameter: Treatment Value: 100uM ABA vs. No Treatment
  misc_feature: MA Experiment ID: 20000072 Result: Up-regulated in Transcription
  misc_feature: MA Experiment 20000072 PARAMETER Experiment Name: At_100uM_ABA_Mutants_cDNA_P Parameter: Plant Line Value: CS8105
  misc_feature: MA Experiment 20000072 PARAMETER Experiment Name: At_100uM_ABA_Mutants_cDNA_P Parameter: Timepoint (hr) Value: 6
  misc_feature: MA Experiment 20000072 PARAMETER Experiment Name: At_100uM_ABA_Mutants_cDNA_P Parameter: Tissue Value: Aerial
  misc_feature: MA Experiment 20000072 PARAMETER Experiment Name: At_100uM_ABA_Mutants_cDNA_P Parameter: Treatment Value: 100uM ABA vs. No Treatment
  misc_feature: MA Experiment ID: 20000086 Result: Up-regulated in Transcription
  misc_feature: MA Experiment 20000086 PARAMETER Experiment Name: At_100uM_ABA_Mutants_cDNA_P Parameter: Plant Line Value: CS22
  misc_feature: MA Experiment 20000086 PARAMETER Experiment Name: At_100uM_ABA_Mutants_cDNA_P Parameter: Timepoint (hr) Value: 6
  misc_feature: MA Experiment 20000086 PARAMETER Experiment Name: At_100uM_ABA_Mutants_cDNA_P Parameter: Tissue Value: Aerial
  misc_feature: MA Experiment 20000086 PARAMETER Experiment Name: At_100uM_ABA_Mutants_cDNA_P Parameter: Treatment Value: 100uM ABA vs. No Treatment
  misc_feature: MA Experiment ID: 20000087 Result: Up-regulated in Transcription
  misc_feature: MA Experiment 20000087 PARAMETER Experiment Name: At_100uM_ABA_Mutants_cDNA_P Parameter: Plant Line Value: WS
  misc_feature: MA Experiment 20000087 PARAMETER Experiment Name: At_100uM_ABA_Mutants_cDNA_P Parameter: Timepoint (hr) Value: 6
  misc_feature: MA Experiment 20000087 PARAMETER Experiment Name: At_100uM_ABA_Mutants_cDNA_P Parameter: Tissue Value: Aerial
  misc_feature: MA Experiment 20000087 PARAMETER Experiment Name: At_100uM_ABA_Mutants_cDNA_P Parameter: Treatment Value: 100uM ABA vs. No Treatment
  misc_feature: MA Experiment ID: 20000088 Result: Up-regulated in Transcription
  misc_feature: MA Experiment 20000088 PARAMETER Experiment Name: At_100uM_ABA_Mutants_cDNA_P Parameter: Plant Line Value: Landsberg
  misc_feature: MA Experiment 20000088 PARAMETER Experiment Name: At_100uM_ABA_Mutants_cDNA_P Parameter: Timepoint (hr) Value: 6
  misc_feature: MA Experiment 20000088 PARAMETER Experiment Name: At_100uM_ABA_Mutants_cDNA_P Parameter: Tissue Value: Aerial
  misc_feature: MA Experiment 20000088 PARAMETER Experiment Name: At_100uM_ABA_Mutants_cDNA_P Parameter: Treatment Value: 100uM ABA vs. No Treatment
  misc_feature: MA Experiment ID: 20000089 Result: Up-regulated in Transcription
  misc_feature: MA Experiment ID: 20000090 Result: Up-regulated in Transcription
  misc_feature: MA Experiment ID: 20000111 Result: Down-regulated in Transcription
  misc_feature: MA Experiment 20000111 PARAMETER Experiment Name: At_42deg_Heat_cDNA_P Parameter: Temperature (deg C) Value: 42 vs. 22
  misc_feature: MA Experiment 20000111 PARAMETER Experiment Name: At_42deg_Heat_cDNA_P Parameter: Timepoint (hr) Value: 6
  misc_feature: MA Experiment 20000111 PARAMETER Experiment Name: At_42deg_Heat_cDNA_P Parameter: Tissue Value: Aerial
  misc_feature: MA Experiment ID: 20000112 Result: Down-regulated in Transcription
  misc_feature: MA Experiment 20000112 PARAMETER Experiment Name: At_42deg_Heat_cDNA_P Parameter: Temperature (deg C) Value: 42 vs. 22
  misc_feature: MA Experiment 20000112 PARAMETER Experiment Name: At_42deg_Heat_cDNA_P Parameter: Timepoint (hr) Value: 2
  misc_feature: MA Experiment 20000112 PARAMETER Experiment Name: At_42deg_Heat_cDNA_P Parameter: Tissue Value: Aerial
  misc_feature: MA Experiment ID: 20000113 Result: Down-regulated in Transcription
  misc_feature: MA Experiment 20000113 PARAMETER Experiment Name: At_42deg_Heat_cDNA_P Parameter: Temperature (deg C) Value: 42 vs. 22
  misc_feature: MA Experiment 20000113 PARAMETER Experiment Name: At_42deg_Heat_cDNA_P Parameter: Timepoint (hr) Value: 8
  misc_feature: MA Experiment 20000113 PARAMETER Experiment Name: At_42deg_Heat_cDNA_P Parameter: Tissue Value: Aerial
  misc_feature: MA Experiment ID: 20000117 Result: Up-regulated in Transcription
  misc_feature: MA Experiment 20000117 PARAMETER Experiment Name: At_100uM_ABA_Mutants_cDNA_P Parameter: Plant Line Value: Columbia
  misc_feature: MA Experiment 20000117 PARAMETER Experiment Name: At_100uM_ABA_Mutants_cDNA_P Parameter: Timepoint (hr) Value: 6
  misc_feature: MA Experiment 20000117 PARAMETER Experiment Name: At_100uM_ABA_Mutants_cDNA_P Parameter: Tissue Value: Aerial
  misc_feature: MA Experiment 20000117 PARAMETER Experiment Name: At_100uM_ABA_Mutants_cDNA_P Parameter: Treatment Value: 100uM ABA vs. No Treatment
  misc_feature: MA Experiment ID: 20000173 Result: Down-regulated in Transcription
  misc_feature: MA Experiment 20000173 PARAMETER Experiment Name: At_42deg_Heat_P Parameter: Age (day) Value: 14
  misc_feature: MA Experiment 20000173 PARAMETER Experiment Name: At_42deg_Heat_P Parameter: Organism Value: A. thaliana
  misc_feature: MA Experiment 20000173 PARAMETER Experiment Name: At_42deg_Heat_P Parameter: Plant Line Value: WS
  misc_feature: MA Experiment 20000173 PARAMETER Experiment Name: At_42deg_Heat_P Parameter: Temperature (deg C) Value: 42 vs. 22
  misc_feature: MA Experiment 20000173 PARAMETER Experiment Name: At_42deg_Heat_P Parameter: Timepoint (hr) Value: 6
  misc_feature: MA Experiment 20000173 PARAMETER Experiment Name: At_42deg_Heat_P Parameter: Tissue Value: Aerial
  misc_feature: MA Experiment ID: 20000213 Result: Up-regulated in Transcription
  misc_feature: MA Experiment 20000213 PARAMETER Experiment Name: At_4deg_Cold_P Parameter: Timepoint (hr) Value: 2
  misc_feature: MA Experiment ID: 20000453 Result: Down-regulated in Transcription
  misc_feature: MA Experiment 20000453 PARAMETER Experiment Name: At_100uM_ABA_P Parameter: Age (day) Value: 15
  misc_feature: MA Experiment 20000453 PARAMETER Experiment Name: At_100uM_ABA_P Parameter: Organism Value: A. thaliana
  misc_feature: MA Experiment 20000453 PARAMETER Experiment Name: At_100uM_ABA_P Parameter: Plant Line Value: WS
  misc_feature: MA Experiment 20000453 PARAMETER Experiment Name: At_100uM_ABA_P Parameter: Timepoint (hr) Value: 24
  misc_feature: MA Experiment 20000453 PARAMETER Experiment Name: At_100uM_ABA_P Parameter: Tissue Value: Aerial
  misc_feature: MA Experiment 20000453 PARAMETER Experiment Name: At_100uM_ABA_P Parameter: Treatment Value: 100uM ABA vs. No Treatment
  misc_feature: MA Experiment ID: 20001247 Result: Down-regulated in Transcription
  misc_feature: MA Experiment 20001247 PARAMETER Experiment Name: At_Far-red-induction_P Parameter: Age (day) Value: 7
  misc_feature: MA Experiment 20001247 PARAMETER Experiment Name: At_Far-red-induction_P Parameter: Light Value: Far-red vs. White
  misc_feature: MA Experiment 20001247 PARAMETER Experiment Name: At_Far-red-induction_P Parameter: Organism Value: A. thaliana
  misc_feature: MA Experiment 20001247 PARAMETER Experiment Name: At_Far-red-induction_P Parameter: Plant Line Value: Columbia
  misc_feature: MA Experiment 20001247 PARAMETER Experiment Name: At_Far-red-induction_P Parameter: Timepoint (hr) Value: 1
  misc_feature: MA Experiment 20001247 PARAMETER Experiment Name: At_Far-red-induction_P Parameter: Tissue Value: Whole Plant
  misc_feature: MA Experiment ID: 20001248 Result: Up-regulated in Transcription
  misc_feature: MA Experiment 20001248 PARAMETER Experiment Name: At_Far-red-induction_P Parameter: Age (day) Value: 7
  misc_feature: MA Experiment 20001248 PARAMETER Experiment Name: At_Far-red-induction_P Parameter: Light Value: Far-red vs. White
  misc_feature: MA Experiment 20001248 PARAMETER Experiment Name: At_Far-red-induction_P Parameter: Organism Value: A. thaliana
  misc_feature: MA Experiment 20001248 PARAMETER Experiment Name: At_Far-red-induction_P Parameter: Plant Line Value: Columbia
  misc_feature: MA Experiment 20001248 PARAMETER Experiment Name: At_Far-red-induction_P Parameter: Timepoint (hr) Value: 4
  misc_feature: MA Experiment 20001248 PARAMETER Experiment Name: At_Far-red-induction_P Parameter: Tissue Value: Whole Plant
  misc_feature: MA Experiment ID: 20001557 Result: Up-regulated in Transcription
  misc_feature: MA Experiment 20001557 PARAMETER Experiment Name: At_Drought_Soil_Dry_P Parameter: Age (day) Value: 27
  misc_feature: MA Experiment 20001557 PARAMETER Experiment Name: At_Drought_Soil_Dry_P Parameter: Organism Value: A. thaliana
  misc_feature: MA Experiment 20001557 PARAMETER Experiment Name: At_Drought_Soil_Dry_P Parameter: Plant Line Value: WS
  misc_feature: MA Experiment 20001557 PARAMETER Experiment Name: At_Drought_Soil_Dry_P Parameter: Post Timepoint (hr) Value: 3
  misc_feature: MA Experiment 20001557 PARAMETER Experiment Name: At_Drought_Soil_Dry_P Parameter: Post-Treatment Value: Re-Water vs. No Drought
  misc_feature: MA Experiment 20001557 PARAMETER Experiment Name: At_Drought_Soil_Dry_P Parameter: Timepoint (day) Value: 13
  misc_feature: MA Experiment 20001557 PARAMETER Experiment Name: At_Drought_Soil_Dry_P Parameter: Treatment Value: Drought vs. No Drought
acataagtctctctcttacattttgaaaccctaatttctcaaaataaatgtctgaagttgagtaccggtgctttgtcggcggccttgcctgggccaccaatgatgaagatcttcaaaggacgttctcacagttcggcgacgttatcgattctaagatcattaacgaccgcgagagtggaagatcaaggggattcggattcgtcaccttcaaggacgagaaagccatgagggatgcgattgaagagatgaacggtaaagagctcgatggacgtgtcatcaccgtgaacgaggctcagtcgagaggtagcggcggtgatggtgaaagttacggaggcggtggtggcggctggtaatcaaagatagagttgtttgcgtgctgctgctctgtttttggtttagatttggatttgtgtcaccacttctggtttggttatcgttcgtttggtttacttttttgatgaaacagtttcgtttaagtcttctttgtctggatcgaaatgttaattcgcgtgttgtttactaaatttataacgtttcctttt

SEQ ID NO: 37141 - protein, 101 aa, Arabidopsis thaliana
  peptide (1)..(101): Ceres Seq. ID no. 12395298
  misc_feature (8)..(79): Pfam Name: RNA recognition motif. (a.k.a. RRM, RBD, or RNP domain) Pfam Description: RNA recognition motif. (a.k.a. RRM, RBD, or RNP
  misc_feature (1)..(101): Homolog of NCBI NO: 2119042 NR Description: glycine-rich RNA-binding protein RGP-1a - wood
  misc_feature (1)..(101): Homolog of NCBI NO: 30692258 NR Description: glycine-rich RNA-binding protein 8 (GRP8) (CCR1)
  misc_feature (1)..(101): Homolog of NCBI NO: 2226370 NR Description: RNA-binding protein [Nicotiana glutinosa]
  misc_feature (3)..(101): Homolog of NCBI NO: 21553354 NR Description: glycine-rich RNA binding protein 7 [Arabidopsis
  misc_feature (3)..(101): Homolog of NCBI NO: 15226605 NR Description: glycine-rich RNA binding protein AtGRP7
  misc_feature (1)..(101): Homolog of NCBI NO: 544426 NR Description: Glycine-rich RNA-binding protein
  misc_feature (1)..(100): Homolog of NCBI NO: 544416 NR Description: Glycine-rich RNA-binding protein 10
  misc_feature (1)..(91): Homolog of NCBI NO: 30692256 NR Description: glycine-rich RNA-binding protein 8 (GRP8) (CCR1)
  misc_feature (1)..(101): Homolog of NCBI NO: 30692254 NR Description: glycine-rich RNA-binding protein 8 (GRP8) (CCR1)
  misc_feature (1)..(101): Homolog of NCBI NO: 15235002 NR Description: glycine-rich RNA-binding protein 8 (GRP8)
MSEVEYRCFVGGLAWATNDEDLQRTFSQFGDVIDSKIINDRESGRSRGFGFVTFKDEKAMRDAIEEMNGKELDGRVITVNEAQSRGSGGDGESYGGGGGGW

SEQ ID NO: 37142 - DNA, 885 bp, Arabidopsis thaliana
  misc_feature (1)..(885): Ceres Seq. ID no. 12420460
  misc_feature: MA Experiment ID: 108434 Result: Down-regulated in Transcription
  misc_feature: MA Experiment 108434 PARAMETER Experiment Name: At_Root_Tips_cDNA_P Parameter: Tissue Value: Root Tips
  misc_feature: MA Experiment ID: 108461 Result: Up-regulated in Transcription
  misc_feature: MA Experiment 108461 PARAMETER Experiment Name: At_Germinating_Seeds_cDNA_P Parameter: Age (day) Value: 1 vs. 0
  misc_feature: MA Experiment 108461 PARAMETER Experiment Name: At_Germinating_Seeds_cDNA_P Parameter: Tissue Value: Germinating Seeds
  misc_feature: MA Experiment ID: 108463 Result: Up-regulated in Transcription
  misc_feature: MA Experiment 108463 PARAMETER Experiment Name: At_Germinating_Seeds_cDNA_P Parameter: Age (day) Value: 3 vs. 0
  misc_feature: MA Experiment 108463 PARAMETER Experiment Name: At_Germinating_Seeds_cDNA_P Parameter: Tissue Value: Germinating Seeds
  misc_feature: MA Experiment ID: 108464 Result: Up-regulated in Transcription
  misc_feature: MA Experiment 108464 PARAMETER Experiment Name: At_Germinating_Seeds_cDNA_P Parameter: Age (day) Value: 4 vs. 0
  misc_feature: MA Experiment 108464 PARAMETER Experiment Name: At_Germinating_Seeds_cDNA_P Parameter: Tissue Value: Germinating Seeds
  misc_feature: MA Experiment ID: 108577 Result: Down-regulated in Transcription
  misc_feature: MA Experiment 108577 PARAMETER Experiment Name: At_42deg_Heat_cDNA_P Parameter: Temperature (deg C) Value: 42 vs. 22
  misc_feature: MA Experiment 108577 PARAMETER Experiment Name: At_42deg_Heat_cDNA_P Parameter: Timepoint (hr) Value: 6
  misc_feature: MA Experiment 108577 PARAMETER Experiment Name: At_42deg_Heat_cDNA_P Parameter: Tissue Value: Aerial
  misc_feature: MA Experiment ID: 108594 Result: Down-regulated in Transcription
  misc_feature: MA Experiment 108594 PARAMETER Experiment Name: At_Ler-rhl_Root_cDNA_P Parameter: Plant Line Value: null
  misc_feature: MA Experiment ID: 20000117 Result: Up-regulated in Transcription
  misc_feature: MA Experiment 20000117 PARAMETER Experiment Name: At_100uM_ABA_Mutants_cDNA_P Parameter: Plant Line Value: Columbia
  misc_feature: MA Experiment 20000117 PARAMETER Experiment Name: At_100uM_ABA_Mutants_cDNA_P Parameter: Timepoint (hr) Value: 6
  misc_feature: MA Experiment 20000117 PARAMETER Experiment Name: At_100uM_ABA_Mutants_cDNA_P Parameter: Tissue Value: Aerial
  misc_feature: MA Experiment 20000117 PARAMETER Experiment Name: At_100uM_ABA_Mutants_cDNA_P Parameter: Treatment Value: 100uM ABA vs. No Treatment
  misc_feature: MA Experiment ID: 20000173 Result: Down-regulated in Transcription
  misc_feature: MA Experiment 20000173 PARAMETER Experiment Name: At_42deg_Heat_P Parameter: Age (day) Value: 14
  misc_feature: MA Experiment 20000173 PARAMETER Experiment Name: At_42deg_Heat_P Parameter: Organism Value: A. thaliana
  misc_feature: MA Experiment 20000173 PARAMETER Experiment Name: At_42deg_Heat_P Parameter: Plant Line Value: WS
  misc_feature: MA Experiment 20000173 PARAMETER Experiment Name: At_42deg_Heat_P Parameter: Temperature (deg C) Value: 42 vs. 22
  misc_feature: MA Experiment 20000173 PARAMETER Experiment Name: At_42deg_Heat_P Parameter: Timepoint (hr) Value: 6
  misc_feature: MA Experiment 20000173 PARAMETER Experiment Name: At_42deg_Heat_P Parameter: Tissue Value: Aerial
  misc_feature: MA Experiment ID: 20000184 Result: Down-regulated in Transcription
  misc_feature: MA Experiment 20000184 PARAMETER Experiment Name: At_Shoots__P Parameter: Age (day) Value: 7
  misc_feature: MA Experiment 20000184 PARAMETER Experiment Name: At_Shoots__P Parameter: Tissue Value: Shoots vs. Whole Plant
  misc_feature: MA Experiment ID: 20000185 Result: Up-regulated in Transcription
  misc_feature: MA Experiment 20000185 PARAMETER Experiment Name: At_Roots__P Parameter: Age (day) Value: 7 vs. 21
  misc_feature: MA Experiment 20000185 PARAMETER Experiment Name: At_Roots__P Parameter: Organism Value: A. thaliana
  misc_feature: MA Experiment 20000185 PARAMETER Experiment Name: At_Roots__P Parameter: Tissue Value: Roots vs. Whole Plant
  misc_feature: MA Experiment ID: 20000439 Result: Up-regulated in Transcription
  misc_feature: MA Experiment 20000439 PARAMETER Experiment Name: At_Roots__P Parameter: Age (day) Value: 14 vs. 21
  misc_feature: MA Experiment 20000439 PARAMETER Experiment Name: At_Roots__P Parameter: Organism Value: A. thaliana
  misc_feature: MA Experiment 20000439 PARAMETER Experiment Name: At_Roots__P Parameter: Tissue Value: Roots vs. Whole Plant
  misc_feature: MA Experiment ID: 20001248 Result: Down-regulated in Transcription
  misc_feature: MA Experiment 20001248 PARAMETER Experiment Name: At_Far-red-induction_P Parameter: Age (day) Value: 7
  misc_feature: MA Experiment 20001248 PARAMETER Experiment Name: At_Far-red-induction_P Parameter: Light Value: Far-red vs. White
  misc_feature: MA Experiment 20001248 PARAMETER Experiment Name: At_Far-red-induction_P Parameter: Organism Value: A. thaliana
  misc_feature: MA Experiment 20001248 PARAMETER Experiment Name: At_Far-red-induction_P Parameter: Plant Line Value: Columbia
  misc_feature: MA Experiment 20001248 PARAMETER Experiment Name: At_Far-red-induction_P Parameter: Timepoint (hr) Value: 4
  misc_feature: MA Experiment 20001248 PARAMETER Experiment Name: At_Far-red-induction_P Parameter: Tissue Value: Whole Plant
  misc_feature: MA Experiment ID: 20001450 Result: Down-regulated in Transcription
  misc_feature: MA Experiment 20001450 PARAMETER Experiment Name: At_Far-red-induction_P Parameter: Age (day) Value: 7
  misc_feature: MA Experiment 20001450 PARAMETER Experiment Name: At_Far-red-induction_P Parameter: Light Value: Far-red vs. White
  misc_feature: MA Experiment 20001450 PARAMETER Experiment Name: At_Far-red-induction_P Parameter: Organism Value: A. thaliana
  misc_feature: MA Experiment 20001450 PARAMETER Experiment Name: At_Far-red-induction_P Parameter: Plant Line Value: Columbia
  misc_feature: MA Experiment 20001450 PARAMETER Experiment Name: At_Far-red-induction_P Parameter: Timepoint (hr) Value: 8
  misc_feature: MA Experiment 20001450 PARAMETER Experiment Name: At_Far-red-induction_P Parameter: Tissue Value: Whole Plant
  misc_feature: MA Experiment ID: 20001555 Result: Up-regulated in Transcription
  misc_feature: MA Experiment 20001555 PARAMETER Experiment Name: At_Drought_Soil_Dry_P Parameter: Age (day) Value: 24
  misc_feature: MA Experiment 20001555 PARAMETER Experiment Name: At_Drought_Soil_Dry_P Parameter: Organism Value: A. thaliana
  misc_feature: MA Experiment 20001555 PARAMETER Experiment Name: At_Drought_Soil_Dry_P Parameter: Plant Line Value: WS
  misc_feature: MA Experiment 20001555 PARAMETER Experiment Name: At_Drought_Soil_Dry_P Parameter: Post Timepoint (hr) Value: None
  misc_feature: MA Experiment 20001555 PARAMETER Experiment Name: At_Drought_Soil_Dry_P Parameter: Post-Treatment Value: None
  misc_feature: MA Experiment 20001555 PARAMETER Experiment Name: At_Drought_Soil_Dry_P Parameter: Timepoint (day) Value: 10
  misc_feature: MA Experiment 20001555 PARAMETER Experiment Name: At_Drought_Soil_Dry_P Parameter: Treatment Value: Drought vs. No Drought
aaaacgaactagagacagtttgattcgaaaatcttgtcggaaaatggaggatatcgtcgaccaagaattaagcaattactgggaacctagctccttgctccaaaacgaatacttcgaatacgacagctggcctttggaagaagccatttctgggtcgtatgattcgagttcgccggatggagctgcttcgtcgccggcttctaagaatattgtgtcggagagaaacagaagacagaaacttaaccagagactcttcgctcttcgatcagttgttcccaatatcactaagatggataaagcctcaataatcaaagatgctattagttacatagaaggattacaatatgaagaaaagaagctcgaagctgagatcagagaacttgaatctacaccaaagagtagccttagtttcagcaaagattttgatcgtgatttacttgttcctgtcacatccaagaagatgaagcagcttgattctggttcttccacttctctcatcgaagttctcgaattgaaggtaacattcatgggagagaggacaatggtggtgagtgtaacatgtaataagaggacagatacaatggtgaaactgtgtgaagtctttgagtcattgaatctcaaaatcctcacttccaatctcacctctttctctggcatgatcttccacactgtctttattgaggcggatgaagaagaacaagaggtgttgcggttaaaaatagaaacaggaataggagcttataatgaaactcaaagccctactttgagcatcgactctctttactaataatactttttttcttccttttttggttcattttggcttctctctttacaataatgtatgtctctcttttcatttttatgatctcctacgtttgtttg

SEQ ID NO: 37143 - protein, 261 aa, Arabidopsis thaliana
  peptide (1)..(261): Ceres Seq. ID no. 12420461
  misc_feature (67)..(114): Pfam Name: Helix-loop-helix DNA-binding domain Pfam Description: Helix-loop-helix DNA-binding domain
  misc_feature (67)..(240): Homolog of NCBI NO: 23600383 NR Description: bHLH transcriptional regulator [Lycopersicon
  misc_feature (60)..(134): Homolog of NCBI NO: 29466635 NR Description: Transcription Factor [Oryza sativa]
  misc_feature (131)..(257): Homolog of NCBI NO: 29466635 NR Description: Transcription Factor [Oryza sativa]
  misc_feature (151)..(227): Homolog of NCBI NO: 7486225 NR Description: hypothetical protein F27B13.170 - Arabidopsis
  misc_feature (15)..(171): Homolog of NCBI NO: 7486225 NR Description: hypothetical protein F27B13.170 - Arabidopsis
  misc_feature (15)..(249): Homolog of NCBI NO: 30688496 NR Description: bHLH protein family [Arabidopsis thaliana]
  misc_feature (15)..(227): Homolog of NCBI NO: 16604348 NR Description: AT5g57150/MUL3_10 [Arabidopsis thaliana]
  misc_feature (15)..(227): Homolog of NCBI NO: 8843817 NR Description: contains similarity to unknown
  misc_feature (15)..(261): Homolog of NCBI NO: 18423944 NR Description: bHLH protein; protein id: At5g57150.1, supported
  misc_feature (15)..(261): Homolog of NCBI NO: 21554896 NR Description: unknown [Arabidopsis thaliana]
KRTRDSLIRKSCRKMEDIVDQELSNYWEPSSLLQNEYFEYDSWPLEEAISGSYDSSSPDGAASSPASKNIVSERNRRQKLNQRLFALRSVVPNITKMDKASIIKDAISYIEGLQYEEKKLEAEIRELESTPKSSLSFSKDFDRDLLVPVTSKKMKQLDSGSSTSLIEVLELKVTFMGERTMVVSVTCNKRTDTMVKLCEVFESLNLKILTSNLTSFSGMIFHTVFIEADEEEQEVLRLKIETGIGAYNETQSPTLSIDSLY

SEQ ID NO: 37144 - protein, 247 aa, Arabidopsis thaliana
  peptide (1)..(247): Ceres Seq. ID no. 12420462
  misc_feature (53)..(100): Pfam Name: Helix-loop-helix DNA-binding domain Pfam Description: Helix-loop-helix DNA-binding domain
  misc_feature (53)..(226): Homolog of NCBI NO: 23600383 NR Description: bHLH transcriptional regulator [Lycopersicon
  misc_feature (46)..(120): Homolog of NCBI NO: 29466635 NR Description: Transcription Factor [Oryza sativa]
  misc_feature (117)..(243): Homolog of NCBI NO: 29466635 NR Description: Transcription Factor [Oryza sativa]
  misc_feature (137)..(213): Homolog of NCBI NO: 7486225 NR Description: hypothetical protein F27B13.170 - Arabidopsis
  misc_feature (1)..(157): Homolog of NCBI NO: 7486225 NR Description: hypothetical protein F27B13.170 - Arabidopsis
  misc_feature (1)..(235): Homolog of NCBI NO: 30688496 NR Description: bHLH protein family [Arabidopsis thaliana]
  misc_feature (1)..(213): Homolog of NCBI NO: 16604348 NR Description: AT5g57150/MUL3_10 [Arabidopsis thaliana]
  misc_feature (1)..(213): Homolog of NCBI NO: 8843817 NR Description: contains similarity to unknown
  misc_feature (1)..(247): Homolog of NCBI NO: 18423944 NR Description: bHLH protein; protein id: At5g57150.1, supported
  misc_feature (1)..(247): Homolog of NCBI NO: 21554896 NR Description: unknown [Arabidopsis thaliana]
MEDIVDQELSNYWEPSSLLQNEYFEYDSWPLEEAISGSYDSSSPDGAASSPASKNIVSERNRRQKLNQRLFALRSVVPNITKMDKASIIKDAISYIEGLQYEEKKLEAEIRELESTPKSSLSFSKDFDRDLLVPVTSKKMKQLDSGSSTSLIEVLELKVTFMGERTMVVSVTCNKRTDTMVKLCEVFESLNLKILTSNLTSFSGMIFHTVFIEADEEEQEVLRLKIETGIGAYNETQSPTLSIDSLY

SEQ ID NO: 37145 - protein, 165 aa, Arabidopsis thaliana
  peptide (1)..(165): Ceres Seq. ID no. 12420463
  misc_feature (1)..(144): Homolog of NCBI NO: 23600383 NR Description: bHLH transcriptional regulator [Lycopersicon
  misc_feature (1)..(38): Homolog of NCBI NO: 29466635 NR Description: Transcription Factor [Oryza sativa]
  misc_feature (35)..(161): Homolog of NCBI NO: 29466635 NR Description: Transcription Factor [Oryza sativa]
  misc_feature (55)..(131): Homolog of NCBI NO: 7486225 NR Description: hypothetical protein F27B13.170 - Arabidopsis
  misc_feature (1)..(75): Homolog of NCBI NO: 7486225 NR Description: hypothetical protein F27B13.170 - Arabidopsis
  misc_feature (1)..(153): Homolog of NCBI NO: 30688496 NR Description: bHLH protein family [Arabidopsis thaliana]
  misc_feature (1)..(131): Homolog of NCBI NO: 16604348 NR Description: AT5g57150/MUL3_10 [Arabidopsis thaliana]
  misc_feature (1)..(131): Homolog of NCBI NO: 8843817 NR Description: contains similarity to unknown
  misc_feature (1)..(165): Homolog of NCBI NO: 18423944 NR Description: bHLH protein; protein id: At5g57150.1, supported
  misc_feature (1)..(165): Homolog of NCBI NO: 21554896 NR Description: unknown [Arabidopsis thaliana]
MDKASIIKDAISYIEGLQYEEKKLEAEIRELESTPKSSLSFSKDFDRDLLVPVTSKKMKQLDSGSSTSLIEVLELKVTFMGERTMVVSVTCNKRTDTMVKLCEVFESLNLKILTSNLTSFSGMIFHTVFIEADEEEQEVLRLKIETGIGAYNETQSPTLSIDSLY

SEQ ID NO: 37146 - DNA, 2709 bp, Arabidopsis thaliana
  misc_feature (1)..(2709): Ceres Seq. ID no. 13591434
  misc_feature: MA Experiment ID: 20000184 Result: Down-regulated in Transcription
  misc_feature: MA Experiment 20000184 PARAMETER Experiment Name: At_Shoots__P Parameter: Age (day) Value: 7
  misc_feature: MA Experiment 20000184 PARAMETER Experiment Name: At_Shoots__P Parameter: Tissue Value: Shoots vs. Whole Plant
atggcttatgctcatgttttcgcttcgttgactatctcgacgatttctctccgacgattcctcccccgacttcatcgaaaccacagcgtaaaacccaattcccgaatcatatgcaatctgaaactaaactactctgctggaaaatttcgcgagatgggactatcacgttccgtggagctagaccaattcatcacaagcgaggaggaagaaggagaagcagaggagataggagaaggatttttcgaagcgattgaggaactagagaggatgactagagaaccatcagatatactcgaagagatgaatcatcgattatcttctagagaattgcaattgatgcttgtttacttcgcacaagaaggtagagattcatggtgtactttagaagtgtttgaatggttgaaaaaggagaatagagttgatgaagagataatggagttaatggtttcgattatgtgtggttgggttaagaaattgattgaagatgaatgtaatgcacaccaagtgttcgacttattgattgagatggattgtgttggtttaaaacctggttttagtatgatggacaaagttattgctttgtattgtgagatggggaagaaagaaagtgcggttttgtttgtcaaggaggttttaagaaggagagatggttttggttatagtgttgttggtggtggtggttctgaaggtagaaaaggtggacctgttgggtatcttgcttggaaatttatggttgatggagattataggaaggcagttgatatggttatggagttaagactttcagggctgaaaccagaagcgtacagctatcttattgcgatgacagctatagtgaaagagctgaatagtcttggaaagacattacgcgagttgaaacgctttgcacgggctggttttgttgctgagattgatgatcacgatagggtactcattgagaagtatcaatcagaaacattatctcgtggactgcagttagcaacttgggcggttgaggaaggccaagaaaatgattccattattggggtggtccatgagaggctactcgctatgtatatatgtgcgggacgtggaccagaagcagagaaacagctctggaagatgaaacttgcagggagagaacctgaagctgacctccacgacattgttatggcgatctgcgcttcacagaaagaggttaatgcagtttctcggctactgacacgagttgagttcatgggatctcagagaaagaagaagactctgtcatggttgctcagagggtatgtgaaaggagggcacttcgaagaggctgcagagacattggtatcgatgatcgactctgggttgcatccggagtatattgatcgagtggctgtgatgcaaggaatgacaaggaagatccaacggccgagagatgttgaagcatatatgagtctgtgcaagaggctctttgacgctggtttgcccaaaacaaaccttaatgacttgaggacatctgtttcctcgtacgtatttctgaaattaagtgaatctgaaggtgaaagcaaagccggaggaagaaataagaatcacagaggtaaaattgtgatggagctcgaagatccaacaatggcagattccacgattaagctaacagtcaaattcggaggcaaatcaataccactttcggtatcaccagattgtacagtcaaagatcttaagtctcagttacaaccaatcaccaacgttcttcctcgtggccagaagctcatcttcaaaggtaaggttttggttgaaacgtcgactttgaaacaatctgatgtgggaagtggagctaaactcatgttaatggcttctcaaggtctgcatcaaggggaaggtccaatacttaaggaagctagtataaggccaatctctagaactgttgtatctgataaagtagatcagagaaagcctagtgtacttgtagacaagaaccgcactgatcgatggaaagccacaggagttattgctttagctcaagccaatttgaaggaaatacctgaagaagtgtgggactgtggatctggagtcagagtacttgacattagtgaaaacttcattaaagaagtacctgccaaaatcagctcctttggttctatgcagaaattgttccttcaaggaaatggtctgtccgatgaatccattcaatgggaagggatagcatctctgaagcgcctgatgcttctgtccattagccataacaatctaactgttctgccatcagcaatgggttcactgacgtctcttagacagcttgatgtcaccaacaacaagttgacaagtctaccgaatgagttaggacttctgacgcagcttgagattttgaaagccaacaacaacagaataactagtcttcctgagagtatcggaaactgttcattcctcatggaggttgatctttcagctaatattatatcagaacttcccgagacattcaccaaactgcgtaatctaaagtgtttcggtattcagacgctggagctgaataacacgggattgaagacgctgccatcggctttatttaagatgtgtttgcagctctcaactttaggtctccacaacacagagataaccgttgaatttctccgccagttcgagggatatgatgattttgatgaaagaagacgtaccaagcatcaaaagcagcttgattttcgtgttgtgggatctggccaattcgacgaaggcgctgataaatcttggtga

SEQ ID NO: 37147 - protein, 902 aa, Arabidopsis thaliana
  peptide (1)..(902): Ceres Seq. ID no. 13591435
  misc_feature (536)..(608): Pfam Name: Ubiquitin family Pfam Description: Ubiquitin family
  misc_feature (536)..(608): Pfam Name: Ubiquitin family Pfam Description: Ubiquitin family
  misc_feature (657)..(853): Homolog of NCBI NO: 20071327 NR Description: Shoc2 protein [Mus musculus]
  misc_feature (677)..(868): Homolog of NCBI NO: 23124578 NR Description: hypothetical protein [Nostoc punctiforme]
  misc_feature (678)..(859): Homolog of NCBI NO: 24215148 NR Description: putative outermembrane protein
  misc_feature (657)..(853): Homolog of NCBI NO: 40788390 NR Description: KIAA0862 protein [Homo sapiens]
  misc_feature (657)..(853): Homolog of NCBI NO: 14423936 NR Description: Leucine-rich repeat protein SHOC-2 (Ras-binding
  misc_feature (657)..(853): Homolog of NCBI NO: 20071327 NR Description: Shoc2 protein [Mus musculus]
  misc_feature (678)..(859): Homolog of NCBI NO: 24215148 NR Description: putative outermembrane protein
  misc_feature (657)..(853): Homolog of NCBI NO: 14423936 NR Description: Leucine-rich repeat protein SHOC-2 (Ras-binding
  misc_feature (524)..(902): Homolog of NCBI NO: 37534990 NR Description: putative leucine-rich repeat protein
  misc_feature (646)..(900): Homolog of NCBI NO: 22326653 NR Description: leucine rich repeat protein family [Arabidopsis
  misc_feature (646)..(898): Homolog of NCBI NO: 11357392 NR Description: hypothetical protein F13G24.110 - Arabidopsis
  misc_feature (663)..(874): Homolog of NCBI NO: 19074817 NR Description: LEUCINE-RICH RAS SUPPRESSOR PROTEIN
  misc_feature (657)..(853): Homolog of NCBI NO: 6677945 NR Description: soc-2 suppressor of clear homolog
  misc_feature (657)..(853): Homolog of NCBI NO: 40788390 NR Description: KIAA0862 protein [Homo sapiens]
  misc_feature (677)..(868): Homolog of NCBI NO: 23124578 NR Description: hypothetical protein [Nostoc punctiforme]
  misc_feature (657)..(853): Homolog of NCBI NO: 6677945 NR Description: soc-2 suppressor of clear homolog
  misc_feature (663)..(874): Homolog of NCBI NO: 19074817 NR Description: LEUCINE-RICH RAS SUPPRESSOR PROTEIN
  misc_feature (646)..(898): Homolog of NCBI NO: 11357392 NR Description: hypothetical protein F13G24.110 - Arabidopsis
  misc_feature (646)..(900): Homolog of NCBI NO: 22326653 NR Description: leucine rich repeat protein family [Arabidopsis
  misc_feature (524)..(902): Homolog of NCBI NO: 37534990 NR Description: putative leucine-rich repeat protein
MAYAHVFASLTISTISLRRFLPRLHRNHSVKPNSRIICNLKLNYSAGKFREMGLSRSVELDQFITSEEEEGEAEEIGEGFFEAIEELERMTREPSDILEEMNHRLSSRELQLMLVYFAQEGRDSWCTLEVFEWLKKENRVDEEIMELMVSIMCGWVKKLIEDECNAHQVFDLLIEMDCVGLKPGFSMMDKVIALYCEMGKKESAVLFVKEVLRRRDGFGYSVVGGGGSEGRKGGPVGYLAWKFMVDGDYRKAVDMVMELRLSGLKPEAYSYLIAMTAIVKELNSLGKTLRELKRFARAGFVAEIDDHDRVLIEKYQSETLSRGLQLATWAVEEGQENDSIIGVVHERLLAMYICAGRGPEAEKQLWKMKLAGREPEADLHDIVMAICASQKEVNAVSRLLTRVEFMGSQRKKKTLSWLLRGYVKGGHFEEAAETLVSMIDSGLHPEYIDRVAVMQGMTRKIQRPRDVEAYMSLCKRLFDAGLPKTNLNDLRTSVSSYVFLKLSESEGESKAGGRNKNHRGKIVMELEDPTMADSTIKLTVKFGGKSIPLSVSPDCTVKDLKSQLQPITNVLPRGQKLIFKGKVLVETSTLKQSDVGSGAKLMLMASQGLHQGEGPILKEASIRPISRTVVSDKVDQRKPSVLVDKNRTDRWKATGVIALAQANLKEIPEEVWDCGSGVRVLDISENFIKEVPAKISSFGSMQKLFLQGNGLSDESIQWEGIASLKRLMLLSISHNNLTVLPSAMGSLTSLRQLDVTNNKLTSLPNELGLLTQLEILKANNNRITSLPESIGNCSFLMEVDLSANIISELPETFTKLRNLKCFGIQTLELNNTGLKTLPSALFKMCLQLSTLGLHNTEITVEFLRQFEGYDDFDERRRTKHQKQLDFRVVGSGQFDEGADKSW

SEQ ID NO: 37148 - protein, 851 aa, Arabidopsis thaliana
  peptide (1)..(851): Ceres Seq. ID no. 13591436
  misc_feature (485)..(557): Pfam Name: Ubiquitin family Pfam Description: Ubiquitin family
  misc_feature (485)..(557): Pfam Name: Ubiquitin family Pfam Description: Ubiquitin family
  misc_feature (606)..(802): Homolog of NCBI NO: 20071327 NR Description: Shoc2 protein [Mus musculus]
  misc_feature (626)..(817): Homolog of NCBI NO: 23124578 NR Description: hypothetical protein [Nostoc punctiforme]
  misc_feature (627)..(808): Homolog of NCBI NO: 24215148 NR Description: putative outermembrane protein
  misc_feature (606)..(802): Homolog of NCBI NO: 40788390 NR Description: KIAA0862 protein [Homo sapiens]
  misc_feature (606)..(802): Homolog of NCBI NO: 14423936 NR Description: Leucine-rich repeat protein SHOC-2 (Ras-binding
  misc_feature (606)..(802): Homolog of NCBI NO: 20071327 NR Description: Shoc2 protein [Mus musculus]
  misc_feature (627)..(808): Homolog of NCBI NO: 24215148 NR Description: putative outermembrane protein
  misc_feature (606)..(802): Homolog of NCBI NO: 14423936 NR Description: Leucine-rich repeat protein SHOC-2 (Ras-binding
  misc_feature (473)..(851): Homolog of NCBI NO: 37534990 NR Description: putative leucine-rich repeat protein
  misc_feature (595)..(849): Homolog of NCBI NO: 22326653 NR Description: leucine rich repeat protein family [Arabidopsis
  misc_feature (595)..(847): Homolog of NCBI NO: 11357392 NR Description: hypothetical protein F13G24.110 - Arabidopsis
  misc_feature (612)..(823): Homolog of NCBI NO: 19074817 NR Description: LEUCINE-RICH RAS SUPPRESSOR PROTEIN
  misc_feature (606)..(802): Homolog of NCBI NO: 6677945 NR Description: soc-2 suppressor of clear homolog
  misc_feature (606)..(802): Homolog of NCBI NO: 40788390 NR Description: KIAA0862 protein [Homo sapiens]
  misc_feature (626)..(817): Homolog of NCBI NO: 23124578 NR Description: hypothetical protein [Nostoc punctiforme]
  misc_feature (606)..(802): Homolog of NCBI NO: 6677945 NR Description: soc-2 suppressor of clear homolog
  misc_feature (612)..(823): Homolog of NCBI NO: 19074817 NR Description: LEUCINE-RICH RAS SUPPRESSOR PROTEIN
  misc_feature (595)..(847): Homolog of NCBI NO: 11357392 NR Description: hypothetical protein F13G24.110 - Arabidopsis
  misc_feature (595)..(849): Homolog of NCBI NO: 22326653 NR Description: leucine rich repeat protein family [Arabidopsis
  misc_feature (473)..(851): Homolog of NCBI NO: 37534990 NR Description: putative leucine-rich repeat protein
MGLSRSVELDQFITSEEEEGEAEEIGEGFFEAIEELERMTREPSDILEEMNHRLSSRELQLMLVYFAQEGRDSWCTLEVFEWLKKENRVDEEIMELMVSIMCGWVKKLIEDECNAHQVFDLLIEMDCVGLKPGFSMMDKVIALYCEMGKKESAVLFVKEVLRRRDGFGYSVVGGGGSEGRKGGPVGYLAWKFMVDGDYRKAVDMVMELRLSGLKPEAYSYLIAMTAIVKELNSLGKTLRELKRFARAGFVAEIDDHDRVLIEKYQSETLSRGLQLATWAVEEGQENDSIIGVVHERLLAMYICAGRGPEAEKQLWKMKLAGREPEADLHDIVMAICASQKEVNAVSRLLTRVEFMGSQRKKKTLSWLLRGYVKGGHFEEAAETLVSMIDSGLHPEYIDRVAVMQGMTRKIQRPRDVEAYMSLCKRLFDAGLPKTNLNDLRTSVSSYVFLKLSESEGESKAGGRNKNHRGKIVMELEDPTMADSTIKLTVKFGGKSIPLSVSPDCTVKDLKSQLQPITNVLPRGQKLIFKGKVLVETSTLKQSDVGSGAKLMLMASQGLHQGEGPILKEASIRPISRTVVSDKVDQRKPSVLVDKNRTDRWKATGVIALAQANLKEIPEEVWDCGSGVRVLDISENFIKEVPAKISSFGSMQKLFLQGNGLSDESIQWEGIASLKRLMLLSISHNNLTVLPSAMGSLTSLRQLDVTNNKLTSLPNELGLLTQLEILKANNNRITSLPESIGNCSFLMEVDLSANIISELPETFTKLRNLKCFGIQTLELNNTGLKTLPSALFKMCLQLSTLGLHNTEITVEFLRQFEGYDDFDERRRTKHQKQLDFRVVGSGQFDEGADKSW

SEQ ID NO: 37149 - protein, 813 aa, Arabidopsis thaliana
  peptide (1)..(813): Ceres Seq. ID no. 13591437
  misc_feature (447)..(519): Pfam Name: Ubiquitin family Pfam Description: Ubiquitin family
  misc_feature (447)..(519): Pfam Name: Ubiquitin family Pfam Description: Ubiquitin family
  misc_feature (568)..(764): Homolog of NCBI NO: 20071327 NR Description: Shoc2 protein [Mus musculus]
  misc_feature (588)..(779): Homolog of NCBI NO: 23124578 NR Description: hypothetical protein [Nostoc punctiforme]
  misc_feature (589)..(770): Homolog of NCBI NO: 24215148 NR Description: putative outermembrane protein
  misc_feature (568)..(764): Homolog of NCBI NO: 40788390 NR Description: KIAA0862 protein [Homo sapiens]
  misc_feature (568)..(764): Homolog of NCBI NO: 14423936 NR Description: Leucine-rich repeat protein SHOC-2 (Ras-binding
  misc_feature (568)..(764): Homolog of NCBI NO: 20071327 NR Description: Shoc2 protein [Mus musculus]
  misc_feature (589)..(770): Homolog of NCBI NO: 24215148 NR Description: putative outermembrane protein
  misc_feature (568)..(764): Homolog of NCBI NO: 14423936 NR Description: Leucine-rich repeat protein SHOC-2 (Ras-binding
  misc_feature (435)..(813): Homolog of NCBI NO: 37534990 NR Description: putative leucine-rich repeat protein
  misc_feature (557)..(811): Homolog of NCBI NO: 22326653 NR Description: leucine rich repeat protein family [Arabidopsis
  misc_feature (557)..(809): Homolog of NCBI NO: 11357392 NR Description: hypothetical protein F13G24.110 - Arabidopsis
  misc_feature (574)..(785): Homolog of NCBI NO: 19074817 NR Description: LEUCINE-RICH RAS SUPPRESSOR PROTEIN
  misc_feature (568)..(764): Homolog of NCBI NO: 6677945 NR Description: soc-2 suppressor of clear homolog
  misc_feature (568)..(764): Homolog of NCBI NO: 40788390 NR Description: KIAA0862 protein [Homo sapiens]
  misc_feature (588)..(779): Homolog of NCBI NO: 23124578 NR Description: hypothetical protein [Nostoc punctiforme]
  misc_feature (568)..(764): Homolog of NCBI NO: 6677945 NR Description: soc-2 suppressor of clear homolog
  misc_feature (574)..(785): Homolog of NCBI NO: 19074817 NR Description: LEUCINE-RICH RAS SUPPRESSOR PROTEIN
  misc_feature (557)..(809): Homolog of NCBI NO: 11357392 NR Description: hypothetical protein F13G24.110 - Arabidopsis
  misc_feature (557)..(811): Homolog of NCBI NO: 22326653 NR Description: leucine rich repeat protein family [Arabidopsis
  misc_feature (435)..(813): Homolog of NCBI NO: 37534990 NR Description: putative leucine-rich repeat protein
MTREPSDILEEMNHRLSSRELQLMLVYFAQEGRDSWCTLEVFEWLKKENRVDEEIMELMVSIMCGWVKKLIEDECNAHQVFDLLIEMDCVGLKPGFSMMDKVIALYCEMGKKESAVLFVKEVLRRRDGFGYSVVGGGGSEGRKGGPVGYLAWKFMVDGDYRKAVDMVMELRLSGLKPEAYSYLIAMTAIVKELNSLGKTLRELKRFARAGFVAEIDDHDRVLIEKYQSETLSRGLQLATWAVEEGQENDSIIGVVHERLLAMYICAGRGPEAEKQLWKMKLAGREPEADLHDIVMAICASQKEVNAVSRLLTRVEFMGSQRKKKTLSWLLRGYVKGGHFEEAAETLVSMIDSGLHPEYIDRVAVMQGMTRKIQRPRDVEAYMSLCKRLFDAGLPKTNLNDLRTSVSSYVFLKLSESEGESKAGGRNKNHRGKIVMELEDPTMADSTIKLTVKFGGKSIPLSVSPDCTVKDLKSQLQPITNVLPRGQKLIFKGKVLVETSTLKQSDVGSGAKLMLMASQGLHQGEGPILKEASIRPISRTVVSDKVDQRKPSVLVDKNRTDRWKATGVIALAQANLKEIPEEVWDCGSGVRVLDISENFIKEVPAKISSFGSMQKLFLQGNGLSDESIQWEGIASLKRLMLLSISHNNLTVLPSAMGSLTSLRQLDVTNNKLTSLPNELGLLTQLEILKANNNRITSLPESIGNCSFLMEVDLSANIISELPETFTKLRNLKCFGIQTLELNNTGLKTLPSALFKMCLQLSTLGLHNTEITVEFLRQFEGYDDFDERRRTKHQKQLDFRVVGSGQFDEGADKSW

SEQ ID NO: 37150 - DNA, 1057 bp, Arabidopsis thaliana
  misc_feature (1)..(1057): Ceres Seq. ID no. 12336423
  misc_feature: MA Experiment ID: 108462 Result: Up-regulated in Transcription
  misc_feature: MA Experiment 108462 PARAMETER Experiment Name: At_Germinating_Seeds_cDNA_P Parameter: Age (day) Value: 2 vs. 0
  misc_feature: MA Experiment 108462 PARAMETER Experiment Name: At_Germinating_Seeds_cDNA_P Parameter: Tissue Value: Germinating Seeds
  misc_feature: MA Experiment ID: 108463 Result: Up-regulated in Transcription
  misc_feature: MA Experiment 108463 PARAMETER Experiment Name: At_Germinating_Seeds_cDNA_P Parameter: Age (day) Value: 3 vs. 0
  misc_feature: MA Experiment 108463 PARAMETER Experiment Name: At_Germinating_Seeds_cDNA_P Parameter: Tissue Value: Germinating Seeds
  misc_feature: MA Experiment ID: 20000185 Result: Up-regulated in Transcription
  misc_feature: MA Experiment 20000185 PARAMETER Experiment Name: At_Roots__P Parameter: Age (day) Value: 7 vs. 21
  misc_feature: MA Experiment 20000185 PARAMETER Experiment Name: At_Roots__P Parameter: Organism Value: A. thaliana
  misc_feature: MA Experiment 20000185 PARAMETER Experiment Name: At_Roots__P Parameter: Tissue Value: Roots vs. Whole Plant
  misc_feature: MA Experiment ID: 20000267 Result: Up-regulated in Transcription
  misc_feature: MA Experiment 20000267 PARAMETER Experiment Name: At_Drought_P Parameter: Age (day) Value: 7
  misc_feature: MA Experiment 20000267 PARAMETER Experiment Name: At_Drought_P Parameter: Organism Value: A. thaliana
  misc_feature: MA Experiment 20000267 PARAMETER Experiment Name: At_Drought_P Parameter: Plant Line Value: WS
  misc_feature: MA Experiment 20000267 PARAMETER Experiment Name: At_Drought_P Parameter: Timepoint (hr) Value: 6
  misc_feature: MA Experiment 20000267 PARAMETER Experiment Name: At_Drought_P Parameter: Tissue Value: Whole Plant
  misc_feature: MA Experiment 20000267 PARAMETER Experiment Name: At_Drought_P Parameter: Treatment Value: Drought vs. No Drought
  misc_feature: MA Experiment ID: 20000439 Result: Up-regulated in Transcription
  misc_feature: MA Experiment 20000439 PARAMETER Experiment Name: At_Roots__P Parameter: Age (day) Value: 14 vs. 21
  misc_feature: MA Experiment 20000439 PARAMETER Experiment Name: At_Roots__P Parameter: Organism Value: A. thaliana
  misc_feature: MA Experiment 20000439 PARAMETER Experiment Name: At_Roots__P Parameter: Tissue Value: Roots vs. Whole Plant
aagctttcttcttgttcctacatacccatcttccctcacctacatcaaacctagggtttcttaactatatcaacaacatatataaatttatatataggttgtgatttattgaagatcataaagatcaaaaggagagaggtattaaaaaatgatgtgtagtcgaggccattggagacctgcagaagacgagaagctaagagaactcgtcgaacaatttggtcctcataattggaacgccatagctcagaagctctctggtcgatctggtaagagttgtagattgagatggtttaatcaattggatcctaggattaaccgaaaccctttcacggaggaagaagaagaaaggcttttagcgtctcatcggatccatgggaacagatggtccgtgatcgctagattttttcccggtcgaactgataacgctgttaaaaaccattggcacgtcatcatggctcgtcgtggccgagaacggtccaagctccgtccacgaggccttggccatgatggcacggtggctgcgactgggatgattggtaattataaagactgcgataaggagagaagattggcaaccacaaccgctatcaattttccttatcaattctctcatattaatcattttcaagtcctcaaagagttcttgaccgtaaagatcgggttcagaaatagtactactccaatacaagaaggagcaatagaccaaactaaacgaccgatggagttctacaattttcttcaagtaaacacggattcgaagatacacgaattgatagataattcaagaaaagacgaagaagaagatgtcgatcaaaacaaccgaattcctaacgagaattgtgttccatttttcgactttttgtctgttggaaactctgcctctcagggtttatgttaatttgtccgtaccacatgtactataaggtggaccatatgttaattaaagataatgtagaaagtactaatcaattagagctcttgtttgagccaaatgtgaaaattagttaagccatcccaaacatgttcttgtataacaaatataaggttgtacttttcc

SEQ ID NO: 37151 - protein, 249 aa, Arabidopsis thaliana
  peptide (1)..(249): Ceres Seq. ID no. 12336424
  misc_feature (5)..(51): Pfam Name: Myb-like DNA-binding domain Pfam Description: Myb-like DNA-binding domain
  misc_feature (2)..(110): Homolog of NCBI NO: 34903242 NR Description: unnamed protein product [Oryza sativa (japonica
  misc_feature (3)..(115): Homolog of NCBI NO: 6979341 NR Description: myb-like protein [Oryza sativa]
  misc_feature (2)..(127): Homolog of NCBI NO: 21321780 NR Description: putative Myb/Myb-related protein
  misc_feature (2)..(115): Homolog of NCBI NO: 31980093 NR Description: MYB transcription factor R2R3 type
  misc_feature (1)..(245): Homolog of NCBI NO: 11358543 NR Description: myb-related transcription factor MYB54
  misc_feature (1)..(245): Homolog of NCBI NO: 15219462 NR Description: myb family transcription factor(MYB54)
  misc_feature (1)..(249): Homolog of NCBI NO: 11358541 NR Description: myb-related transcription factor MYB52
  misc_feature (2)..(249): Homolog of NCBI NO: 25513679 NR Description: F2H15.17 protein - Arabidopsis thaliana
  misc_feature (1)..(249): Homolog of NCBI NO: 15220910 NR Description: myb family trnscription factor
  misc_feature (1)..(249): Homolog of NCBI NO: 21554916 NR Description: myb-like protein, putative [Arabidopsis thaliana]
MMCSRGHWRPAEDEKLRELVEQFGPHNWNAIAQKLSGRSGKSCRLRWFNQLDPRINRNPFTEEEEERLLASHRIHGNRWSVIARFFPGRTDNAVKNHWHVIMARRGRERSKLRPRGLGHDGTVAATGMIGNYKDCDKERRLATTTAINFPYQFSHINHFQVLKEFLTVKIGFRNSTTPIQEGAIDQTKRPMEFYNFLQVNTDSKIHELIDNSRKDEEEDVDQNNRIPNENCVPFFDFLSVGNSASQGLC

SEQ ID NO: 37152 - protein, 248 aa, Arabidopsis thaliana
  peptide (1)..(248): Ceres Seq. ID no. 12336425
  misc_feature (4)..(50): Pfam Name: Myb-like DNA-binding domain Pfam Description: Myb-like DNA-binding domain
  misc_feature (1)..(109): Homolog of NCBI NO: 34903242 NR Description: unnamed protein product [Oryza sativa (japonica
  misc_feature (2)..(114): Homolog of NCBI NO: 6979341 NR Description: myb-like protein [Oryza sativa]
  misc_feature (1)..(126): Homolog of NCBI NO: 21321780 NR Description: putative Myb/Myb-related protein
  misc_feature (1)..(114): Homolog of NCBI NO: 31980093 NR Description: MYB transcription factor R2R3 type
  misc_feature (1)..(244): Homolog of NCBI NO: 11358543 NR Description: myb-related transcription factor MYB54
  misc_feature (1)..(244): Homolog of NCBI NO: 15219462 NR Description: myb family transcription factor(MYB54)
  misc_feature (1)..(248): Homolog of NCBI NO: 11358541 NR Description: myb-related transcription factor MYB52
  misc_feature (1)..(248): Homolog of NCBI NO: 25513679 NR Description: F2H15.17 protein - Arabidopsis thaliana
  misc_feature (1)..(248): Homolog of NCBI NO: 15220910 NR Description: myb family trnscription factor
  misc_feature (1)..(248): Homolog of NCBI NO: 21554916 NR Description: myb-like protein, putative [Arabidopsis thaliana]
MCSRGHWRPAEDEKLRELVEQFGPHNWNAIAQKLSGRSGKSCRLRWFNQLDPRINRNPFTEEEEERLLASHRIHGNRWSVIARFFPGRTDNAVKNHWHVIMARRGRERSKLRPRGLGHDGTVAATGMIGNYKDCDKERRLATTTAINFPYQFSHINHFQVLKEFLTVKIGFRNSTTPIQEGAIDQTKRPMEFYNFLQVNTDSKIHELIDNSRKDEEEDVDQNNRIPNENCVPFFDFLSVGNSASQGLC

SEQ ID NO: 37153 - protein, 148 aa, Arabidopsis thaliana
  peptide (1)..(148): Ceres Seq. ID no. 12336426
  misc_feature (1)..(140): Homolog of NCBI NO: 15222362 NR Description: MYB-family transcription factor, putative
  misc_feature (1)..(14): Homolog of NCBI NO: 6979341 NR Description: myb-like protein [Oryza sativa]
  misc_feature (1)..(26): Homolog of NCBI NO: 21321780 NR Description: putative Myb/Myb-related protein
  misc_feature (1)..(14): Homolog of NCBI NO: 31980093 NR Description: MYB transcription factor R2R3 type
  misc_feature (1)..(144): Homolog of NCBI NO: 11358543 NR Description: myb-related transcription factor MYB54
  misc_feature (1)..(144): Homolog of NCBI NO: 15219462 NR Description: myb family transcription factor(MYB54)
  misc_feature (1)..(148): Homolog of NCBI NO: 11358541 NR Description: myb-related transcription factor MYB52
  misc_feature (1)..(148): Homolog of NCBI NO: 25513679 NR Description: F2H15.17 protein - Arabidopsis thaliana
  misc_feature (1)..(148): Homolog of NCBI NO: 15220910 NR Description: myb family trnscription factor
  misc_feature (1)..(148): Homolog of NCBI NO: 21554916 NR Description: myb-like protein, putative [Arabidopsis thaliana]
MARRGRERSKLRPRGLGHDGTVAATGMIGNYKDCDKERRLATTTAINFPYQFSHINHFQVLKEFLTVKIGFRNSTTPIQEGAIDQTKRPMEFYNFLQVNTDSKIHELIDNSRKDEEEDVDQNNRIPNENCVPFFDFLSVGNSASQGLC

SEQ ID NO: 37154 - DNA, 1034 bp, Arabidopsis thaliana
  misc_feature (1)..(1034): Ceres Seq. ID no. 13489401
  misc_feature: MA Experiment ID: 108461 Result: Up-regulated in Transcription
  misc_feature: MA Experiment 108461 PARAMETER Experiment Name: At_Germinating_Seeds_cDNA_P Parameter: Age (day) Value: 1 vs. 0
  misc_feature: MA Experiment 108461 PARAMETER Experiment Name: At_Germinating_Seeds_cDNA_P Parameter: Tissue Value: Germinating Seeds
  misc_feature: MA Experiment ID: 108577 Result: Down-regulated in Transcription
  misc_feature: MA Experiment 108577 PARAMETER Experiment Name: At_42deg_Heat_cDNA_P Parameter: Temperature (deg C) Value: 42 vs. 22
  misc_feature: MA Experiment 108577 PARAMETER Experiment Name: At_42deg_Heat_cDNA_P Parameter: Timepoint (hr) Value: 6
  misc_feature: MA Experiment 108577 PARAMETER Experiment Name: At_42deg_Heat_cDNA_P Parameter: Tissue Value: Aerial
  misc_feature: MA Experiment ID: 108595 Result: Down-regulated in Transcription
  misc_feature: MA Experiment 108595 PARAMETER Experiment Name: At_Ler-pi_Ovule_cDNA_P Parameter: Plant Line Value: null
  misc_feature: MA Experiment ID: 20000069 Result: Up-regulated in Transcription
  misc_feature: MA Experiment 20000069 PARAMETER Experiment Name: At_100uM_ABA_Mutants_cDNA_P Parameter: Plant Line Value: CS23
  misc_feature: MA Experiment 20000069 PARAMETER Experiment Name: At_100uM_ABA_Mutants_cDNA_P Parameter: Timepoint (hr) Value: 6
  misc_feature: MA Experiment 20000069 PARAMETER Experiment Name: At_100uM_ABA_Mutants_cDNA_P Parameter: Tissue Value: Aerial
  misc_feature: MA Experiment 20000069 PARAMETER Experiment Name: At_100uM_ABA_Mutants_cDNA_P Parameter: Treatment Value: 100uM ABA vs. No Treatment
  misc_feature: MA Experiment ID: 20000111 Result: Down-regulated in Transcription
  misc_feature: MA Experiment 20000111 PARAMETER Experiment Name: At_42deg_Heat_cDNA_P Parameter: Temperature (deg C) Value: 42 vs. 22
  misc_feature: MA Experiment 20000111 PARAMETER Experiment Name: At_42deg_Heat_cDNA_P Parameter: Timepoint (hr) Value: 6
  misc_feature: MA Experiment 20000111 PARAMETER Experiment Name: At_42deg_Heat_cDNA_P Parameter: Tissue Value: Aerial
  misc_feature: MA Experiment ID: 20000173 Result: Down-regulated in Transcription
  misc_feature: MA Experiment 20000173 PARAMETER Experiment Name: At_42deg_Heat_P Parameter: Age (day) Value: 14
  misc_feature: MA Experiment 20000173 PARAMETER Experiment Name: At_42deg_Heat_P Parameter: Organism Value: A. thaliana
  misc_feature: MA Experiment 20000173 PARAMETER Experiment Name: At_42deg_Heat_P Parameter: Plant Line Value: WS
  misc_feature: MA Experiment 20000173 PARAMETER Experiment Name: At_42deg_Heat_P Parameter: Temperature (deg C) Value: 42 vs. 22
  misc_feature: MA Experiment 20000173 PARAMETER Experiment Name: At_42deg_Heat_P Parameter: Timepoint (hr) Value: 6
  misc_feature: MA Experiment 20000173 PARAMETER Experiment Name: At_42deg_Heat_P Parameter: Tissue Value: Aerial
  misc_feature: MA Experiment ID: 20000179 Result: Up-regulated in Transcription
  misc_feature: MA Experiment 20000179 PARAMETER Experiment Name: At_Germinating_Seeds_P Parameter: Age (hr) Value: 6 vs. 0
  misc_feature: MA Experiment 20000179 PARAMETER Experiment Name: At_Germinating_Seeds_P Parameter: Tissue Value: Germinating Seeds
  misc_feature: MA Experiment ID: 20000180 Result: Up-regulated in Transcription
  misc_feature: MA Experiment 20000180 PARAMETER Experiment Name: At_Germinating_Seeds_P Parameter: Age (hr) Value: 24 vs. 0
  misc_feature: MA Experiment 20000180 PARAMETER Experiment Name: At_Germinating_Seeds_P Parameter: Tissue Value: Germinating Seeds
  misc_feature: MA Experiment ID: 20000184 Result: Down-regulated in Transcription
  misc_feature: MA Experiment 20000184 PARAMETER Experiment Name: At_Shoots__P Parameter: Age (day) Value: 7
  misc_feature: MA Experiment 20000184 PARAMETER Experiment Name: At_Shoots__P Parameter: Tissue Value: Shoots vs. Whole Plant
  misc_feature: MA Experiment ID: 20000224 Result: Down-regulated in Transcription
  misc_feature: MA Experiment ID: 20000496 Result: Down-regulated in Transcription
  misc_feature: MA Experiment 20000496 PARAMETER Experiment Name: At_Guard_Cells_P Parameter: Harvest Date Value: 7/19/2002
  misc_feature: MA Experiment 20000496 PARAMETER Experiment Name: At_Guard_Cells_P Parameter: Organism Value: Canola
  misc_feature: MA Experiment 20000496 PARAMETER Experiment Name: At_Guard_Cells_P Parameter: Tissue Value: Guard Cells vs. Leaves
  misc_feature: MA Experiment ID: 20001451 Result: Down-regulated in Transcription
  misc_feature: MA Experiment 20001451 PARAMETER Experiment Name: At_Far-red-induction_P Parameter: Age (day) Value: 7
  misc_feature: MA Experiment 20001451 PARAMETER Experiment Name: At_Far-red-induction_P Parameter: Light Value: Far-red vs. White
  misc_feature: MA Experiment 20001451 PARAMETER Experiment Name: At_Far-red-induction_P Parameter: Organism Value: A. thaliana
  misc_feature: MA Experiment 20001451 PARAMETER Experiment Name: At_Far-red-induction_P Parameter: Plant Line Value: Columbia
  misc_feature: MA Experiment 20001451 PARAMETER Experiment Name: At_Far-red-induction_P Parameter: Timepoint (hr) Value: 24
  misc_feature: MA Experiment 20001451 PARAMETER Experiment Name: At_Far-red-induction_P Parameter: Tissue Value: Whole Plant
  misc_feature: MA Experiment ID: 20001558 Result: Down-regulated in Transcription
  misc_feature: MA Experiment 20001558 PARAMETER Experiment Name: At_Drought_Soil_Dry_P Parameter: Age (day) Value: 27
  misc_feature: MA Experiment 20001558 PARAMETER Experiment Name: At_Drought_Soil_Dry_P Parameter: Organism Value: A. thaliana
  misc_feature: MA Experiment 20001558 PARAMETER Experiment Name: At_Drought_Soil_Dry_P Parameter: Plant Line Value: WS
  misc_feature: MA Experiment 20001558 PARAMETER Experiment Name: At_Drought_Soil_Dry_P Parameter: Post Timepoint (hr) Value: 6
  misc_feature: MA Experiment 20001558 PARAMETER Experiment Name: At_Drought_Soil_Dry_P Parameter: Post-Treatment Value: Re-Water vs. No Drought
  misc_feature: MA Experiment 20001558 PARAMETER Experiment Name: At_Drought_Soil_Dry_P Parameter: Timepoint (day) Value: 13
  misc_feature: MA Experiment 20001558 PARAMETER Experiment Name: At_Drought_Soil_Dry_P Parameter: Treatment Value: Drought vs. No Drought
gattctctatattgcagatcgatctccgagtttgctaaatcgccgggaaatttactgaatttggagctagtcatgtcttcagatcctgacaaaatgatgtccaaagccgacaaaatgacaaagctcacgcttactagatggagtgctgattggagaggtgctactgagttgtatgagcaagcagcaaatgggtttagagcctcaaaaaattatgagaaagctaaagtggctctcgagaaagcttcaaaaggacaagagatgcaagcttctccttgggatgctgcaaagcatatggagtctgctgctgccttagcacagaagctaagtatttggaatgaagttgctgatttttatagaaaggcgtccgagctgtatgttgagtgtggaagggcacaacccgcatcagatgctcttggaaaggctgcccgtgctttggaagatgtcaaaccagatgactccatccaactatacactgatgcttgtgaaattcttgaagaggatgggagggaccaaatggcctttgatctgtaccgtgcttgtgctaatgtctacattaagcttgagaagttcacagatgctgcaacctttttcttaagattgggtgtagctgctgataagtgtgatgcgacaaatagccagtgtaaggcgtatctcagtgcaatcatcttatatctgtatgctcacgacctgcagcaggcagaaaaatgctacaatgactgttctcagattgacgcttttctgaagagtgatcagagccgaagtgctagtagacttctcacagcctataatgaaggtgacattgaagaaatcaagaaggtggcgagtgcaagcactgtctcgaatttggatcatatgattatcaagttggctaggaagctacccactggagatgttactgcaattcagatgaacactaatgacgatctagacgaggatgatctcacttaaagtttctccactttgtacagattcatatttacacttggcttcttttcagtccaaagattaaaaaaaaacttattatcgtttttccc

SEQ ID NO: 37155 - protein, 315 aa, Arabidopsis thaliana
  peptide (1)..(315): Ceres Seq. ID no. 13489402
  misc_feature (33)..(298): Homolog of NCBI NO: 26355647 NR Description: unnamed protein product [Mus musculus]
  misc_feature (33)..(298): Homolog of NCBI NO: 34932055 NR Description: similar to Gamma-soluble NSF attachment protein
  misc_feature (33)..(298): Homolog of NCBI NO: 12804881 NR Description: N-ethylmaleimide-sensitive factor attachment
  misc_feature (30)..(293): Homolog of NCBI NO: 5639862 NR Description: soluble NSF attachment protein gamma isoform
  misc_feature (91)..(315): Homolog of NCBI NO: 5852090 NR Description: zwh13.1 [Oryza sativa (indica cultivar-group)]
  misc_feature (26)..(315): Homolog of NCBI NO: 38344323 NR Description: OSJNBa0058K23.5 [Oryza sativa (japonica
  misc_feature (285)..(315): Homolog of NCBI NO: 7486759 NR Description: hypothetical protein F9F13.60 - Arabidopsis
  misc_feature (25)..(289): Homolog of NCBI NO: 7486759 NR Description: hypothetical protein F9F13.60 - Arabidopsis
  misc_feature (25)..(315): Homolog of NCBI NO: 18415496 NR Description: gamma-soluble NSF attachment protein (gamma-SNAP)
  misc_feature (25)..(315): Homolog of NCBI NO: 21554919 NR Description: unknown [Arabidopsis thaliana]
DSLYCRSISEFAKSPGNLLNLELVMSSDPDKMMSKADKMTKLTLTRWSADWRGATELYEQAANGFRASKNYEKAKVALEKASKGQEMQASPWDAAKHMESAAALAQKLSIWNEVADFYRKASELYVECGRAQPASDALGKAARALEDVKPDDSIQLYTDACEILEEDGRDQMAFDLYRACANVYIKLEKFTDAATFFLRLGVAADKCDATNSQCKAYLSAIILYLYAHDLQQAEKCYNDCSQIDAFLKSDQSRSASRLLTAYNEGDIEEIKKVASASTVSNLDHMIIKLARKLPTGDVTAIQMNTNDDLDEDDLT

SEQ ID NO: 37156 - protein, 291 aa, Arabidopsis thaliana
  peptide (1)..(291): Ceres Seq. ID no. 13489403
  misc_feature (9)..(274): Homolog of NCBI NO: 26355647 NR Description: unnamed protein product [Mus musculus]
  misc_feature (9)..(274): Homolog of NCBI NO: 34932055 NR Description: similar to Gamma-soluble NSF attachment protein
  misc_feature (9)..(274): Homolog of NCBI NO: 12804881 NR Description: N-ethylmaleimide-sensitive factor attachment
  misc_feature (6)..(269): Homolog of NCBI NO: 5639862 NR Description: soluble NSF attachment protein gamma isoform
  misc_feature (67)..(291): Homolog of NCBI NO: 5852090 NR Description: zwh13.1 [Oryza sativa (indica cultivar-group)]
  misc_feature (2)..(291): Homolog of NCBI NO: 38344323 NR Description: OSJNBa0058K23.5 [Oryza sativa (japonica
  misc_feature (261)..(291): Homolog of NCBI NO: 7486759 NR Description: hypothetical protein F9F13.60 - Arabidopsis
  misc_feature (1)..(265): Homolog of NCBI NO: 7486759 NR Description: hypothetical protein F9F13.60 - Arabidopsis
  misc_feature (1)..(291): Homolog of NCBI NO: 18415496 NR Description: gamma-soluble NSF attachment protein (gamma-SNAP)
  misc_feature (1)..(291): Homolog of NCBI NO: 21554919 NR Description: unknown [Arabidopsis thaliana]
MSSDPDKMMSKADKMTKLTLTRWSADWRGATELYEQAANGFRASKNYEKAKVALEKASKGQEMQASPWDAAKHMESAAALAQKLSIWNEVADFYRKASELYVECGRAQPASDALGKAARALEDVKPDDSIQLYTDACEILEEDGRDQMAFDLYRACANVYIKLEKFTDAATFFLRLGVAADKCDATNSQCKAYLSAIILYLYAHDLQQAEKCYNDCSQIDAFLKSDQSRSASRLLTAYNEGDIEEIKKVASASTVSNLDHMIIKLARKLPTGDVTAIQMNTNDDLDEDDLT

SEQ ID NO: 37157 - protein, 284 aa, Arabidopsis thaliana
  peptide (1)..(284): Ceres Seq. ID no. 13489404
  misc_feature (2)..(267): Homolog of NCBI NO: 26355647 NR Description: unnamed protein product [Mus musculus]
  misc_feature (2)..(267): Homolog of NCBI NO: 34932055 NR Description: similar to Gamma-soluble NSF attachment protein
  misc_feature (2)..(267): Homolog of NCBI NO: 12804881 NR Description: N-ethylmaleimide-sensitive factor attachment
  misc_feature (1)..(262): Homolog of NCBI NO: 5639862 NR Description: soluble NSF attachment protein gamma isoform
  misc_feature (60)..(284): Homolog of NCBI NO: 5852090 NR Description: zwh13.1 [Oryza sativa (indica cultivar-group)]
  misc_feature (1)..(284): Homolog of NCBI NO: 38344323 NR Description: OSJNBa0058K23.5 [Oryza sativa (japonica
  misc_feature (254)..(284): Homolog of NCBI NO: 7486759 NR Description: hypothetical protein F9F13.60 - Arabidopsis
  misc_feature (1)..(258): Homolog of NCBI NO: 7486759 NR Description: hypothetical protein F9F13.60 - Arabidopsis
  misc_feature (1)..(284): Homolog of NCBI NO: 18415496 NR Description: gamma-soluble NSF attachment protein (gamma-SNAP)
  misc_feature (1)..(284): Homolog of NCBI NO: 21554919 NR Description: unknown [Arabidopsis thaliana]
MMSKADKMTKLTLTRWSADWRGATELYEQAANGFRASKNYEKAKVALEKASKGQEMQASPWDAAKHMESAAALAQKLSIWNEVADFYRKASELYVECGRAQPASDALGKAARALEDVKPDDSIQLYTDACEILEEDGRDQMAFDLYRACANVYIKLEKFTDAATFFLRLGVAADKCDATNSQCKAYLSAIILYLYAHDLQQAEKCYNDCSQIDAFLKSDQSRSASRLLTAYNEGDIEEIKKVASASTVSNLDHMIIKLARKLPTGDVTAIQMNTNDDLDEDDLT

SEQ ID NO: 37158 - DNA, 915 bp, Arabidopsis thaliana
  misc_feature (1)..(915): Ceres Seq. ID no. 13647113
  misc_feature: MA Experiment ID: 20000169 Result: Up-regulated in Transcription
  misc_feature: MA Experiment 20000169 PARAMETER Experiment Name: At_100uM_ABA_P Parameter: Age (day) Value: 14
  misc_feature: MA Experiment 20000169 PARAMETER Experiment Name: At_100uM_ABA_P Parameter: Organism Value: A. thaliana
  misc_feature: MA Experiment 20000169 PARAMETER Experiment Name: At_100uM_ABA_P Parameter: Plant Line Value: WS
  misc_feature: MA Experiment 20000169 PARAMETER Experiment Name: At_100uM_ABA_P Parameter: Timepoint (hr) Value: 6
  misc_feature: MA Experiment 20000169 PARAMETER Experiment Name: At_100uM_ABA_P Parameter: Tissue Value: Aerial
  misc_feature: MA Experiment 20000169 PARAMETER Experiment Name: At_100uM_ABA_P Parameter: Treatment Value: 100uM ABA vs. No Treatment
  misc_feature: MA Experiment ID: 20000173 Result: Down-regulated in Transcription
  misc_feature: MA Experiment 20000173 PARAMETER Experiment Name: At_42deg_Heat_P Parameter: Age (day) Value: 14
  misc_feature: MA Experiment 20000173 PARAMETER Experiment Name: At_42deg_Heat_P Parameter: Organism Value: A. thaliana
  misc_feature: MA Experiment 20000173 PARAMETER Experiment Name: At_42deg_Heat_P Parameter: Plant Line Value: WS
  misc_feature: MA Experiment 20000173 PARAMETER Experiment Name: At_42deg_Heat_P Parameter: Temperature (deg C) Value: 42 vs. 22
  misc_feature: MA Experiment 20000173 PARAMETER Experiment Name: At_42deg_Heat_P Parameter: Timepoint (hr) Value: 6
  misc_feature: MA Experiment 20000173 PARAMETER Experiment Name: At_42deg_Heat_P Parameter: Tissue Value: Aerial
  misc_feature: MA Experiment ID: 20000185 Result: Down-regulated in Transcription
  misc_feature: MA Experiment 20000185 PARAMETER Experiment Name: At_Roots__P Parameter: Age (day) Value: 7 vs. 21
  misc_feature: MA Experiment 20000185 PARAMETER Experiment Name: At_Roots__P Parameter: Organism Value: A. thaliana
  misc_feature: MA Experiment 20000185 PARAMETER Experiment Name: At_Roots__P Parameter: Tissue Value: Roots vs. Whole Plant
  misc_feature: MA Experiment ID: 20000227 Result: Down-regulated in Transcription
  misc_feature: MA Experiment 20000227 PARAMETER Experiment Name: At_Root-Tips-vs-Tops_P Parameter: Tissue Value: Root Tips vs. Root Tops
  misc_feature: MA Experiment ID: 20000264 Result: Down-regulated in Transcription
  misc_feature: MA Experiment 20000264 PARAMETER Experiment Name: At_Open_Flower_P Parameter: Age (day) Value: 21
  misc_feature: MA Experiment 20000264 PARAMETER Experiment Name: At_Open_Flower_P Parameter: Plant Line Value: WS
  misc_feature: MA Experiment 20000264 PARAMETER Experiment Name: At_Open_Flower_P Parameter: Tissue Value: Open Flower vs. Whole Plant
  misc_feature: MA Experiment ID: 20000268 Result: Down-regulated in Transcription
  misc_feature: MA Experiment 20000268 PARAMETER Experiment Name: At_100mM_NaCl__P Parameter: Age (day) Value: 14
  misc_feature: MA Experiment 20000268 PARAMETER Experiment Name: At_100mM_NaCl__P Parameter: Organism Value: A. thaliana
  misc_feature: MA Experiment 20000268 PARAMETER Experiment Name: At_100mM_NaCl__P Parameter: Plant Line Value: WS
  misc_feature: MA Experiment 20000268 PARAMETER Experiment Name: At_100mM_NaCl__P Parameter: Timepoint (hr) Value: 6
  misc_feature: MA Experiment 20000268 PARAMETER Experiment Name: At_100mM_NaCl__P Parameter: Tissue Value: Whole Plant
  misc_feature: MA Experiment 20000268 PARAMETER Experiment Name: At_100mM_NaCl__P Parameter: Treatment Value: 100mM NaCl vs. No Treatment
  misc_feature: MA Experiment ID: 20000286 Result: Down-regulated in Transcription
  misc_feature: MA Experiment 20000286 PARAMETER Experiment Name: At_Open_Flower_P Parameter: Age (day) Value: 21
  misc_feature: MA Experiment 20000286 PARAMETER Experiment Name: At_Open_Flower_P Parameter: Plant Line Value: WS
  misc_feature: MA Experiment 20000286 PARAMETER Experiment Name: At_Open_Flower_P Parameter: Tissue Value: Half Open vs. Whole Plant
  misc_feature: MA Experiment ID: 20000438 Result: Down-regulated in Transcription
  misc_feature: MA Experiment 20000438 PARAMETER Experiment Name: At_Shoots__P Parameter: Age (day) Value: 14
  misc_feature: MA Experiment 20000438 PARAMETER Experiment Name: At_Shoots__P Parameter: Tissue Value: Shoots vs. Whole Plant
  misc_feature: MA Experiment ID: 20000453 Result: Up-regulated in Transcription
  misc_feature: MA Experiment 20000453 PARAMETER Experiment Name: At_100uM_ABA_P Parameter: Age (day) Value: 15
  misc_feature: MA Experiment 20000453 PARAMETER Experiment Name: At_100uM_ABA_P Parameter: Organism Value: A. thaliana
  misc_feature: MA Experiment 20000453 PARAMETER Experiment Name: At_100uM_ABA_P Parameter: Plant Line Value: WS
  misc_feature: MA Experiment 20000453 PARAMETER Experiment Name: At_100uM_ABA_P Parameter: Timepoint (hr) Value: 24
  misc_feature: MA Experiment 20000453 PARAMETER Experiment Name: At_100uM_ABA_P Parameter: Tissue Value: Aerial
  misc_feature: MA Experiment 20000453 PARAMETER Experiment Name: At_100uM_ABA_P Parameter: Treatment Value: 100uM ABA vs. No Treatment
  misc_feature: MA Experiment ID: 20000456 Result: Down-regulated in Transcription
  misc_feature: MA Experiment 20000456 PARAMETER Experiment Name: At_100uM_BA_P Parameter: Age (day) Value: 14
  misc_feature: MA Experiment 20000456 PARAMETER Experiment Name: At_100uM_BA_P Parameter: Organism Value: A. thaliana
  misc_feature: MA Experiment 20000456 PARAMETER Experiment Name: At_100uM_BA_P Parameter: Plant Line Value: WS
  misc_feature: MA Experiment 20000456 PARAMETER Experiment Name: At_100uM_BA_P Parameter: Timepoint (hr) Value: 6
  misc_feature: MA Experiment 20000456 PARAMETER Experiment Name: At_100uM_BA_P Parameter: Tissue Value: Aerial
  misc_feature: MA Experiment 20000456 PARAMETER Experiment Name: At_100uM_BA_P Parameter: Treatment Value: 100uM BA vs. No Treatment
  misc_feature: MA Experiment ID: 20000527 Result: Up-regulated in Transcription
  misc_feature: MA Experiment 20000527 PARAMETER Experiment Name: At_10percent_PEG_P Parameter: Age (day) Value: 20
  misc_feature: MA Experiment 20000527 PARAMETER Experiment Name: At_10percent_PEG_P Parameter: Organism Value: A. thaliana
  misc_feature: MA Experiment 20000527 PARAMETER Experiment Name: At_10percent_PEG_P Parameter: Plant Line Value: WS
  misc_feature: MA Experiment 20000527 PARAMETER Experiment Name: At_10percent_PEG_P Parameter: Timepoint (day) Value: 20
  misc_feature: MA Experiment 20000527 PARAMETER Experiment Name: At_10percent_PEG_P Parameter: Tissue Value: Whole Plant
  misc_feature: MA Experiment 20000527 PARAMETER Experiment Name: At_10percent_PEG_P Parameter: Treatment Value: 10percent PEG vs. No Treatment
  misc_feature: MA Experiment ID: 20000794 Result: Down-regulated in Transcription
  misc_feature: MA Experiment 20000794 PARAMETER Experiment Name: At_Petals_P Parameter: Age (day) Value: 23-25 days
  misc_feature: MA Experiment 20000794 PARAMETER Experiment Name: At_Petals_P Parameter: Plant Line Value: WS
  misc_feature: MA Experiment 20000794 PARAMETER Experiment Name: At_Petals_P Parameter: Tissue Value: Petals vs. Whole plant
  misc_feature: MA Experiment ID: 20001247 Result: Up-regulated in Transcription
  misc_feature: MA Experiment 20001247 PARAMETER Experiment Name: At_Far-red-induction_P Parameter: Age (day) Value: 7
  misc_feature: MA Experiment 20001247 PARAMETER Experiment Name: At_Far-red-induction_P Parameter: Light Value: Far-red vs. White
  misc_feature: MA Experiment 20001247 PARAMETER Experiment Name: At_Far-red-induction_P Parameter: Organism Value: A. thaliana
  misc_feature: MA Experiment 20001247 PARAMETER Experiment Name: At_Far-red-induction_P Parameter: Plant Line Value: Columbia
  misc_feature: MA Experiment 20001247 PARAMETER Experiment Name: At_Far-red-induction_P Parameter: Timepoint (hr) Value: 1
  misc_feature: MA Experiment 20001247 PARAMETER Experiment Name: At_Far-red-induction_P Parameter: Tissue Value: Whole Plant
  misc_feature: MA Experiment ID: 20001248 Result: Up-regulated in Transcription
  misc_feature: MA Experiment 20001248 PARAMETER Experiment Name: At_Far-red-induction_P Parameter: Age (day) Value: 7
  misc_feature: MA Experiment 20001248 PARAMETER Experiment Name: At_Far-red-induction_P Parameter: Light Value: Far-red vs. White
  misc_feature: MA Experiment 20001248 PARAMETER Experiment Name: At_Far-red-induction_P Parameter: Organism Value: A. thaliana
  misc_feature: MA Experiment 20001248 PARAMETER Experiment Name: At_Far-red-induction_P Parameter: Plant Line Value: Columbia
  misc_feature: MA Experiment 20001248 PARAMETER Experiment Name: At_Far-red-induction_P Parameter: Timepoint (hr) Value: 4
  misc_feature: MA Experiment 20001248 PARAMETER Experiment Name: At_Far-red-induction_P Parameter: Tissue Value: Whole Plant
  misc_feature: MA Experiment ID: 20001450 Result: Up-regulated in Transcription
  misc_feature: MA Experiment 20001450 PARAMETER Experiment Name: At_Far-red-induction_P Parameter: Age (day) Value: 7
  misc_feature: MA Experiment 20001450 PARAMETER Experiment Name: At_Far-red-induction_P Parameter: Light Value: Far-red vs. White
  misc_feature: MA Experiment 20001450 PARAMETER Experiment Name: At_Far-red-induction_P Parameter: Organism Value: A. thaliana
  misc_feature: MA Experiment 20001450 PARAMETER Experiment Name: At_Far-red-induction_P Parameter: Plant Line Value: Columbia
  misc_feature: MA Experiment 20001450 PARAMETER Experiment Name: At_Far-red-induction_P Parameter: Timepoint (hr) Value: 8
  misc_feature: MA Experiment 20001450 PARAMETER Experiment Name: At_Far-red-induction_P Parameter: Tissue Value: Whole Plant
  misc_feature: MA Experiment ID: 20001557 Result: Down-regulated in Transcription
  misc_feature: MA Experiment 20001557 PARAMETER Experiment Name: At_Drought_Soil_Dry_P Parameter: Age (day) Value: 27
  misc_feature: MA Experiment 20001557 PARAMETER Experiment Name: At_Drought_Soil_Dry_P Parameter: Organism Value: A. thaliana
  misc_feature: MA Experiment 20001557 PARAMETER Experiment Name: At_Drought_Soil_Dry_P Parameter: Plant Line Value: WS
  misc_feature: MA Experiment 20001557 PARAMETER Experiment Name: At_Drought_Soil_Dry_P Parameter: Post Timepoint (hr) Value: 3
  misc_feature: MA Experiment 20001557 PARAMETER Experiment Name: At_Drought_Soil_Dry_P Parameter: Post-Treatment Value: Re-Water vs. No Drought
  misc_feature: MA Experiment 20001557 PARAMETER Experiment Name: At_Drought_Soil_Dry_P Parameter: Timepoint (day) Value: 13
  misc_feature: MA Experiment 20001557 PARAMETER Experiment Name: At_Drought_Soil_Dry_P Parameter: Treatment Value: Drought vs. No Drought
  misc_feature: MA Experiment ID: 20001757 Result: Up-regulated in Transcription
  misc_feature: MA Experiment 20001757 PARAMETER Experiment Name: At_50mM_NH4NO3_L-to-H_P Parameter: Timepoint (hr) Value: 6
  misc_feature: MA Experiment 20001757 PARAMETER Experiment Name: At_50mM_NH4NO3_L-to-H_P Parameter: Tissue Value: Leaf
  misc_feature: MA Experiment 20001757 PARAMETER Experiment Name: At_50mM_NH4NO3_L-to-H_P Parameter: Treatment Value: 50mM NH4NO3 vs 100mM Mannitol
  misc_feature: MA Experiment ID: 20001911 Result: Up-regulated in Transcription
  misc_feature: MA Experiment 20001911 PARAMETER Experiment Name: At_Drought_Reproduction_P Parameter: Age (day) Value: 40
  misc_feature: MA Experiment 20001911 PARAMETER Experiment Name: At_Drought_Reproduction_P Parameter: Organism Value: A. thaliana
  misc_feature: MA Experiment 20001911 PARAMETER Experiment Name: At_Drought_Reproduction_P Parameter: Plant Line Value: WS
  misc_feature: MA Experiment 20001911 PARAMETER Experiment Name: At_Drought_Reproduction_P Parameter: Timepoint (day) Value: 10
  misc_feature: MA Experiment 20001911 PARAMETER Experiment Name: At_Drought_Reproduction_P Parameter: Tissue Value: Flowers
  misc_feature: MA Experiment 20001911 PARAMETER Experiment Name: At_Drought_Reproduction_P Parameter: Treatment Value: Drought vs. No Drought
atcattaacctgttttcactcaaatcatccatctaccttctctctgtaacaatcctctcttccctctaagagtttctgaaaaatcggtgaaacaacagaggaagcaatatggcacttacttggactcataaagacaggggagaaattagggttcatgagaatttggaggaactaagcatagacttggttgattatatagctgagatatcagaagcatcaattaaagaacatggtgctttctgcattgtgttatcaggaggctctctcattagcttcatgggaaaattgatcgagccgccttacgacaagattgtagattgggcgaaatggtatgttttctgggcggatgagcgtgtggtagctaagaatcatgacgatagcaactacaagctagccaaagataatttactctccaaggtaaatgtgtttccgagacatatatgttccattaacgacacagtttcagcggaggaagctgcaacagagtatgaattcgccatcagacagatggtgagatcacgaaccgtggctgcgtcagacaacagtgacagtcccaggtttgatctgatcttgcttgggatgggctcagatggacatgtagcctcactcttcccgaaccacccagcacttgaggtgaaggacgattgggtcacattcctaaccgactctcataaaccgccaccagagagaatcacattcactttgcccgtcatcaactcagctgctaacgttgtcgtagtagcaaccggcgaatccaaagccaatgctatccacttagcaatcgatgatttgcccttaccagacagctctctgtctctgcctgcaaggctagtccacccgagcaatgggaatctgatttggtttatggataaacaagcggggtctaagcttgacaggtttaaattttccgagtag

SEQ ID NO: 37159 - protein, 268 aa, Arabidopsis thaliana
  peptide (1)..(268): Ceres Seq. ID no. 13647114
  misc_feature (29)..(265): Pfam Name: Glucosamine-6-phosphate Pfam Description: Glucosamine-6-phosphate
  misc_feature (14)..(261): Homolog of NCBI NO: 15229127 NR Description: 6-phosphogluconolactonase - like protein
  misc_feature (21)..(261): Homolog of NCBI NO: 15238526 NR Description: 6-phosphogluconolactonase-related protein
  misc_feature (21)..(261): Homolog of NCBI NO: 21537412 NR Description: 6-phosphogluconolactonase-like protein
  misc_feature (15)..(261): Homolog of NCBI NO: 14009294 NR Description: putative 6-phosphogluconolactonase [Brassica
  misc_feature (1)..(261): Homolog of NCBI NO: 10177901 NR Description: 6-phosphogluconolactonase-like protein
  misc_feature (1)..(261): Homolog of NCBI NO: 18420789 NR Description: 6-phosphogluconolactonase-related protein
  misc_feature (1)..(261): Homolog of NCBI NO: 21554291 NR Description: 6-phosphogluconolactonase-like protein
  misc_feature (6)..(261): Homolog of NCBI NO: 28140256 NR Description: putative 6-phosphogluconolactonase [Elaeis
  misc_feature (8)..(262): Homolog of NCBI NO: 34394567 NR Description: putative 6-phosphogluconolactonase
  misc_feature (1)..(268): Homolog of NCBI NO: 15222922 NR Description: hypothetical protein [Arabidopsis thaliana]
MALTWTHKDRGEIRVHENLEELSIDLVDYIAEISEASIKEHGAFCIVLSGGSLISFMGKLIEPPYDKIVDWAKWYVFWADERVVAKNHDDSNYKLAKDNLLSKVNVFPRHICSINDTVSAEEAATEYEFAIRQMVRSRTVAASDNSDSPRFDLILLGMGSDGHVASLFPNHPALEVKDDWVTFLTDSHKPPPERITFTLPVINSAANVVVVATGESKANAIHLAIDDLPLPDSSLSLPARLVHPSNGNLIWFMDKQAGSKLDRFKFSE

SEQ ID NO: 37160 - protein, 212 aa, Arabidopsis thaliana
  peptide (1)..(212): Ceres Seq. ID no. 13647115
  misc_feature (1)..(209): Pfam Name: Glucosamine-6-phosphate Pfam Description: Glucosamine-6-phosphate
  misc_feature (1)..(205): Homolog of NCBI NO: 15229127 NR Description: 6-phosphogluconolactonase - like protein
  misc_feature (1)..(205): Homolog of NCBI NO: 15238526 NR Description: 6-phosphogluconolactonase-related protein
  misc_feature (1)..(205): Homolog of NCBI NO: 21537412 NR Description: 6-phosphogluconolactonase-like protein
  misc_feature (1)..(205): Homolog of NCBI NO: 14009294 NR Description: putative 6-phosphogluconolactonase [Brassica
  misc_feature (1)..(205): Homolog of NCBI NO: 10177901 NR Description: 6-phosphogluconolactonase-like protein
  misc_feature (1)..(205): Homolog of NCBI NO: 18420789 NR Description: 6-phosphogluconolactonase-related protein
  misc_feature (1)..(205): Homolog of NCBI NO: 21554291 NR Description: 6-phosphogluconolactonase-like protein
  misc_feature (1)..(205): Homolog of NCBI NO: 28140256 NR Description: putative 6-phosphogluconolactonase [Elaeis
  misc_feature (1)..(206): Homolog of NCBI NO: 34394567 NR Description: putative 6-phosphogluconolactonase
  misc_feature (1)..(212): Homolog of NCBI NO: 15222922 NR Description: hypothetical protein [Arabidopsis thaliana]
MGKLIEPPYDKIVDWAKWYVFWADERVVAKNHDDSNYKLAKDNLLSKVNVFPRHICSINDTVSAEEAATEYEFAIRQMVRSRTVAASDNSDSPRFDLILLGMGSDGHVASLFPNHPALEVKDDWVTFLTDSHKPPPERITFTLPVINSAANVVVVATGESKANAIHLAIDDLPLPDSSLSLPARLVHPSNGNLIWFMDKQAGSKLDRFKFSE

SEQ ID NO: 37161 - protein, 135 aa, Arabidopsis thaliana
  peptide (1)..(135): Ceres Seq. ID no. 13647116
  misc_feature (1)..(132): Pfam Name: Glucosamine-6-phosphate Pfam Description: Glucosamine-6-phosphate
  misc_feature (1)..(128): Homolog of NCBI NO: 15229127 NR Description: 6-phosphogluconolactonase - like protein
  misc_feature (1)..(128): Homolog of NCBI NO: 15238526 NR Description: 6-phosphogluconolactonase-related protein
  misc_feature (1)..(128): Homolog of NCBI NO: 21537412 NR Description: 6-phosphogluconolactonase-like protein
  misc_feature (1)..(128): Homolog of NCBI NO: 14009294 NR Description: putative 6-phosphogluconolactonase [Brassica
  misc_feature (1)..(128): Homolog of NCBI NO: 10177901 NR Description: 6-phosphogluconolactonase-like protein
  misc_feature (1)..(128): Homolog of NCBI NO: 18420789 NR Description: 6-phosphogluconolactonase-related protein
  misc_feature (1)..(128): Homolog of NCBI NO: 21554291 NR Description: 6-phosphogluconolactonase-like protein
  misc_feature (1)..(128): Homolog of NCBI NO: 28140256 NR Description: putative 6-phosphogluconolactonase [Elaeis
  misc_feature (1)..(129): Homolog of NCBI NO: 34394567 NR Description: putative 6-phosphogluconolactonase
  misc_feature (1)..(135): Homolog of NCBI NO: 15222922 NR Description: hypothetical protein [Arabidopsis thaliana]
MVRSRTVAASDNSDSPRFDLILLGMGSDGHVASLFPNHPALEVKDDWVTFLTDSHKPPPERITFTLPVINSAANVVVVATGESKANAIHLAIDDLPLPDSSLSLPARLVHPSNGNLIWFMDKQAGSKLDRFKFSE

SEQ ID NO: 37162 - DNA, 656 bp, Arabidopsis thaliana
  misc_feature (1)..(656): Ceres Seq. ID no. 12580161
  misc_feature: MA Experiment ID: 108574 Result: Up-regulated in Transcription
  misc_feature: MA Experiment 108574 PARAMETER Experiment Name: At_Wounding__cDNA_P Parameter: Timepoint (hr) Value: 1
  misc_feature: MA Experiment 108574 PARAMETER Experiment Name: At_Wounding__cDNA_P Parameter: Tissue Value: Aerial
  misc_feature: MA Experiment 108574 PARAMETER Experiment Name: At_Wounding__cDNA_P Parameter: Treatment Value: Wounding vs. No Wounding
  misc_feature: MA Experiment ID: 108595 Result: Up-regulated in Transcription
  misc_feature: MA Experiment 108595 PARAMETER Experiment Name: At_Ler-pi_Ovule_cDNA_P Parameter: Plant Line Value: null
  misc_feature: MA Experiment ID: 20000144 Result: Up-regulated in Transcription
  misc_feature: MA Experiment 20000144 PARAMETER Experiment Name: At_42deg_Heat_cDNA_P Parameter: Temperature (deg C) Value: 42 vs. 22
  misc_feature: MA Experiment 20000144 PARAMETER Experiment Name: At_42deg_Heat_cDNA_P Parameter: Timepoint (hr) Value: 1
  misc_feature: MA Experiment 20000144 PARAMETER Experiment Name: At_42deg_Heat_cDNA_P Parameter: Tissue Value: Aerial
  misc_feature: MA Experiment ID: 20000315 Result: Down-regulated in Transcription
  misc_feature: MA Experiment 20000315 PARAMETER Experiment Name: At_14day_Shoots-Roots_Sub_P Parameter: Age (day) Value: 14
  misc_feature: MA Experiment 20000315 PARAMETER Experiment Name: At_14day_Shoots-Roots_Sub_P Parameter: Organism Value: A. thaliana
  misc_feature: MA Experiment 20000315 PARAMETER Experiment Name: At_14day_Shoots-Roots_Sub_P Parameter: Plant Line Value: WS
  misc_feature: MA Experiment 20000315 PARAMETER Experiment Name: At_14day_Shoots-Roots_Sub_P Parameter: Tissue Value: Shoots vs. Whole Plant
  misc_feature: MA Experiment ID: 20000328 Result: Down-regulated in Transcription
  misc_feature: MA Experiment 20000328 PARAMETER Experiment Name: At_42deg_Heat_Sub_P Parameter: Age (day) Value: 14
  misc_feature: MA Experiment 20000328 PARAMETER Experiment Name: At_42deg_Heat_Sub_P Parameter: Organism Value: A. thaliana
  misc_feature: MA Experiment 20000328 PARAMETER Experiment Name: At_42deg_Heat_Sub_P Parameter: Plant Line Value: WS
  misc_feature: MA Experiment 20000328 PARAMETER Experiment Name: At_42deg_Heat_Sub_P Parameter: Temperature (deg C) Value: 42 vs. 22
  misc_feature: MA Experiment 20000328 PARAMETER Experiment Name: At_42deg_Heat_Sub_P Parameter: Timepoint (hr) Value: 6
  misc_feature: MA Experiment 20000328 PARAMETER Experiment Name: At_42deg_Heat_Sub_P Parameter: Tissue Value: Aerial
atattaaggagagacctattcgtgtggccaaacaccagaatatcgccaaaatcgttgaaacttgaacgaagaaacagacttgtcacagctcagccgccggaagactttaaggaggtatggatttggtgtggttattaagtgttttacttgttggagctgcacttggatattacatcagcactttacgacaaacccgccgaatctttctctcctccaaatctgtcgccatagatgcaggatccagcgggaataagaaaaccaagtccaaggaacccctcgagatagagaaactcgctgattttcgcaaaaatttcaaaatggttttggttgtgaggaatgatcttaaaatgggtaaagggaagattgcagctcaatgcagtcatgcaactttaggtttatacaagaaactccttcaacgggcgccaaaagccttgaacagatgggaatattgtgctcagccaaaagttgttgtcaaaattgaaagtgaggaagagatgctagttttgcaagaaagagcaaagaccctgaaactgccaacccatatcaccattgatgcgggaaaaacacagatcgctccaaattcaaggacagtaatggctattcttggacctgttgataatgttgatgaagtaacaggtggactaaagcttatgtaa

SEQ ID NO: 37163 - protein, 179 aa, Arabidopsis thaliana
  peptide (1)..(179): Ceres Seq. ID no. 12580162
  misc_feature (75)..(165): Pfam Name: Domain of unknown function UPF0099 Pfam Description: Domain of unknown function UPF0099
  misc_feature (66)..(178): Homolog of NCBI NO: 29428218 NR Description: Protein CGI-147
  misc_feature (66)..(178): Homolog of NCBI NO: 40889414 NR Description: Chain A, Crystal Structure Of Bit1
  misc_feature (43)..(178): Homolog of NCBI NO: 11359891 NR Description: hypothetical protein DKFZp434A1535.1 - human
  misc_feature (43)..(178): Homolog of NCBI NO: 7706351 NR Description: CGI-147 protein [Homo sapiens]
  misc_feature (46)..(179): Homolog of NCBI NO: 38345901 NR Description: OSJNBa0060D06.11 [Oryza sativa (japonica
  misc_feature (1)..(108): Homolog of NCBI NO: 26453197 NR Description: unknown protein [Arabidopsis thaliana]
  misc_feature (1)..(179): Homolog of NCBI NO: 11357729 NR Description: hypothetical protein F2K13_20 - Arabidopsis
  misc_feature (1)..(179): Homolog of NCBI NO: 21592675 NR Description: unknown [Arabidopsis thaliana]
  misc_feature (1)..(179): Homolog of NCBI NO: 18418110 NR Description: putative protein
  misc_feature (1)..(179): Homolog of NCBI NO: 15228442 NR Description: unknown protein; protein id: At3g03010.1
MDLVWLLSVLLVGAALGYYISTLRQTRRIFLSSKSVAIDAGSSGNKKTKSKEPLEIEKLADFRKNFKMVLVVRNDLKMGKGKIAAQCSHATLGLYKKLLQRAPKALNRWEYCAQPKVVVKIESEEEMLVLQERAKTLKLPTHITIDAGKTQIAPNSRTVMAILGPVDNVDEVTGGLKLM

SEQ ID NO: 37164 - protein, 112 aa, Arabidopsis thaliana
  peptide (1)..(112): Ceres Seq. ID no. 12580163
  misc_feature (8)..(98): Pfam Name: Domain of unknown function UPF0099 Pfam Description: Domain of unknown function UPF0099
  misc_feature (1)..(111): Homolog of NCBI NO: 29428218 NR Description: Protein CGI-147
  misc_feature (1)..(111): Homolog of NCBI NO: 40889414 NR Description: Chain A, Crystal Structure Of Bit1
  misc_feature (1)..(111): Homolog of NCBI NO: 11359891 NR Description: hypothetical protein DKFZp434A1535.1 - human
  misc_feature (1)..(111): Homolog of NCBI NO: 7706351 NR Description: CGI-147 protein [Homo sapiens]
  misc_feature (1)..(112): Homolog of NCBI NO: 38345901 NR Description: OSJNBa0060D06.11 [Oryza sativa (japonica
  misc_feature (1)..(41): Homolog of NCBI NO: 26453197 NR Description: unknown protein [Arabidopsis thaliana]
  misc_feature (1)..(112): Homolog of NCBI NO: 11357729 NR Description: hypothetical protein F2K13_20 - Arabidopsis
  misc_feature (1)..(112): Homolog of NCBI NO: 21592675 NR Description: unknown [Arabidopsis thaliana]
  misc_feature (1)..(112): Homolog of NCBI NO: 18418110 NR Description: putative protein
  misc_feature (1)..(112): Homolog of NCBI NO: 15228442 NR Description: unknown protein; protein id: At3g03010.1
MVLVVRNDLKMGKGKIAAQCSHATLGLYKKLLQRAPKALNRWEYCAQPKVVVKIESEEEMLVLQERAKTLKLPTHITIDAGKTQIAPNSRTVMAILGPVDNVDEVTGGLKLM

SEQ ID NO: 37165 - protein, 102 aa, Arabidopsis thaliana
  peptide (1)..(102): Ceres Seq. ID no. 12580164
  misc_feature (1)..(88): Pfam Name: Domain of unknown function UPF0099 Pfam Description: Domain of unknown function UPF0099
  misc_feature (1)..(101): Homolog of NCBI NO: 29428218 NR Description: Protein CGI-147
  misc_feature (1)..(101): Homolog of NCBI NO: 40889414 NR Description: Chain A, Crystal Structure Of Bit1
  misc_feature (1)..(101): Homolog of NCBI NO: 11359891 NR Description: hypothetical protein DKFZp434A1535.1 - human
  misc_feature (1)..(101): Homolog of NCBI NO: 7706351 NR Description: CGI-147 protein [Homo sapiens]
  misc_feature (1)..(102): Homolog of NCBI NO: 38345901 NR Description: OSJNBa0060D06.11 [Oryza sativa (japonica
  misc_feature (1)..(31): Homolog of NCBI NO: 26453197 NR Description: unknown protein [Arabidopsis thaliana]
  misc_feature (1)..(102): Homolog of NCBI NO: 11357729 NR Description: hypothetical protein F2K13_20 - Arabidopsis
  misc_feature (1)..(102): Homolog of NCBI NO: 21592675 NR Description: unknown [Arabidopsis thaliana]
  misc_feature (1)..(102): Homolog of NCBI NO: 18418110 NR Description: putative protein
  misc_feature (1)..(102): Homolog of NCBI NO: 15228442 NR Description: unknown protein; protein id: At3g03010.1
MGKGKIAAQCSHATLGLYKKLLQRAPKALNRWEYCAQPKVVVKIESEEEMLVLQERAKTLKLPTHITIDAGKTQIAPNSRTVMAILGPVDNVDEVTGGLKLM

SEQ ID NO: 37166 - DNA, 854 bp, Arabidopsis thaliana
  misc_feature (1)..(854): Ceres Seq. ID no. 13509066
  misc_feature: MA Experiment ID: 20000439 Result: Down-regulated in Transcription
  misc_feature: MA Experiment 20000439 PARAMETER Experiment Name: At_Roots__P Parameter: Age (day) Value: 14 vs. 21
  misc_feature: MA Experiment 20000439 PARAMETER Experiment Name: At_Roots__P Parameter: Organism Value: A. thaliana
  misc_feature: MA Experiment 20000439 PARAMETER Experiment Name: At_Roots__P Parameter: Tissue Value: Roots vs. Whole Plant
  misc_feature: MA Experiment ID: 20000794 Result: Down-regulated in Transcription
  misc_feature: MA Experiment 20000794 PARAMETER Experiment Name: At_Petals_P Parameter: Age (day) Value: 23-25 days
  misc_feature: MA Experiment 20000794 PARAMETER Experiment Name: At_Petals_P Parameter: Plant Line Value: WS
  misc_feature: MA Experiment 20000794 PARAMETER Experiment Name: At_Petals_P Parameter: Tissue Value: Petals vs. Whole plant
  misc_feature: MA Experiment ID: 20001557 Result: Down-regulated in Transcription
  misc_feature: MA Experiment 20001557 PARAMETER Experiment Name: At_Drought_Soil_Dry_P Parameter: Age (day) Value: 27
  misc_feature: MA Experiment 20001557 PARAMETER Experiment Name: At_Drought_Soil_Dry_P Parameter: Organism Value: A. thaliana
  misc_feature: MA Experiment 20001557 PARAMETER Experiment Name: At_Drought_Soil_Dry_P Parameter: Plant Line Value: WS
  misc_feature: MA Experiment 20001557 PARAMETER Experiment Name: At_Drought_Soil_Dry_P Parameter: Post Timepoint (hr) Value: 3
  misc_feature: MA Experiment 20001557 PARAMETER Experiment Name: At_Drought_Soil_Dry_P Parameter: Post-Treatment Value: Re-Water vs. No Drought
  misc_feature: MA Experiment 20001557 PARAMETER Experiment Name: At_Drought_Soil_Dry_P Parameter: Timepoint (day) Value: 13
  misc_feature: MA Experiment 20001557 PARAMETER Experiment Name: At_Drought_Soil_Dry_P Parameter: Treatment Value: Drought vs. No Drought
aaagaaaaaaggattcctaaaaaatcagtcactcctcttaatcttctcctatctctcattttcgtgggttttgtttttgttatcttcttcgtttggatattattacatttgggactcaagaagaaatcgaatctatcgtgtgtgtagattgcttctctctatctcttctctcgctacacaacaatggctgcttacacgtgtacttcccgtccgccgatttctatccggtcagagatgagaatcgcttcctcgccgacgggttccttctctactcgacagatgttctctgtgttgccggaatcgagcggattgaggactcgcgtttctctatcttcactctcgaagaattctagggtttcccgattacgacgaggcgttatctgtgaagctcaggacactgctacaggaattccagtggtcaacgattcaacatgggactctctagttctcaaggctgatgagcctgtgtttgtcgacttttgggcaccatggtgtggaccctgcaaaatgattgatcccattgtcaacgaactcgcgcaaaagtacgccggccagttcaagttctacaaacttaacactgatgagtctcctgcaacccctggccagtatggtgttagaagcatcccaactatcatgatctttgtcaatggtgagaagaaggatacaatcatcggtgctgtctctaaagacactttagcaaccagcatcaacaaattcttgtaatgaactactagtcactgttctcttttctctgtatctctcgactctctaccttttacctatctactcatcactgttcatctagacttgtatgataatatgatgtctcaggttttcagaatttgaagtctacg

SEQ ID NO: 37167 - protein, 179 aa, Arabidopsis thaliana
  peptide (1)..(179): Ceres Seq. ID no. 13509067
  misc_feature (13)..(179): Homolog of NCBI NO: 1388088 NR Description: thioredoxin m
  misc_feature (20)..(179): Homolog of NCBI NO: 38346628 NR Description: OSJNBa0074L08.22 [Oryza sativa (japonica
  misc_feature (21)..(179): Homolog of NCBI NO: 15232567 NR Description: thioredoxin M-type 4, chloroplast precursor
  misc_feature (27)..(179): Homolog of NCBI NO: 15594012 NR Description: putative thioredoxin m2 [Pisum sativum]
  misc_feature (21)..(179): Homolog of NCBI NO: 6539614 NR Description: thioredoxin m4 [Arabidopsis thaliana]
  misc_feature (1)..(179): Homolog of NCBI NO: 21618235 NR Description: putative M-type thioredoxin [Arabidopsis thaliana]
  misc_feature (1)..(179): Homolog of NCBI NO: 6539610 NR Description: thioredoxin m2 [Arabidopsis thaliana]
  misc_feature (1)..(179): Homolog of NCBI NO: 15236327 NR Description: thioredoxin M-type 2, chloroplast precursor
  misc_feature (1)..(179): Homolog of NCBI NO: 11135407 NR Description: Thioredoxin M-type, chloroplast precursor (TRX-M)
  misc_feature (1)..(179): Homolog of NCBI NO: 30678634 NR Description: thioredoxin M-type 1, chloroplast precursor
  misc_feature (13)..(179): Homolog of NCBI NO: 1388088 NR Description: thioredoxin m
  misc_feature (20)..(179): Homolog of NCBI NO: 38346628 NR Description: OSJNBa0074L08.22 [Oryza sativa (japonica
  misc_feature (21)..(179): Homolog of NCBI NO: 15232567 NR Description: thioredoxin M-type 4, chloroplast precursor
  misc_feature (27)..(179): Homolog of NCBI NO: 15594012 NR Description: putative thioredoxin m2 [Pisum sativum]
  misc_feature (21)..(179): Homolog of NCBI NO: 6539614 NR Description: thioredoxin m4 [Arabidopsis thaliana]
  misc_feature (1)..(179): Homolog of NCBI NO: 21618235 NR Description: putative M-type thioredoxin [Arabidopsis thaliana]
  misc_feature (1)..(179): Homolog of NCBI NO: 6539610 NR Description: thioredoxin m2 [Arabidopsis thaliana]
  misc_feature (1)..(179): Homolog of NCBI NO: 15236327 NR Description: thioredoxin M-type 2, chloroplast precursor
  misc_feature (1)..(179): Homolog of NCBI NO: 11135407 NR Description: Thioredoxin M-type, chloroplast precursor (TRX-M)
  misc_feature (1)..(179): Homolog of NCBI NO: 30678634 NR Description: thioredoxin M-type 1, chloroplast precursor
MAAYTCTSRPPISIRSEMRIASSPTGSFSTRQMFSVLPESSGLRTRVSLSSLSKNSRVSRLRRGVICEAQDTATGIPVVNDSTWDSLVLKADEPVFVDFWAPWCGPCKMIDPIVNELAQKYAGQFKFYKLNTDESPATPGQYGVRSIPTIMIFVNGEKKDTIIGAVSKDTLATSINKFL

SEQ ID NO: 37168 - protein, 162 aa, Arabidopsis thaliana
  peptide (1)..(162): Ceres Seq. ID no. 13509068
  misc_feature (1)..(162): Homolog of NCBI NO: 1388088 NR Description: thioredoxin m
  misc_feature (3)..(162): Homolog of NCBI NO: 38346628 NR Description: OSJNBa0074L08.22 [Oryza sativa (japonica
  misc_feature (4)..(162): Homolog of NCBI NO: 15232567 NR Description: thioredoxin M-type 4, chloroplast precursor
  misc_feature (10)..(162): Homolog of NCBI NO: 15594012 NR Description: putative thioredoxin m2 [Pisum sativum]
  misc_feature (4)..(162): Homolog of NCBI NO: 6539614 NR Description: thioredoxin m4 [Arabidopsis thaliana]
  misc_feature (1)..(162): Homolog of NCBI NO: 21618235 NR Description: putative M-type thioredoxin [Arabidopsis thaliana]
  misc_feature (1)..(162): Homolog of NCBI NO: 6539610 NR Description: thioredoxin m2 [Arabidopsis thaliana]
  misc_feature (1)..(162): Homolog of NCBI NO: 15236327 NR Description: thioredoxin M-type 2, chloroplast precursor
  misc_feature (1)..(162): Homolog of NCBI NO: 11135407 NR Description: Thioredoxin M-type, chloroplast precursor (TRX-M)
  misc_feature (1)..(162): Homolog of NCBI NO: 30678634 NR Description: thioredoxin M-type 1, chloroplast precursor
  misc_feature (1)..(162): Homolog of NCBI NO: 1388088 NR Description: thioredoxin m
  misc_feature (3)..(162): Homolog of NCBI NO: 38346628 NR Description: OSJNBa0074L08.22 [Oryza sativa (japonica
  misc_feature (4)..(162): Homolog of NCBI NO: 15232567 NR Description: thioredoxin M-type 4, chloroplast precursor
  misc_feature (10)..(162): Homolog of NCBI NO: 15594012 NR Description: putative thioredoxin m2 [Pisum sativum]
  misc_feature (4)..(162): Homolog of NCBI NO: 6539614 NR Description: thioredoxin m4 [Arabidopsis thaliana]
  misc_feature (1)..(162): Homolog of NCBI NO: 21618235 NR Description: putative M-type thioredoxin [Arabidopsis thaliana]
  misc_feature (1)..(162): Homolog of NCBI NO: 6539610 NR Description: thioredoxin m2 [Arabidopsis thaliana]
  misc_feature (1)..(162): Homolog of NCBI NO: 15236327 NR Description: thioredoxin M-type 2, chloroplast precursor
  misc_feature (1)..(162): Homolog of NCBI NO: 11135407 NR Description: Thioredoxin M-type, chloroplast precursor (TRX-M)
  misc_feature (1)..(162): Homolog of NCBI NO: 30678634 NR Description: thioredoxin M-type 1, chloroplast precursor
MRIASSPTGSFSTRQMFSVLPESSGLRTRVSLSSLSKNSRVSRLRRGVICEAQDTATGIPVVNDSTWDSLVLKADEPVFVDFWAPWCGPCKMIDPIVNELAQKYAGQFKFYKLNTDESPATPGQYGVRSIPTIMIFVNGEKKDTIIGAVSKDTLATSINKFL

SEQ ID NO: 37169 - protein, 147 aa, Arabidopsis thaliana
  peptide (1)..(147): Ceres Seq. ID no. 13509069
  misc_feature (1)..(147): Homolog of NCBI NO: 1388088 NR Description: thioredoxin m
  misc_feature (1)..(147): Homolog of NCBI NO: 38346628 NR Description: OSJNBa0074L08.22 [Oryza sativa (japonica
  misc_feature (1)..(147): Homolog of NCBI NO: 15232567 NR Description: thioredoxin M-type 4, chloroplast precursor
  misc_feature (1)..(147): Homolog of NCBI NO: 15594012 NR Description: putative thioredoxin m2 [Pisum sativum]
  misc_feature (1)..(147): Homolog of NCBI NO: 6539614 NR Description: thioredoxin m4 [Arabidopsis thaliana]
  misc_feature (1)..(147): Homolog of NCBI NO: 21618235 NR Description: putative M-type thioredoxin [Arabidopsis thaliana]
  misc_feature (1)..(147): Homolog of NCBI NO: 6539610 NR Description: thioredoxin m2 [Arabidopsis thaliana]
  misc_feature (1)..(147): Homolog of NCBI NO: 15236327 NR Description: thioredoxin M-type 2, chloroplast precursor
  misc_feature (1)..(147): Homolog of NCBI NO: 11135407 NR Description: Thioredoxin M-type, chloroplast precursor (TRX-M)
  misc_feature (1)..(147): Homolog of NCBI NO: 30678634 NR Description: thioredoxin M-type 1, chloroplast precursor
  misc_feature (1)..(147): Homolog of NCBI NO: 1388088 NR Description: thioredoxin m
  misc_feature (1)..(147): Homolog of NCBI NO: 38346628 NR Description: OSJNBa0074L08.22 [Oryza sativa (japonica
  misc_feature (1)..(147): Homolog of NCBI NO: 15232567 NR Description: thioredoxin M-type 4, chloroplast precursor
  misc_feature (1)..(147): Homolog of NCBI NO: 15594012 NR Description: putative thioredoxin m2 [Pisum sativum]
  misc_feature (1)..(147): Homolog of NCBI NO: 6539614 NR Description: thioredoxin m4 [Arabidopsis thaliana]
  misc_feature (1)..(147): Homolog of NCBI NO: 21618235 NR Description: putative M-type thioredoxin [Arabidopsis thaliana]
  misc_feature (1)..(147): Homolog of NCBI NO: 6539610 NR Description: thioredoxin m2 [Arabidopsis thaliana]
  misc_feature (1)..(147): Homolog of NCBI NO: 15236327 NR Description: thioredoxin M-type 2, chloroplast precursor
  misc_feature (1)..(147): Homolog of NCBI NO: 11135407 NR Description: Thioredoxin M-type, chloroplast precursor (TRX-M)
  misc_feature (1)..(147): Homolog of NCBI NO: 30678634 NR Description: thioredoxin M-type 1, chloroplast precursor
MFSVLPESSGLRTRVSLSSLSKNSRVSRLRRGVICEAQDTATGIPVVNDSTWDSLVLKADEPVFVDFWAPWCGPCKMIDPIVNELAQKYAGQFKFYKLNTDESPATPGQYGVRSIPTIMIFVNGEKKDTIIGAVSKDTLATSINKFL

SEQ ID NO: 37170 - DNA, 1243 bp, Arabidopsis thaliana; identical to SEQ ID NO: 22030
  misc_feature (1)..(1243): Ceres Seq. ID no. 12562371
  misc_feature: MA Experiment ID: 20000179 Result: Down-regulated in Transcription
  misc_feature: MA Experiment 20000179 PARAMETER Experiment Name: At_Germinating_Seeds_P Parameter: Age (hr) Value: 6 vs. 0
  misc_feature: MA Experiment 20000179 PARAMETER Experiment Name: At_Germinating_Seeds_P Parameter: Tissue Value: Germinating Seeds
  misc_feature: MA Experiment ID: 20000180 Result: Down-regulated in Transcription
  misc_feature: MA Experiment 20000180 PARAMETER Experiment Name: At_Germinating_Seeds_P Parameter: Age (hr) Value: 24 vs. 0
  misc_feature: MA Experiment 20000180 PARAMETER Experiment Name: At_Germinating_Seeds_P Parameter: Tissue Value: Germinating Seeds
  misc_feature: MA Experiment ID: 20000437 Result: Up-regulated in Transcription
  misc_feature: MA Experiment 20000437 PARAMETER Experiment Name: At_Drought_P Parameter: Age (day) Value: 8
  misc_feature: MA Experiment 20000437 PARAMETER Experiment Name: At_Drought_P Parameter: Organism Value: A. thaliana
  misc_feature: MA Experiment 20000437 PARAMETER Experiment Name: At_Drought_P Parameter: Plant Line Value: WS
  misc_feature: MA Experiment 20000437 PARAMETER Experiment Name: At_Drought_P Parameter: Timepoint (hr) Value: 24
  misc_feature: MA Experiment 20000437 PARAMETER Experiment Name: At_Drought_P Parameter: Tissue Value: Whole Plant
  misc_feature: MA Experiment 20000437 PARAMETER Experiment Name: At_Drought_P Parameter: Treatment Value: Drought vs. No Drought
  misc_feature: MA Experiment ID: 20001450 Result: Up-regulated in Transcription
  misc_feature: MA Experiment 20001450 PARAMETER Experiment Name: At_Far-red-induction_P Parameter: Age (day) Value: 7
  misc_feature: MA Experiment 20001450 PARAMETER Experiment Name: At_Far-red-induction_P Parameter: Light Value: Far-red vs. White
  misc_feature: MA Experiment 20001450 PARAMETER Experiment Name: At_Far-red-induction_P Parameter: Organism Value: A. thaliana
  misc_feature: MA Experiment 20001450 PARAMETER Experiment Name: At_Far-red-induction_P Parameter: Plant Line Value: Columbia
  misc_feature: MA Experiment 20001450 PARAMETER Experiment Name: At_Far-red-induction_P Parameter: Timepoint (hr) Value: 8
  misc_feature: MA Experiment 20001450 PARAMETER Experiment Name: At_Far-red-induction_P Parameter: Tissue Value: Whole Plant
  misc_feature: MA Experiment ID: 20001451 Result: Up-regulated in Transcription
  misc_feature: MA Experiment 20001451 PARAMETER Experiment Name: At_Far-red-induction_P Parameter: Age (day) Value: 7
  misc_feature: MA Experiment 20001451 PARAMETER Experiment Name: At_Far-red-induction_P Parameter: Light Value: Far-red vs. White
  misc_feature: MA Experiment 20001451 PARAMETER Experiment Name: At_Far-red-induction_P Parameter: Organism Value: A. thaliana
  misc_feature: MA Experiment 20001451 PARAMETER Experiment Name: At_Far-red-induction_P Parameter: Plant Line Value: Columbia
  misc_feature: MA Experiment 20001451 PARAMETER Experiment Name: At_Far-red-induction_P Parameter: Timepoint (hr) Value: 24
  misc_feature: MA Experiment 20001451 PARAMETER Experiment Name: At_Far-red-induction_P Parameter: Tissue Value: Whole Plant
  misc_feature: Phenotype: ROSETTE LEAVES Shape-Serrate
  misc_feature: Phenotype: ROSETTE LEAVES Shape-Serrate
  misc_feature: Phenotype: WHOLE PLANT Other
  misc_feature: Phenotype: INFLORESCENCE Flowering Time-Late Flowering
  misc_feature: Phenotype: INFLORESCENCE Height-Short
  misc_feature: Phenotype: ROSETTE LEAVES Shape-Serrate
  misc_feature: Phenotype: WHOLE PLANT Other
  misc_feature: Phenotype: ROSETTE LEAVES Shape-Serrate
  misc_feature: Phenotype: ROSETTE LEAVES Other
  misc_feature: Phenotype: WHOLE PLANT Size-Small
  misc_feature: Phenotype: WHOLE PLANT Size-Small
  misc_feature: Phenotype: WHOLE PLANT Other
  misc_feature: Phenotype: INFLORESCENCE Flowering Time-Late Flowering
  misc_feature: Phenotype: INFLORESCENCE Height-Short
  misc_feature: Phenotype: INFLORESCENCE Strength-Weak
  misc_feature: Phenotype: ROSETTE LEAVES Shape-Serrate
  misc_feature: Phenotype: WHOLE PLANT Size-Small
  misc_feature: Phenotype: WHOLE PLANT Other
  misc_feature: Phenotype: WHOLE PLANT Color-Yellow-Green Viable 2
  misc_feature: Phenotype: WHOLE PLANT Size-Small
  misc_feature: Phenotype: ROSETTE LEAVES Shape-Serrate
  misc_feature: Phenotype: WHOLE PLANT Color-Yellow-Green Viable 2
  misc_feature: Phenotype: WHOLE PLANT Size-Small
  misc_feature: Phenotype: WHOLE PLANT Size-Small
  misc_feature: Phenotype: WHOLE PLANT Color-Yellow-Green Viable 3
  misc_feature: Phenotype: WHOLE PLANT Size-Small

SEQ ID NO: 37171 - protein, 244 aa, Arabidopsis thaliana; identical to SEQ ID NO: 20888
  peptide (1)..(244): Ceres Seq. ID no. 12562372
  misc_feature (90)..(160): Pfam Name: RNA recognition motif. (a.k.a. RRM, RBD, or RNP domain) Pfam Description: RNA recognition motif. (a.k.a. RRM, RBD, or RNP
  misc_feature (90)..(160): Pfam Name: RNA recognition motif. (a.k.a. RRM, RBD, or RNP domain) Pfam Description: RNA recognition motif. (a.k.a. RRM, RBD, or RNP
  misc_feature (90)..(160): Pfam Name: RNA recognition motif. (a.k.a. RRM, RBD, or RNP domain) Pfam Description: RNA recognition motif. (a.k.a. RRM, RBD, or RNP
  misc_feature (90)..(160): Pfam Name: RNA recognition motif. (a.k.a. RRM, RBD, or RNP domain) Pfam Description: RNA recognition motif. (a.k.a. RRM, RBD, or RNP
  misc_feature (18)..(219): Homolog of NCBI NO: 30679669 NR Description: RNA and export factor binding protein, putative
  misc_feature (18)..(219): Homolog of NCBI NO: 11358209 NR Description: hypothetical protein T22P11.120 - Arabidopsis
  misc_feature (1)..(36): Homolog of NCBI NO: 30411083 NR Description: Similar to THO complex 4 [Homo sapiens]
  misc_feature (18)..(244): Homolog of NCBI NO: 30411083 NR Description: Similar to THO complex 4 [Homo sapiens]
  misc_feature (1)..(36): Homolog of NCBI NO: 6755763 NR Description: RNA and export factor binding protein 1
  misc_feature (18)..(219): Homolog of NCBI NO: 30679669 NR Description: RNA and export factor binding protein, putative
  misc_feature (1)..(36): Homolog of NCBI NO: 30411083 NR Description: Similar to THO complex 4 [Homo sapiens]
  misc_feature (1)..(36): Homolog of NCBI NO: 6755763 NR Description: RNA and export factor binding protein 1
  misc_feature (18)..(244): Homolog of NCBI NO: 30411083 NR Description: Similar to THO complex 4 [Homo sapiens]
  misc_feature (1)..(36): Homolog of NCBI NO: 30411083 NR Description: Similar to THO complex 4 [Homo sapiens]
  misc_feature (18)..(219): Homolog of NCBI NO: 11358209 NR Description: hypothetical protein T22P11.120 - Arabidopsis
  misc_feature (18)..(219): Homolog of NCBI NO: 30679669 NR Description: RNA and export factor binding protein, putative
  misc_feature (1)..(244): Homolog of NCBI NO: 30697310 NR Description: RNA and export factor binding protein, putative
  misc_feature (1)..(244): Homolog of NCBI NO: 30697313 NR Description: RNA and export factor binding protein, putative
  misc_feature (1)..(244): Homolog of NCBI NO: 21555029 NR Description: transcriptional coactivator-like protein
  misc_feature (1)..(244): Homolog of NCBI NO: 9757916 NR Description: RNA and export factor binding protein 2-I-like
  misc_feature (14)..(244): Homolog of NCBI NO: 6755763 NR Description: RNA and export factor binding protein 1
  misc_feature (1)..(244): Homolog of NCBI NO: 30697310 NR Description: RNA and export factor binding protein, putative
  misc_feature (1)..(244): Homolog of NCBI NO: 30697313 NR Description: RNA and export factor binding protein, putative
  misc_feature (1)..(244): Homolog of NCBI NO: 21555029 NR Description: transcriptional coactivator-like protein
  misc_feature (1)..(244): Homolog of NCBI NO: 9757916 NR Description: RNA and export factor binding protein 2-I-like
  misc_feature (14)..(244): Homolog of NCBI NO: 6755763 NR Description: RNA and export factor binding protein 1
  misc_feature (1)..(36): Homolog of NCBI NO: 6755763 NR Description: RNA and export factor binding protein 1
  misc_feature (18)..(244): Homolog of NCBI NO: 30411083 NR Description: Similar to THO complex 4 [Homo sapiens]
  misc_feature (1)..(36): Homolog of NCBI NO: 30411083 NR Description: Similar to THO complex 4 [Homo sapiens]
  misc_feature (18)..(219): Homolog of NCBI NO: 11358209 NR Description: hypothetical protein T22P11.120 - Arabidopsis
  misc_feature (18)..(219): Homolog of NCBI NO: 30679669 NR Description: RNA and export factor binding protein, putative
  misc_feature (1)..(244): Homolog of NCBI NO: 30697310 NR Description: RNA and export factor binding protein, putative
  misc_feature (1)..(244): Homolog of NCBI NO: 30697313 NR Description: RNA and export factor binding protein, putative
  misc_feature (1)..(244): Homolog of NCBI NO: 21555029 NR Description: transcriptional coactivator-like protein
  misc_feature (1)..(244): Homolog of NCBI NO: 9757916 NR Description: RNA and export factor binding protein 2-I-like
  misc_feature (14)..(244): Homolog of NCBI NO: 6755763 NR Description: RNA and export factor binding protein 1
  misc_feature (1)..(36): Homolog of NCBI NO: 6755763 NR Description: RNA and export factor binding protein 1
  misc_feature (18)..(244): Homolog of NCBI NO: 30411083 NR Description: Similar to THO complex 4 [Homo sapiens]
  misc_feature (18)..(219): Homolog of NCBI NO: 11358209 NR Description: hypothetical protein T22P11.120 - Arabidopsis
  misc_feature (14)..(244): Homolog of NCBI NO: 6755763 NR Description: RNA and export factor binding protein 1
  misc_feature (1)..(244): Homolog of NCBI NO: 9757916 NR Description: RNA and export factor binding protein 2-I-like
  misc_feature (1)..(244): Homolog of NCBI NO: 21555029 NR Description: transcriptional coactivator-like protein
  misc_feature (1)..(244): Homolog of NCBI NO: 30697313 NR Description: RNA and export factor binding protein, putative
  misc_feature (1)..(244): Homolog of NCBI NO: 30697310 NR Description: RNA and export factor binding protein, putative

SEQ ID NO: 37172 - protein, 238 aa, Arabidopsis thaliana; identical to SEQ ID NO: 20889
  peptide (1)..(238): Ceres Seq. ID no. 12562373
  misc_feature (84)..(154): Pfam Name: RNA recognition motif. (a.k.a. RRM, RBD, or RNP domain) Pfam Description: RNA recognition motif. (a.k.a. RRM, RBD, or RNP
  misc_feature (84)..(154): Pfam Name: RNA recognition motif. (a.k.a. RRM, RBD, or RNP domain) Pfam Description: RNA recognition motif. (a.k.a. RRM, RBD, or RNP
  misc_feature (84)..(154): Pfam Name: RNA recognition motif. (a.k.a. RRM, RBD, or RNP domain) Pfam Description: RNA recognition motif. (a.k.a. RRM, RBD, or RNP
  misc_feature (84)..(154): Pfam Name: RNA recognition motif. (a.k.a. RRM, RBD, or RNP domain) Pfam Description: RNA recognition motif. (a.k.a. RRM, RBD, or RNP
  misc_feature (12)..(213): Homolog of NCBI NO: 30679669 NR Description: RNA and export factor binding protein, putative
  misc_feature (12)..(213): Homolog of NCBI NO: 11358209 NR Description: hypothetical protein T22P11.120 - Arabidopsis
  misc_feature (1)..(30): Homolog of NCBI NO: 30411083 NR Description: Similar to THO complex 4 [Homo sapiens]
  misc_feature (12)..(238): Homolog of NCBI NO: 30411083 NR Description: Similar to THO complex 4 [Homo sapiens]
  misc_feature (1)..(30): Homolog of NCBI NO: 6755763 NR Description: RNA and export factor binding protein 1
  misc_feature (12)..(213): Homolog of NCBI NO: 30679669 NR Description: RNA and export factor binding protein, putative
  misc_feature (1)..(30): Homolog of NCBI NO: 30411083 NR Description: Similar to THO complex 4 [Homo sapiens]
  misc_feature (1)..(30): Homolog of NCBI NO: 6755763 NR Description: RNA and export factor binding protein 1
  misc_feature (12)..(238): Homolog of NCBI NO: 30411083 NR Description: Similar to THO complex 4 [Homo sapiens]
  misc_feature (1)..(30): Homolog of NCBI NO: 30411083 NR Description: Similar to THO complex 4 [Homo sapiens]
  misc_feature (12)..(213): Homolog of NCBI NO: 11358209 NR Description: hypothetical protein T22P11.120 - Arabidopsis
  misc_feature (12)..(213): Homolog of NCBI NO: 30679669 NR Description: RNA and export factor binding protein, putative
  misc_feature (1)..(238): Homolog of NCBI NO: 30697310 NR Description: RNA and export factor binding protein, putative
  misc_feature (1)..(238): Homolog of NCBI NO: 30697313 NR Description: RNA and export factor binding protein, putative
  misc_feature (1)..(238): Homolog of NCBI NO: 21555029 NR Description: transcriptional coactivator-like protein
  misc_feature (1)..(238): Homolog of NCBI NO: 9757916 NR Description: RNA and export factor binding protein 2-I-like
  misc_feature (8)..(238): Homolog of NCBI NO: 6755763 NR Description: RNA and export factor binding protein 1
  misc_feature (1)..(238): Homolog of NCBI NO: 30697310 NR Description: RNA and export factor binding protein, putative
  misc_feature (1)..(238): Homolog of NCBI NO: 30697313 NR Description: RNA and export factor binding protein, putative
  misc_feature (1)..(238): Homolog of NCBI NO: 21555029 NR Description: transcriptional coactivator-like protein
  misc_feature (1)..(238): Homolog of NCBI NO: 9757916 NR Description: RNA and export factor binding protein 2-I-like
  misc_feature (8)..(238): Homolog of NCBI NO: 6755763 NR Description: RNA and export factor binding protein 1
  misc_feature (1)..(30): Homolog of NCBI NO: 6755763 NR Description: RNA and export factor binding protein 1
  misc_feature (12)..(238): Homolog of NCBI NO: 30411083 NR Description: Similar to THO complex 4 [Homo sapiens]
  misc_feature (1)..(30): Homolog of NCBI NO: 30411083 NR Description: Similar to THO complex 4 [Homo sapiens]
  misc_feature (12)..(213): Homolog of NCBI NO: 11358209 NR Description: hypothetical protein T22P11.120 - Arabidopsis
  misc_feature (12)..(213): Homolog of NCBI NO: 30679669 NR Description: RNA and export factor binding protein, putative
  misc_feature (1)..(238): Homolog of NCBI NO: 30697310 NR Description: RNA and export factor binding protein, putative
  misc_feature (1)..(238): Homolog of NCBI NO: 30697313 NR Description: RNA and export factor binding protein, putative
  misc_feature (1)..(238): Homolog of NCBI NO: 21555029 NR Description: transcriptional coactivator-like protein
  misc_feature (1)..(238): Homolog of NCBI NO: 9757916 NR Description: RNA and export factor binding protein 2-I-like
  misc_feature (8)..(238): Homolog of NCBI NO: 6755763 NR Description: RNA and export factor binding protein 1
  misc_feature (1)..(30): Homolog of NCBI NO: 6755763 NR Description: RNA and export factor binding protein 1
  misc_feature (12)..(238): Homolog of NCBI NO: 30411083 NR Description: Similar to THO complex 4 [Homo sapiens]
  misc_feature (12)..(213): Homolog of NCBI NO: 11358209 NR Description: hypothetical protein T22P11.120 - Arabidopsis
  misc_feature (8)..(238): Homolog of NCBI NO: 6755763 NR Description: RNA and export factor binding protein 1
  misc_feature (1)..(238): Homolog of NCBI NO: 9757916 NR Description: RNA and export factor binding protein 2-I-like
  misc_feature (1)..(238): Homolog of NCBI NO: 21555029 NR Description: transcriptional coactivator-like protein
  misc_feature (1)..(238): Homolog of NCBI NO: 30697313 NR Description: RNA and export factor binding protein, putative
  misc_feature (1)..(238): Homolog of NCBI NO: 30697310 NR Description: RNA and export factor binding protein, putative

SEQ ID NO: 37173 - protein, 233 aa, Arabidopsis thaliana; identical to SEQ ID NO: 22033
  peptide (1)..(233): Ceres Seq. ID no. 12562374
  misc_feature (79)..(149): Pfam Name: RNA recognition motif. (a.k.a. RRM, RBD, or RNP domain) Pfam Description: RNA recognition motif. (a.k.a. RRM, RBD, or RNP
  misc_feature (79)..(149): Pfam Name: RNA recognition motif. (a.k.a. RRM, RBD, or RNP domain) Pfam Description: RNA recognition motif. (a.k.a. RRM, RBD, or RNP
  misc_feature (79)..(149): Pfam Name: RNA recognition motif. (a.k.a. RRM, RBD, or RNP domain) Pfam Description: RNA recognition motif. (a.k.a. RRM, RBD, or RNP
  misc_feature (79)..(149): Pfam Name: RNA recognition motif. (a.k.a. RRM, RBD, or RNP domain) Pfam Description: RNA recognition motif. (a.k.a. RRM, RBD, or RNP
  misc_feature (7)..(208): Homolog of NCBI NO: 30679669 NR Description: RNA and export factor binding protein, putative
  misc_feature (7)..(208): Homolog of NCBI NO: 11358209 NR Description: hypothetical protein T22P11.120 - Arabidopsis
  misc_feature (1)..(25): Homolog of NCBI NO: 30411083 NR Description: Similar to THO complex 4 [Homo sapiens]
  misc_feature (7)..(233): Homolog of NCBI NO: 30411083 NR Description: Similar to THO complex 4 [Homo sapiens]
  misc_feature (1)..(25): Homolog of NCBI NO: 6755763 NR Description: RNA and export factor binding protein 1
  misc_feature (7)..(208): Homolog of NCBI NO: 30679669 NR Description: RNA and export factor binding protein, putative
  misc_feature (1)..(25): Homolog of NCBI NO: 30411083 NR Description: Similar to THO complex 4 [Homo sapiens]
  misc_feature (1)..(25): Homolog of NCBI NO: 6755763 NR Description: RNA and export factor binding protein 1
  misc_feature (7)..(233): Homolog of NCBI NO: 30411083 NR Description: Similar to THO complex 4 [Homo sapiens]
  misc_feature (1)..(25): Homolog of NCBI NO: 30411083 NR Description: Similar to THO complex 4 [Homo sapiens]
  misc_feature (7)..(208): Homolog of NCBI NO: 11358209 NR Description: hypothetical protein T22P11.120 - Arabidopsis
  misc_feature (7)..(208): Homolog of NCBI NO: 30679669 NR Description: RNA and export factor binding protein, putative
  misc_feature (1)..(233): Homolog of NCBI NO: 30697310 NR Description: RNA and export factor binding protein, putative
  misc_feature (1)..(233): Homolog of NCBI NO: 30697313 NR Description: RNA and export factor binding protein, putative
  misc_feature (1)..(233): Homolog of NCBI NO: 21555029 NR Description: transcriptional coactivator-like protein
  misc_feature (1)..(233): Homolog of NCBI NO: 9757916 NR Description: RNA and export factor binding protein 2-I-like
  misc_feature (3)..(233): Homolog of NCBI NO: 6755763 NR Description: RNA and export factor binding protein 1
  misc_feature (1)..(233): Homolog of NCBI NO: 30697310 NR Description: RNA and export factor binding protein, putative
  misc_feature (1)..(233): Homolog of NCBI NO: 30697313 NR Description: RNA and export factor binding protein, putative
  misc_feature (1)..(233): Homolog of NCBI NO: 21555029 NR Description: transcriptional coactivator-like protein
  misc_feature (1)..(233): Homolog of NCBI NO: 9757916 NR Description: RNA and export factor binding protein 2-I-like
  misc_feature (3)..(233): Homolog of NCBI NO: 6755763 NR Description: RNA and export factor binding protein 1
  misc_feature (1)..(25): Homolog of NCBI NO: 6755763 NR Description: RNA and export factor binding protein 1
  misc_feature (7)..(233): Homolog of NCBI NO: 30411083 NR Description: Similar to THO complex 4 [Homo sapiens]
  misc_feature (1)..(25): Homolog of NCBI NO: 30411083 NR Description: Similar to THO complex 4 [Homo sapiens]
  misc_feature (7)..(208): Homolog of NCBI NO: 11358209 NR Description: hypothetical protein T22P11.120 - Arabidopsis
  misc_feature (7)..(208): Homolog of NCBI NO: 30679669 NR Description: RNA and export factor binding protein, putative
  misc_feature (1)..(233): Homolog of NCBI NO: 30697310 NR Description: RNA and export factor binding protein, putative
  misc_feature (1)..(233): Homolog of NCBI NO: 30697313 NR Description: RNA and export factor binding protein, putative
  misc_feature (1)..(233): Homolog of NCBI NO: 21555029 NR Description: transcriptional coactivator-like protein
  misc_feature (1)..(233): Homolog of NCBI NO: 9757916 NR Description: RNA and export factor binding protein 2-I-like
  misc_feature (3)..(233): Homolog of NCBI NO: 6755763 NR Description: RNA and export factor binding protein 1
  misc_feature (1)..(25): Homolog of NCBI NO: 6755763 NR Description: RNA and export factor binding protein 1
  misc_feature (7)..(233): Homolog of NCBI NO: 30411083 NR Description: Similar to THO complex 4 [Homo sapiens]
  misc_feature (7)..(208): Homolog of NCBI NO: 11358209 NR Description: hypothetical protein T22P11.120 - Arabidopsis
  misc_feature (3)..(233): Homolog of NCBI NO: 6755763 NR Description: RNA and export factor binding protein 1
  misc_feature (1)..(233): Homolog of NCBI NO: 9757916 NR Description: RNA and export factor binding protein 2-I-like
  misc_feature (1)..(233): Homolog of NCBI NO: 21555029 NR Description: transcriptional coactivator-like protein
  misc_feature (1)..(233): Homolog of NCBI NO: 30697313 NR Description: RNA and export factor binding protein, putative
  misc_feature (1)..(233): Homolog of NCBI NO: 30697310 NR Description: RNA and export factor binding protein, putative

SEQ ID NO: 37174 - DNA, 1006 bp, Arabidopsis thaliana
  misc_feature (1)..(1006): Ceres Seq. ID no. 13491607
  misc_feature: MA Experiment ID: 108434 Result: Up-regulated in Transcription
  misc_feature: MA Experiment 108434 PARAMETER Experiment Name: At_Root_Tips_cDNA_P Parameter: Tissue Value: Root Tips
  misc_feature: MA Experiment ID: 108462 Result: Down-regulated in Transcription
  misc_feature: MA Experiment 108462 PARAMETER Experiment Name: At_Germinating_Seeds_cDNA_P Parameter: Age (day) Value: 2 vs. 0
  misc_feature: MA Experiment 108462 PARAMETER Experiment Name: At_Germinating_Seeds_cDNA_P Parameter: Tissue Value: Germinating Seeds
  misc_feature: MA Experiment ID: 108463 Result: Down-regulated in Transcription
  misc_feature: MA Experiment 108463 PARAMETER Experiment Name: At_Germinating_Seeds_cDNA_P Parameter: Age (day) Value: 3 vs. 0
  misc_feature: MA Experiment 108463 PARAMETER Experiment Name: At_Germinating_Seeds_cDNA_P Parameter: Tissue Value: Germinating Seeds
  misc_feature: MA Experiment ID: 108464 Result: Down-regulated in Transcription
  misc_feature: MA Experiment 108464 PARAMETER Experiment Name: At_Germinating_Seeds_cDNA_P Parameter: Age (day) Value: 4 vs. 0
  misc_feature: MA Experiment 108464 PARAMETER Experiment Name: At_Germinating_Seeds_cDNA_P Parameter: Tissue Value: Germinating Seeds
  misc_feature: MA Experiment ID: 108595 Result: Down-regulated in Transcription
  misc_feature: MA Experiment 108595 PARAMETER Experiment Name: At_Ler-pi_Ovule_cDNA_P Parameter: Plant Line Value: null
  misc_feature: MA Experiment ID: 20000437 Result: Down-regulated in Transcription
  misc_feature: MA Experiment 20000437 PARAMETER Experiment Name: At_Drought_P Parameter: Age (day) Value: 8
  misc_feature: MA Experiment 20000437 PARAMETER Experiment Name: At_Drought_P Parameter: Organism Value: A. thaliana
  misc_feature: MA Experiment 20000437 PARAMETER Experiment Name: At_Drought_P Parameter: Plant Line Value: WS
  misc_feature: MA Experiment 20000437 PARAMETER Experiment Name: At_Drought_P Parameter: Timepoint (hr) Value: 24
  misc_feature: MA Experiment 20000437 PARAMETER Experiment Name: At_Drought_P Parameter: Tissue Value: Whole Plant
  misc_feature: MA Experiment 20000437 PARAMETER Experiment Name: At_Drought_P Parameter: Treatment Value: Drought vs. No Drought
  misc_feature: MA Experiment ID: 20001560 Result: Up-regulated in Transcription
  misc_feature: MA Experiment 20001560 PARAMETER Experiment Name: At_Drought_Soil_Dry_P Parameter: Age (day) Value: 28
  misc_feature: MA Experiment 20001560 PARAMETER Experiment Name: At_Drought_Soil_Dry_P Parameter: Organism Value: A. thaliana
  misc_feature: MA Experiment 20001560 PARAMETER Experiment Name: At_Drought_Soil_Dry_P Parameter: Plant Line Value: WS
  misc_feature: MA Experiment 20001560 PARAMETER Experiment Name: At_Drought_Soil_Dry_P Parameter: Post Timepoint (hr) Value: None
  misc_feature: MA Experiment 20001560 PARAMETER Experiment Name: At_Drought_Soil_Dry_P Parameter: Post-Treatment Value: None
  misc_feature: MA Experiment 20001560 PARAMETER Experiment Name: At_Drought_Soil_Dry_P Parameter: Timepoint (day) Value: 14
  misc_feature: MA Experiment 20001560 PARAMETER Experiment Name: At_Drought_Soil_Dry_P Parameter: Treatment Value: Drought vs. No Drought
tcgtatttcaagaaatgacgaccgatgggactccaccgagacgaagcgacggccatggaaacccttttcagagtctcacttcgtctacttccggtttccgccgccgtgacatgtcgctcgatccgattccccgtttcaagacccggttcctcacacttactgaaccgtaagctgtataatttgcctacttcttcttcctcctctttgtcgacaaaagccggttggttattgggtcttggtgagaagaaaaagaaagtggatttaccggagatagtggcatctggtgacccggttctgcacgagaaggcccgagaagttgacccgggagaaatcgggtcggagcgtattcagaagataattgatgatatgattaaagttatgagattggctcctggagttggcctcgctgctcctcaaattggtgttcccttaaggattattgtattggaagatacaaaagagtatataagttacgcaccaaaggaagagattcttgctcaagaaagacgtcattttgatctcatggtgatggtgaatccggttctcaaggagagaagcaacaagaaagctcttttctttgaaggatgcttgagtgttgatggattcagagctgcggtggagagataccttgaggtggtagtgacgggctacgatcgtcaaggaaagaggattgaagtgaatgcttcaggttggcaagctaggattttgcaacatgagtgtgatcatttggatggtaatctttacgttgataagatggtaccacgcacttttaggacagtcgacaacttggacttgcctttagctgagggctgccctaagctcggacctcaatgacagattcttcaacaaaagttgtaatcttctgttttgattctttactaaaactcttctagattgagcttgactcaaataatttcaaagatgaaactttgtcggaaagagggttcttttttcgggtttggtaatggattgaaagattttcatttaataaaatattataacttaa

SEQ ID NO: 37175 - protein, 269 aa, Arabidopsis thaliana
  peptide (1)..(269): Ceres Seq. ID no. 13491608
  misc_feature (80)..(243): Homolog of NCBI NO: 21219403 NR Description: polypeptide deformylase. [Streptomyces coelicolor
  misc_feature (56)..(265): Homolog of NCBI NO: 29833891 NR Description: putative polypeptide deformylase
  misc_feature (56)..(249): Homolog of NCBI NO: 34851655 NR Description: similar to peptide deformylase-like protein
  misc_feature (87)..(262): Homolog of NCBI NO: 24645728 NR Description: CG31373-PA [Drosophila melanogaster]
  misc_feature (82)..(256): Homolog of NCBI NO: 37521298 NR Description: polypeptide deformylase [Gloeobacter violaceus]
  misc_feature (82)..(256): Homolog of NCBI NO: 39930960 NR Description: Peptide deformylase 1 (PDF 1) (Polypeptide
  misc_feature (21)..(238): Homolog of NCBI NO: 34913982 NR Description: peptide deformylase-like protein
  misc_feature (59)..(267): Homolog of NCBI NO: 17433049 NR Description: Peptide deformylase, mitochondrial precursor
  misc_feature (11)..(269): Homolog of NCBI NO: 17433051 NR Description: Peptide deformylase, mitochondrial precursor
  misc_feature (1)..(269): Homolog of NCBI NO: 18394237 NR Description: peptide deformylase-related protein [Arabidopsis
MGLHRDEATAMETLFRVSLRLLPVSAAVTCRSIRFPVSRPGSSHLLNRKLYNLPTSSSSSLSTKAGWLLGLGEKKKKVDLPEIVASGDPVLHEKAREVDPGEIGSERIQKIIDDMIKVMRLAPGVGLAAPQIGVPLRIIVLEDTKEYISYAPKEEILAQERRHFDLMVMVNPVLKERSNKKALFFEGCLSVDGFRAAVERYLEVVVTGYDRQGKRIEVNASGWQARILQHECDHLDGNLYVDKMVPRTFRTVDNLDLPLAEGCPKLGPQ

SEQ ID NO: 37176 - protein, 259 aa, Arabidopsis thaliana
  peptide (1)..(259): Ceres Seq. ID no. 13491609
  misc_feature (70)..(233): Homolog of NCBI NO: 21219403 NR Description: polypeptide deformylase. [Streptomyces coelicolor
  misc_feature (46)..(255): Homolog of NCBI NO: 29833891 NR Description: putative polypeptide deformylase
  misc_feature (46)..(239): Homolog of NCBI NO: 34851655 NR Description: similar to peptide deformylase-like protein
  misc_feature (77)..(252): Homolog of NCBI NO: 24645728 NR Description: CG31373-PA [Drosophila melanogaster]
  misc_feature (72)..(246): Homolog of NCBI NO: 37521298 NR Description: polypeptide deformylase [Gloeobacter violaceus]
  misc_feature (72)..(246): Homolog of NCBI NO: 39930960 NR Description: Peptide deformylase 1 (PDF 1) (Polypeptide
  misc_feature (11)..(228): Homolog of NCBI NO: 34913982 NR Description: peptide deformylase-like protein
  misc_feature (49)..(257): Homolog of NCBI NO: 17433049 NR Description: Peptide deformylase, mitochondrial precursor
  misc_feature (1)..(259): Homolog of NCBI NO: 17433051 NR Description: Peptide deformylase, mitochondrial precursor
  misc_feature (1)..(259): Homolog of NCBI NO: 18394237 NR Description: peptide deformylase-related protein [Arabidopsis
METLFRVSLRLLPVSAAVTCRSIRFPVSRPGSSHLLNRKLYNLPTSSSSSLSTKAGWLLGLGEKKKKVDLPEIVASGDPVLHEKAREVDPGEIGSERIQKIIDDMIKVMRLAPGVGLAAPQIGVPLRIIVLEDTKEYISYAPKEEILAQERRHFDLMVMVNPVLKERSNKKALFFEGCLSVDGFRAAVERYLEVVVTGYDRQGKRIEVNASGWQARILQHECDHLDGNLYVDKMVPRTFRTVDNLDLPLAEGCPKLGPQ

SEQ ID NO: 37177 - protein, 155 aa, Arabidopsis thaliana
  peptide (1)..(155): Ceres Seq. ID no. 13491610
  misc_feature (1)..(129): Homolog of NCBI NO: 21219403 NR Description: polypeptide deformylase. [Streptomyces coelicolor
  misc_feature (1)..(151): Homolog of NCBI NO: 29833891 NR Description: putative polypeptide deformylase
  misc_feature (1)..(135): Homolog of NCBI NO: 34851655 NR Description: similar to peptide deformylase-like protein
  misc_feature (1)..(148): Homolog of NCBI NO: 24645728 NR Description: CG31373-PA [Drosophila melanogaster]
  misc_feature (1)..(142): Homolog of NCBI NO: 37521298 NR Description: polypeptide deformylase [Gloeobacter violaceus]
  misc_feature (1)..(142): Homolog of NCBI NO: 39930960 NR Description: Peptide deformylase 1 (PDF 1) (Polypeptide
  misc_feature (1)..(124): Homolog of NCBI NO: 34913982 NR Description: peptide deformylase-like protein
  misc_feature (1)..(153): Homolog of NCBI NO: 17433049 NR Description: Peptide deformylase, mitochondrial precursor
  misc_feature (1)..(155): Homolog of NCBI NO: 17433051 NR Description: Peptide deformylase, mitochondrial precursor
  misc_feature (1)..(155): Homolog of NCBI NO: 18394237 NR Description: peptide deformylase-related protein [Arabidopsis
MIKVMRLAPGVGLAAPQIGVPLRIIVLEDTKEYISYAPKEEILAQERRHFDLMVMVNPVLKERSNKKALFFEGCLSVDGFRAAVERYLEVVVTGYDRQGKRIEVNASGWQARILQHECDHLDGNLYVDKMVPRTFRTVDNLDLPLAEGCPKLGPQ

SEQ ID NO: 37178 - DNA, 992 bp, Arabidopsis thaliana
  misc_feature (1)..(992): Ceres Seq. ID no. 12393868
  misc_feature: MA Experiment ID: 108434 Result: Down-regulated in Transcription
  misc_feature: MA Experiment 108434 PARAMETER Experiment Name: At_Root_Tips_cDNA_P Parameter: Tissue Value: Root Tips
  misc_feature: MA Experiment ID: 108462 Result: Up-regulated in Transcription
  misc_feature: MA Experiment 108462 PARAMETER Experiment Name: At_Germinating_Seeds_cDNA_P Parameter: Age (day) Value: 2 vs. 0
  misc_feature: MA Experiment 108462 PARAMETER Experiment Name: At_Germinating_Seeds_cDNA_P Parameter: Tissue Value: Germinating Seeds
  misc_feature: MA Experiment ID: 108463 Result: Up-regulated in Transcription
  misc_feature: MA Experiment 108463 PARAMETER Experiment Name: At_Germinating_Seeds_cDNA_P Parameter: Age (day) Value: 3 vs. 0
  misc_feature: MA Experiment 108463 PARAMETER Experiment Name: At_Germinating_Seeds_cDNA_P Parameter: Tissue Value: Germinating Seeds
  misc_feature: MA Experiment ID: 108464 Result: Up-regulated in Transcription
  misc_feature: MA Experiment 108464 PARAMETER Experiment Name: At_Germinating_Seeds_cDNA_P Parameter: Age (day) Value: 4 vs. 0
  misc_feature: MA Experiment 108464 PARAMETER Experiment Name: At_Germinating_Seeds_cDNA_P Parameter: Tissue Value: Germinating Seeds
  misc_feature: MA Experiment ID: 108573 Result: Down-regulated in Transcription
  misc_feature: MA Experiment 108573 PARAMETER Experiment Name: At_Drought_cDNA_P Parameter: Timepoint (hr) Value: 6
  misc_feature: MA Experiment 108573 PARAMETER Experiment Name: At_Drought_cDNA_P Parameter: Tissue Value: Aerial
  misc_feature: MA Experiment 108573 PARAMETER Experiment Name: At_Drought_cDNA_P Parameter: Treatment Value: Drought vs. No Drought
  misc_feature: MA Experiment ID: 108585 Result: Up-regulated in Transcription
  misc_feature: MA Experiment 108585 PARAMETER Experiment Name: At_5mM_NaNP_cDNA_P Parameter: Timepoint (hr) Value: 6
  misc_feature: MA Experiment 108585 PARAMETER Experiment Name: At_5mM_NaNP_cDNA_P Parameter: Tissue Value: Aerial
  misc_feature: MA Experiment 108585 PARAMETER Experiment Name: At_5mM_NaNP_cDNA_P Parameter: Treatment Value: null
  misc_feature: MA Experiment ID: 108668 Result: Up-regulated in Transcription
  misc_feature: MA Experiment 108668 PARAMETER Experiment Name: At_2mM_SA_cDNA_P Parameter: Plant Line Value: WS
  misc_feature: MA Experiment 108668 PARAMETER Experiment Name: At_2mM_SA_cDNA_P Parameter: Timepoint (hr) Value: 6
  misc_feature: MA Experiment 108668 PARAMETER Experiment Name: At_2mM_SA_cDNA_P Parameter: Treatment Value: 2mM SA vs. No Treatment
  misc_feature: MA Experiment ID: 20000090 Result: Up-regulated in Transcription
  misc_feature: MA Experiment ID: 20000111 Result: Down-regulated in Transcription
  misc_feature: MA Experiment 20000111 PARAMETER Experiment Name: At_42deg_Heat_cDNA_P Parameter: Temperature (deg C) Value: 42 vs. 22
  misc_feature: MA Experiment 20000111 PARAMETER Experiment Name: At_42deg_Heat_cDNA_P Parameter: Timepoint (hr) Value: 6
  misc_feature: MA Experiment 20000111 PARAMETER Experiment Name: At_42deg_Heat_cDNA_P Parameter: Tissue Value: Aerial
  misc_feature: MA Experiment ID: 20000144 Result: Down-regulated in Transcription
  misc_feature: MA Experiment 20000144 PARAMETER Experiment Name: At_42deg_Heat_cDNA_P Parameter: Temperature (deg C) Value: 42 vs. 22
  misc_feature: MA Experiment 20000144 PARAMETER Experiment Name: At_42deg_Heat_cDNA_P Parameter: Timepoint (hr) Value: 1
  misc_feature: MA Experiment 20000144 PARAMETER Experiment Name: At_42deg_Heat_cDNA_P Parameter: Tissue Value: Aerial
  misc_feature: MA Experiment ID: 20000171 Result: Down-regulated in Transcription
  misc_feature: MA Experiment 20000171 PARAMETER Experiment Name: At_42deg_Heat_P Parameter: Age (day) Value: 14
  misc_feature: MA Experiment 20000171 PARAMETER Experiment Name: At_42deg_Heat_P Parameter: Organism Value: A. thaliana
  misc_feature: MA Experiment 20000171 PARAMETER Experiment Name: At_42deg_Heat_P Parameter: Plant Line Value: WS
  misc_feature: MA Experiment 20000171 PARAMETER Experiment Name: At_42deg_Heat_P Parameter: Temperature (deg C) Value: 42 vs. 22
  misc_feature: MA Experiment 20000171 PARAMETER Experiment Name: At_42deg_Heat_P Parameter: Timepoint (hr) Value: 1
  misc_feature: MA Experiment 20000171 PARAMETER Experiment Name: At_42deg_Heat_P Parameter: Tissue Value: Aerial
  misc_feature: MA Experiment ID: 20000179 Result: Down-regulated in Transcription
  misc_feature: MA Experiment 20000179 PARAMETER Experiment Name: At_Germinating_Seeds_P Parameter: Age (hr) Value: 6 vs. 0
  misc_feature: MA Experiment 20000179 PARAMETER Experiment Name: At_Germinating_Seeds_P Parameter: Tissue Value: Germinating Seeds
  misc_feature: MA Experiment ID: 20000182 Result: Up-regulated in Transcription
  misc_feature: MA Experiment 20000182 PARAMETER Experiment Name: At_2mM_SA_P Parameter: Age (day) Value: 14
  misc_feature: MA Experiment 20000182 PARAMETER Experiment Name: At_2mM_SA_P Parameter: Organism Value: A. thaliana
  misc_feature: MA Experiment 20000182 PARAMETER Experiment Name: At_2mM_SA_P Parameter: Plant Line Value: WS
  misc_feature: MA Experiment 20000182 PARAMETER Experiment Name: At_2mM_SA_P Parameter: Timepoint (hr) Value: 6
  misc_feature: MA Experiment 20000182 PARAMETER Experiment Name: At_2mM_SA_P Parameter: Tissue Value: Aerial
  misc_feature: MA Experiment 20000182 PARAMETER Experiment Name: At_2mM_SA_P Parameter: Treatment Value: 2mM SA vs. No Treatment
  misc_feature: MA Experiment ID: 20000185 Result: Up-regulated in Transcription
  misc_feature: MA Experiment 20000185 PARAMETER Experiment Name: At_Roots__P Parameter: Age (day) Value: 7 vs. 21
  misc_feature: MA Experiment 20000185 PARAMETER Experiment Name: At_Roots__P Parameter: Organism Value: A. thaliana
  misc_feature: MA Experiment 20000185 PARAMETER Experiment Name: At_Roots__P Parameter: Tissue Value: Roots vs. Whole Plant
  misc_feature: MA Experiment ID: 20000224 Result: Down-regulated in Transcription
  misc_feature: MA Experiment ID: 20000264 Result: Down-regulated in Transcription
  misc_feature: MA Experiment 20000264 PARAMETER Experiment Name: At_Open_Flower_P Parameter: Age (day) Value: 21
  misc_feature: MA Experiment 20000264 PARAMETER Experiment Name: At_Open_Flower_P Parameter: Plant Line Value: WS
  misc_feature: MA Experiment 20000264 PARAMETER Experiment Name: At_Open_Flower_P Parameter: Tissue Value: Open Flower vs. Whole Plant
  misc_feature: MA Experiment ID: 20000267 Result: Down-regulated in Transcription
  misc_feature: MA Experiment 20000267 PARAMETER Experiment Name: At_Drought_P Parameter: Age (day) Value: 7
  misc_feature: MA Experiment 20000267 PARAMETER Experiment Name: At_Drought_P Parameter: Organism Value: A. thaliana
  misc_feature: MA Experiment 20000267 PARAMETER Experiment Name: At_Drought_P Parameter: Plant Line Value: WS
  misc_feature: MA Experiment 20000267 PARAMETER Experiment Name: At_Drought_P Parameter: Timepoint (hr) Value: 6
  misc_feature: MA Experiment 20000267 PARAMETER Experiment Name: At_Drought_P Parameter: Tissue Value: Whole Plant
  misc_feature: MA Experiment 20000267 PARAMETER Experiment Name: At_Drought_P Parameter: Treatment Value: Drought vs. No Drought
  misc_feature: MA Experiment ID: 20000286 Result: Down-regulated in Transcription
  misc_feature: MA Experiment 20000286 PARAMETER Experiment Name: At_Open_Flower_P Parameter: Age (day) Value: 21
  misc_feature: MA Experiment 20000286 PARAMETER Experiment Name: At_Open_Flower_P Parameter: Plant Line Value: WS
  misc_feature: MA Experiment 20000286 PARAMETER Experiment Name: At_Open_Flower_P Parameter: Tissue Value: Half Open vs. Whole Plant
  misc_feature: MA Experiment ID: 20000306 Result: Down-regulated in Transcription
  misc_feature: MA Experiment 20000306 PARAMETER Experiment Name: At_Germinating_Seeds_Sub_P Parameter: Age (hr) Value: 6 vs. 0
  misc_feature: MA Experiment 20000306 PARAMETER Experiment Name: At_Germinating_Seeds_Sub_P Parameter: Organism Value: A. thaliana
  misc_feature: MA Experiment 20000306 PARAMETER Experiment Name: At_Germinating_Seeds_Sub_P Parameter: Plant Line Value: WS
  misc_feature: MA Experiment 20000306 PARAMETER Experiment Name: At_Germinating_Seeds_Sub_P Parameter: Tissue Value: Germinating Seeds
  misc_feature: MA Experiment ID: 20000307 Result: Up-regulated in Transcription
  misc_feature: MA Experiment 20000307 PARAMETER Experiment Name: At_Germinating_Seeds_Sub_P Parameter: Age (hr) Value: 24 vs. 0
  misc_feature: MA Experiment 20000307 PARAMETER Experiment Name: At_Germinating_Seeds_Sub_P Parameter: Organism Value: A. thaliana
  misc_feature: MA Experiment 20000307 PARAMETER Experiment Name: At_Germinating_Seeds_Sub_P Parameter: Plant Line Value: WS
  misc_feature: MA Experiment 20000307 PARAMETER Experiment Name: At_Germinating_Seeds_Sub_P Parameter: Tissue Value: Germinating Seeds
  misc_feature: MA Experiment ID: 20000314 Result: Up-regulated in Transcription
  misc_feature: MA Experiment 20000314 PARAMETER Experiment Name: At_14day_Shoots-Roots_Sub_P Parameter: Age (day) Value: 14
  misc_feature: MA Experiment 20000314 PARAMETER Experiment Name: At_14day_Shoots-Roots_Sub_P Parameter: Organism Value: A. thaliana
  misc_feature: MA Experiment 20000314 PARAMETER Experiment Name: At_14day_Shoots-Roots_Sub_P Parameter: Plant Line Value: WS
  misc_feature: MA Experiment 20000314 PARAMETER Experiment Name: At_14day_Shoots-Roots_Sub_P Parameter: Tissue Value: Roots vs. Whole Plant
  misc_feature: MA Experiment ID: 20000328 Result: Down-regulated in Transcription
  misc_feature: MA Experiment 20000328 PARAMETER Experiment Name: At_42deg_Heat_Sub_P Parameter: Age (day) Value: 14
  misc_feature: MA Experiment 20000328 PARAMETER Experiment Name: At_42deg_Heat_Sub_P Parameter: Organism Value: A. thaliana
  misc_feature: MA Experiment 20000328 PARAMETER Experiment Name: At_42deg_Heat_Sub_P Parameter: Plant Line Value: WS
  misc_feature: MA Experiment 20000328 PARAMETER Experiment Name: At_42deg_Heat_Sub_P Parameter: Temperature (deg C) Value: 42 vs. 22
  misc_feature: MA Experiment 20000328 PARAMETER Experiment Name: At_42deg_Heat_Sub_P Parameter: Timepoint (hr) Value: 6
  misc_feature: MA Experiment 20000328 PARAMETER Experiment Name: At_42deg_Heat_Sub_P Parameter: Tissue Value: Aerial
  misc_feature: MA Experiment ID: 20000347 Result: Up-regulated in Transcription
  misc_feature: MA Experiment 20000347 PARAMETER Experiment Name: At_2mM_SA_Sub_P Parameter: Age (day) Value: 14
  misc_feature: MA Experiment 20000347 PARAMETER Experiment Name: At_2mM_SA_Sub_P Parameter: Organism Value: A. thaliana
  misc_feature: MA Experiment 20000347 PARAMETER Experiment Name: At_2mM_SA_Sub_P Parameter: Plant Line Value: WS
  misc_feature: MA Experiment 20000347 PARAMETER Experiment Name: At_2mM_SA_Sub_P Parameter: Timepoint (hr) Value: 6
  misc_feature: MA Experiment 20000347 PARAMETER Experiment Name: At_2mM_SA_Sub_P Parameter: Tissue Value: Aerial
  misc_feature: MA Experiment 20000347 PARAMETER Experiment Name: At_2mM_SA_Sub_P Parameter: Treatment Value: 2mM SA vs. No Treatment
  misc_feature: MA Experiment ID: 20000352 Result: Down-regulated in Transcription
  misc_feature: MA Experiment 20000352 PARAMETER Experiment Name: At_Drought_Sub_P Parameter: Age (day) Value: 7
  misc_feature: MA Experiment 20000352 PARAMETER Experiment Name: At_Drought_Sub_P Parameter: Organism Value: A. thaliana
  misc_feature: MA Experiment 20000352 PARAMETER Experiment Name: At_Drought_Sub_P Parameter: Plant Line Value: WS
  misc_feature: MA Experiment 20000352 PARAMETER Experiment Name: At_Drought_Sub_P Parameter: Timepoint (hr) Value: 6
  misc_feature: MA Experiment 20000352 PARAMETER Experiment Name: At_Drought_Sub_P Parameter: Tissue Value: Whole Plant
  misc_feature: MA Experiment 20000352 PARAMETER Experiment Name: At_Drought_Sub_P Parameter: Treatment Value: Drought vs. No Drought
  misc_feature: MA Experiment ID: 20000436 Result: Down-regulated in Transcription
  misc_feature: MA Experiment 20000436 PARAMETER Experiment Name: At_Drought_P Parameter: Age (day) Value: 7
  misc_feature: MA Experiment 20000436 PARAMETER Experiment Name: At_Drought_P Parameter: Organism Value: A. thaliana
  misc_feature: MA Experiment 20000436 PARAMETER Experiment Name: At_Drought_P Parameter: Plant Line Value: WS
  misc_feature: MA Experiment 20000436 PARAMETER Experiment Name: At_Drought_P Parameter: Timepoint (hr) Value: 12
  misc_feature: MA Experiment 20000436 PARAMETER Experiment Name: At_Drought_P Parameter: Tissue Value: Whole Plant
  misc_feature: MA Experiment 20000436 PARAMETER Experiment Name: At_Drought_P Parameter: Treatment Value: Drought vs. No Drought
  misc_feature: MA Experiment ID: 20000437 Result: Down-regulated in Transcription
  misc_feature: MA Experiment 20000437 PARAMETER Experiment Name: At_Drought_P Parameter: Age (day) Value: 8
  misc_feature: MA Experiment 20000437 PARAMETER Experiment Name: At_Drought_P Parameter: Organism Value: A. thaliana
  misc_feature: MA Experiment 20000437 PARAMETER Experiment Name: At_Drought_P Parameter: Plant Line Value: WS
  misc_feature: MA Experiment 20000437 PARAMETER Experiment Name: At_Drought_P Parameter: Timepoint (hr) Value: 24
  misc_feature: MA Experiment 20000437 PARAMETER Experiment Name: At_Drought_P Parameter: Tissue Value: Whole Plant
  misc_feature: MA Experiment 20000437 PARAMETER Experiment Name: At_Drought_P Parameter: Treatment Value: Drought vs. No Drought
  misc_feature: MA Experiment ID: 20000439 Result: Up-regulated in Transcription
  misc_feature: MA Experiment 20000439 PARAMETER Experiment Name: At_Roots__P Parameter: Age (day) Value: 14 vs. 21
  misc_feature: MA Experiment 20000439 PARAMETER Experiment Name: At_Roots__P Parameter: Organism Value: A. thaliana
  misc_feature: MA Experiment 20000439 PARAMETER Experiment Name: At_Roots__P Parameter: Tissue Value: Roots vs. Whole Plant
  misc_feature: MA Experiment ID: 20000709 Result: Down-regulated in Transcription
  misc_feature: MA Experiment 20000709 PARAMETER Experiment Name: At_15mM_NH4NO3_L-to-H_P Parameter: Age (hr) Value: 14
  misc_feature: MA Experiment 20000709 PARAMETER Experiment Name: At_15mM_NH4NO3_L-to-H_P Parameter: Organism Value: A. thaliana
  misc_feature: MA Experiment 20000709 PARAMETER Experiment Name: At_15mM_NH4NO3_L-to-H_P Parameter: Plant Line Value: WS
  misc_feature: MA Experiment 20000709 PARAMETER Experiment Name: At_15mM_NH4NO3_L-to-H_P Parameter: Timepoint (hr) Value: 4
  misc_feature: MA Experiment 20000709 PARAMETER Experiment Name: At_15mM_NH4NO3_L-to-H_P Parameter: Tissue Value: Aerial
  misc_feature: MA Experiment 20000709 PARAMETER Experiment Name: At_15mM_NH4NO3_L-to-H_P Parameter: Treatment Value: 15mM NH4NO3 vs. 30mM Mannitol
  misc_feature: MA Experiment ID: 20001557 Result: Down-regulated in Transcription
  misc_feature: MA Experiment 20001557 PARAMETER Experiment Name: At_Drought_Soil_Dry_P Parameter: Age (day) Value: 27
  misc_feature: MA Experiment 20001557 PARAMETER Experiment Name: At_Drought_Soil_Dry_P Parameter: Organism Value: A. thaliana
  misc_feature: MA Experiment 20001557 PARAMETER Experiment Name: At_Drought_Soil_Dry_P Parameter: Plant Line Value: WS
  misc_feature: MA Experiment 20001557 PARAMETER Experiment Name: At_Drought_Soil_Dry_P Parameter: Post Timepoint (hr) Value: 3
  misc_feature: MA Experiment 20001557 PARAMETER Experiment Name: At_Drought_Soil_Dry_P Parameter: Post-Treatment Value: Re-Water vs. No Drought
  misc_feature: MA Experiment 20001557 PARAMETER Experiment Name: At_Drought_Soil_Dry_P Parameter: Timepoint (day) Value: 13
  misc_feature: MA Experiment 20001557 PARAMETER Experiment Name: At_Drought_Soil_Dry_P Parameter: Treatment Value: Drought vs. No Drought
  misc_feature: MA Experiment ID: 20001558 Result: Down-regulated in Transcription
  misc_feature: MA Experiment 20001558 PARAMETER Experiment Name: At_Drought_Soil_Dry_P Parameter: Age (day) Value: 27
  misc_feature: MA Experiment 20001558 PARAMETER Experiment Name: At_Drought_Soil_Dry_P Parameter: Organism Value: A. thaliana
  misc_feature: MA Experiment 20001558 PARAMETER Experiment Name: At_Drought_Soil_Dry_P Parameter: Plant Line Value: WS
  misc_feature: MA Experiment 20001558 PARAMETER Experiment Name: At_Drought_Soil_Dry_P Parameter: Post Timepoint (hr) Value: 6
  misc_feature: MA Experiment 20001558 PARAMETER Experiment Name: At_Drought_Soil_Dry_P Parameter: Post-Treatment Value: Re-Water vs. No Drought
  misc_feature: MA Experiment 20001558 PARAMETER Experiment Name: At_Drought_Soil_Dry_P Parameter: Timepoint (day) Value: 13
  misc_feature: MA Experiment 20001558 PARAMETER Experiment Name: At_Drought_Soil_Dry_P Parameter: Treatment Value: Drought vs. No Drought
  misc_feature: MA Experiment ID: 20001773 Result: Down-regulated in Transcription
  misc_feature: MA Experiment 20001773 PARAMETER Experiment Name: At_Far-red-enriched-adult_P Parameter: Age (day) Value: 30
  misc_feature: MA Experiment 20001773 PARAMETER Experiment Name: At_Far-red-enriched-adult_P Parameter: Light Value: Far-red enriched vs. White
  misc_feature: MA Experiment 20001773 PARAMETER Experiment Name: At_Far-red-enriched-adult_P Parameter: Organism Value: A. thaliana
  misc_feature: MA Experiment 20001773 PARAMETER Experiment Name: At_Far-red-enriched-adult_P Parameter: Plant Line Value: Columbia
  misc_feature: MA Experiment 20001773 PARAMETER Experiment Name: At_Far-red-enriched-adult_P Parameter: Timepoint (hr) Value: 48
  misc_feature: MA Experiment 20001773 PARAMETER Experiment Name: At_Far-red-enriched-adult_P Parameter: Tissue Value: Aerial
  misc_feature: Phenotype: CAULINE LEAVES Size-Small
  misc_feature: Phenotype: INFLORESCENCE Height-Short
  misc_feature: Phenotype: INFLORESCENCE Strength-Weak
  misc_feature: Phenotype: FERTILITY Fertility-Reduced
  misc_feature: Phenotype: CAULINE LEAVES Size-Small
  misc_feature: Phenotype: INFLORESCENCE Height-Short
  misc_feature: Phenotype: INFLORESCENCE Strength-Weak
  misc_feature: Phenotype: FERTILITY Fertility-Reduced
  misc_feature: Phenotype: CAULINE LEAVES Size-Small
  misc_feature: Phenotype: INFLORESCENCE Height-Short
  misc_feature: Phenotype: INFLORESCENCE Strength-Weak
  misc_feature: Phenotype: FERTILITY Fertility-Reduced
  misc_feature: Phenotype: CAULINE LEAVES Size-Small
  misc_feature: Phenotype: INFLORESCENCE Height-Short
  misc_feature: Phenotype: INFLORESCENCE Strength-Weak
  misc_feature: Phenotype: FERTILITY Fertility-Reduced
atcaagatcgatccctctctaaaaatggctcaacaacactcttttctcctcttatgcttcttcctctcaatctcttatttactatcttccgcccaaaccgaagccacctcaatcgagagattagtgccaagagacctctacaacaaaattttcatccacaaggacaataccgcttgtcccgcaaatggtttctatacttacgaatcatttgtccaagcgacgaggcggtttccgagattcgggagcgtaggaagccccgtgacacaacgactcgaagtggctgcatttttggctcagatttcacacgagacgaccggaggatgggcaacggcaccagacggaccgtacgcttggggattatgctttaaagaagaagtgagtccacaaagcacttattgtgattcttctaatacacagtggccttgtttccctaacaagacttatcaaggaagaggtccaattcaactatcgtggaactacaactacggaccggccggtcgagccttaggattcgacggtctaaggaatccagaaacggtgtcaaataattcagtgatagcttttcaaacagcactttggttttggatgacgccacagagtcccaaaccttcgtgccatgacgtcatgatcggaaaataccgacctacggcggcggatttggcagctaaccggaccggcgggtttggtttaaccacaaatataataaatggcggtttagagtgtgggattcctggagacggacgggtcaatgaccgaatcgggttttttcagagatatactgggctgtttaaagtagcaactgggccgaatttggactgtgaaaatcaaaggccttatgcttaaacaattaatttggttgacccgaaatatgtatgtttataaacaaaaagtcaacatgtatgtttatggcattgcccacacatgggagccataaaaggggtttatattcaataatgtaattcaatttaatgtgatttgatggttttaattcc

SEQ ID NO: 37179 - protein, 280 aa, Arabidopsis thaliana
  peptide (1)..(280): Ceres Seq. ID no. 12393869
  misc_feature (41)..(280): Homolog of NCBI NO: 21426919 NR Description: chitinase [Leucaena leucocephala]
  misc_feature (73)..(279): Homolog of NCBI NO: 4008072 NR Description: chitinase [Cynodon dactylon]
  misc_feature (38)..(279): Homolog of NCBI NO: 34894264 NR Description: unnamed protein product [Oryza sativa (japonica
  misc_feature (34)..(272): Homolog of NCBI NO: 4008074 NR Description: chitinase [Cynodon dactylon]
  misc_feature (21)..(279): Homolog of NCBI NO: 6002766 NR Description: class II chitinase [Fragaria x ananassa]
  misc_feature (14)..(279): Homolog of NCBI NO: 2129820 NR Description: chitinase (EC 3.2.1.14) class II - peanut
  misc_feature (14)..(279): Homolog of NCBI NO: 5880847 NR Description: chitinase precursor [Petroselinum crispum]
  misc_feature (9)..(279): Homolog of NCBI NO: 5880845 NR Description: chitinase precursor [Petroselinum crispum]
  misc_feature (9)..(280): Homolog of NCBI NO: 15234281 NR Description: glycosyl hydrolase family 19 (chitinase); protein
  misc_feature (9)..(280): Homolog of NCBI NO: 15217733 NR Description: glycosyl hydrolase family 19 (chitinase); protein
IKIDPSLKMAQQHSFLLLCFFLSISYLLSSAQTEATSIERLVPRDLYNKIFIHKDNTACPANGFYTYESFVQATRRFPRFGSVGSPVTQRLEVAAFLAQISHETTGGWATAPDGPYAWGLCFKEEVSPQSTYCDSSNTQWPCFPNKTYQGRGPIQLSWNYNYGPAGRALGFDGLRNPETVSNNSVIAFQTALWFWMTPQSPKPSCHDVMIGKYRPTAADLAANRTGGFGLTTNIINGGLECGIPGDGRVNDRIGFFQRYTGLFKVATGPNLDCENQRPYA

SEQ ID NO: 37180 - protein, 272 aa, Arabidopsis thaliana
  peptide (1)..(272): Ceres Seq. ID no. 12393870
  misc_feature (33)..(272): Homolog of NCBI NO: 21426919 NR Description: chitinase [Leucaena leucocephala]
  misc_feature (65)..(271): Homolog of NCBI NO: 4008072 NR Description: chitinase [Cynodon dactylon]
  misc_feature (30)..(271): Homolog of NCBI NO: 34894264 NR Description: unnamed protein product [Oryza sativa (japonica
  misc_feature (26)..(264): Homolog of NCBI NO: 4008074 NR Description: chitinase [Cynodon dactylon]
  misc_feature (13)..(271): Homolog of NCBI NO: 6002766 NR Description: class II chitinase [Fragaria x ananassa]
  misc_feature (6)..(271): Homolog of NCBI NO: 2129820 NR Description: chitinase (EC 3.2.1.14) class II - peanut
  misc_feature (6)..(271): Homolog of NCBI NO: 5880847 NR Description: chitinase precursor [Petroselinum crispum]
  misc_feature (1)..(271): Homolog of NCBI NO: 5880845 NR Description: chitinase precursor [Petroselinum crispum]
  misc_feature (1)..(272): Homolog of NCBI NO: 15234281 NR Description: glycosyl hydrolase family 19 (chitinase); protein
  misc_feature (1)..(272): Homolog of NCBI NO: 15217733 NR Description: glycosyl hydrolase family 19 (chitinase); protein
MAQQHSFLLLCFFLSISYLLSSAQTEATSIERLVPRDLYNKIFIHKDNTACPANGFYTYESFVQATRRFPRFGSVGSPVTQRLEVAAFLAQISHETTGGWATAPDGPYAWGLCFKEEVSPQSTYCDSSNTQWPCFPNKTYQGRGPIQLSWNYNYGPAGRALGFDGLRNPETVSNNSVIAFQTALWFWMTPQSPKPSCHDVMIGKYRPTAADLAANRTGGFGLTTNIINGGLECGIPGDGRVNDRIGFFQRYTGLFKVATGPNLDCENQRPYA

SEQ ID NO: 37181 - DNA, 693 bp, Arabidopsis thaliana
  misc_feature (1)..(693): Ceres Seq. ID no. 12603444
  misc_feature: MA Experiment ID: 20000184 Result: Up-regulated in Transcription
  misc_feature: MA Experiment 20000184 PARAMETER Experiment Name: At_Shoots__P Parameter: Age (day) Value: 7
  misc_feature: MA Experiment 20000184 PARAMETER Experiment Name: At_Shoots__P Parameter: Tissue Value: Shoots vs. Whole Plant
  misc_feature: MA Experiment ID: 20001451 Result: Up-regulated in Transcription
  misc_feature: MA Experiment 20001451 PARAMETER Experiment Name: At_Far-red-induction_P Parameter: Age (day) Value: 7
  misc_feature: MA Experiment 20001451 PARAMETER Experiment Name: At_Far-red-induction_P Parameter: Light Value: Far-red vs. White
  misc_feature: MA Experiment 20001451 PARAMETER Experiment Name: At_Far-red-induction_P Parameter: Organism Value: A. thaliana
  misc_feature: MA Experiment 20001451 PARAMETER Experiment Name: At_Far-red-induction_P Parameter: Plant Line Value: Columbia
  misc_feature: MA Experiment 20001451 PARAMETER Experiment Name: At_Far-red-induction_P Parameter: Timepoint (hr) Value: 24
  misc_feature: MA Experiment 20001451 PARAMETER Experiment Name: At_Far-red-induction_P Parameter: Tissue Value: Whole Plant
  misc_feature: MA Experiment ID: 20001557 Result: Up-regulated in Transcription
  misc_feature: MA Experiment 20001557 PARAMETER Experiment Name: At_Drought_Soil_Dry_P Parameter: Age (day) Value: 27
  misc_feature: MA Experiment 20001557 PARAMETER Experiment Name: At_Drought_Soil_Dry_P Parameter: Organism Value: A. thaliana
  misc_feature: MA Experiment 20001557 PARAMETER Experiment Name: At_Drought_Soil_Dry_P Parameter: Plant Line Value: WS
  misc_feature: MA Experiment 20001557 PARAMETER Experiment Name: At_Drought_Soil_Dry_P Parameter: Post Timepoint (hr) Value: 3
  misc_feature: MA Experiment 20001557 PARAMETER Experiment Name: At_Drought_Soil_Dry_P Parameter: Post-Treatment Value: Re-Water vs. No Drought
  misc_feature: MA Experiment 20001557 PARAMETER Experiment Name: At_Drought_Soil_Dry_P Parameter: Timepoint (day) Value: 13
  misc_feature: MA Experiment 20001557 PARAMETER Experiment Name: At_Drought_Soil_Dry_P Parameter: Treatment Value: Drought vs. No Drought
  misc_feature: MA Experiment ID: 20001560 Result: Up-regulated in Transcription
  misc_feature: MA Experiment 20001560 PARAMETER Experiment Name: At_Drought_Soil_Dry_P Parameter: Age (day) Value: 28
  misc_feature: MA Experiment 20001560 PARAMETER Experiment Name: At_Drought_Soil_Dry_P Parameter: Organism Value: A. thaliana
  misc_feature: MA Experiment 20001560 PARAMETER Experiment Name: At_Drought_Soil_Dry_P Parameter: Plant Line Value: WS
  misc_feature: MA Experiment 20001560 PARAMETER Experiment Name: At_Drought_Soil_Dry_P Parameter: Post Timepoint (hr) Value: None
  misc_feature: MA Experiment 20001560 PARAMETER Experiment Name: At_Drought_Soil_Dry_P Parameter: Post-Treatment Value: None
  misc_feature: MA Experiment 20001560 PARAMETER Experiment Name: At_Drought_Soil_Dry_P Parameter: Timepoint (day) Value: 14
  misc_feature: MA Experiment 20001560 PARAMETER Experiment Name: At_Drought_Soil_Dry_P Parameter: Treatment Value: Drought vs. No Drought
  misc_feature: MA Experiment ID: 20001905 Result: Up-regulated in Transcription
  misc_feature: MA Experiment 20001905 PARAMETER Experiment Name: At_Drought_Reproduction_P Parameter: Age (day) Value: 40
  misc_feature: MA Experiment 20001905 PARAMETER Experiment Name: At_Drought_Reproduction_P Parameter: Organism Value: A. thaliana
  misc_feature: MA Experiment 20001905 PARAMETER Experiment Name: At_Drought_Reproduction_P Parameter: Plant Line Value: WS
  misc_feature: MA Experiment 20001905 PARAMETER Experiment Name: At_Drought_Reproduction_P Parameter: Timepoint (day) Value: 10
  misc_feature: MA Experiment 20001905 PARAMETER Experiment Name: At_Drought_Reproduction_P Parameter: Tissue Value: Rosettes
  misc_feature: MA Experiment 20001905 PARAMETER Experiment Name: At_Drought_Reproduction_P Parameter: Treatment Value: Drought vs. No Drought
  misc_feature: MA Experiment ID: 20001911 Result: Down-regulated in Transcription
  misc_feature: MA Experiment 20001911 PARAMETER Experiment Name: At_Drought_Reproduction_P Parameter: Age (day) Value: 40
  misc_feature: MA Experiment 20001911 PARAMETER Experiment Name: At_Drought_Reproduction_P Parameter: Organism Value: A. thaliana
  misc_feature: MA Experiment 20001911 PARAMETER Experiment Name: At_Drought_Reproduction_P Parameter: Plant Line Value: WS
  misc_feature: MA Experiment 20001911 PARAMETER Experiment Name: At_Drought_Reproduction_P Parameter: Timepoint (day) Value: 10
  misc_feature: MA Experiment 20001911 PARAMETER Experiment Name: At_Drought_Reproduction_P Parameter: Tissue Value: Flowers
  misc_feature: MA Experiment 20001911 PARAMETER Experiment Name: At_Drought_Reproduction_P Parameter: Treatment Value: Drought vs. No Drought
agttttctactaactctttccttattcttgtaccatcctaaatcagtaagtccttaacgtacgcaccatgtgtacgttagagaagcgcggcgatctctttctcctaaccctaaccggcgaagacgagcacagattccaccccgacacgatcgcctctgttctctcgcttcttgaacaagcaaagtctcaatccacaaaaggatccgtcctcatcactaccggtcacggaaagttcttctccaatggctttgacctcgcgtgggctcaatccgctggacacggtgctataaaacggatgcaccaaatggtcaaatcctttaaaccggtgttagccgccctcctcgatcttccaatgccgacgatcgccgccttgaacggccacgcggcagcctcggggctgatgtttgcgctgatagtgcggaaggtgtggtggaggctacagtgagccttggagaaagtttggccgctaagaaatggaatggtgaggtgtatgcaaccattaggaagagtttgtatccggagctttgtcggatggttgatttaacggcaaataacttggccactcacaacctctagaaactctcattgtcttgttgggagaaaaatggttgaaatatgaatattgccgacaaaagtcaacgtccatttcactaagcacgtatttgtttctcaccaataaaacataattaatct

SEQ ID NO: 37182 - protein, 125 aa, Arabidopsis thaliana
  peptide (1)..(125): Ceres Seq. ID no. 12603445
  misc_feature (11)..(115): Pfam Name: Enoyl-CoA hydratase/isomerase family Pfam Description: Enoyl-CoA hydratase/isomerase family
  misc_feature (10)..(115): Homolog of NCBI NO: 32404374 NR Description: hypothetical protein ( hypothetical protein
  misc_feature (17)..(115): Homolog of NCBI NO: 15828352 NR Description: possible enoyl-CoA hydratase [Mycobacterium
  misc_feature (1)..(125): Homolog of NCBI NO: 23017142 NR Description: hypothetical protein [Thermobifida fusca]
  misc_feature (1)..(115): Homolog of NCBI NO: 34903766 NR Description: unnamed protein product [Oryza sativa (japonica
  misc_feature (1)..(115): Homolog of NCBI NO: 15218713 NR Description: hypothetical protein; protein id: At1g65520.1
  misc_feature (1)..(115): Homolog of NCBI NO: 15236498 NR Description: carnitine racemase like protein
  misc_feature (1)..(115): Homolog of NCBI NO: 21555734 NR Description: carnitine racemase like protein [Arabidopsis
  misc_feature (1)..(115): Homolog of NCBI NO: 15236499 NR Description: carnitine racemase like protein
MCTLEKRGDLFLLTLTGEDEHRFHPDTIASVLSLLEQAKSQSTKGSVLITTGHGKFFSNGFDLAWAQSAGHGAIKRMHQMVKSFKPVLAALLDLPMPTIAALNGHAAASGLMFALIVRKVWWRLQ

SEQ ID NO: 37183 - DNA, 985 bp, Arabidopsis thaliana
  misc_feature (1)..(985): Ceres Seq. ID no. 12665934
  misc_feature: MA Experiment ID: 20000184 Result: Down-regulated in Transcription
  misc_feature: MA Experiment 20000184 PARAMETER Experiment Name: At_Shoots__P Parameter: Age (day) Value: 7
  misc_feature: MA Experiment 20000184 PARAMETER Experiment Name: At_Shoots__P Parameter: Tissue Value: Shoots vs. Whole Plant
gtaagagagacgaatctcacgccggaatctcttttacttcaccgtcgtttgttctccgtcgcgtcacctttcgattaattccttcacagggtagcaaaattttgttgatttcgggatgtcttcagctcaagatccattctacattgttaaagaagagattcaggattctattgataagttgcaatctacattccacaaatgggagcgtatctctcccgacatgggtgatcaagcacatgtggcgaaggagcttgttgctacttgtggaagcattgagtggcaggtagatgagctggaaaaagcgattactgttgcagcaaaagatccttcatggtatggcattgatgaagctgagcttgaaaaacggaggagatggactagtaatgctaggacacaggtgcggaatgtgaagtctggtgttttagctggaaaggttagttctggagcaggtcatgcaagtgaagtgcgtagagaactaatgagaatgccaaactcgggtgaagcaagtagatatgatcagtatggagggagagacgatgatggttttgtacagtcagaatcagataggcaaatgctgttgataaagcaacaagacgaagaattggatgagcttagtaaaagtgtacagagaattggaggagtggggctcactatacacgacgaactcgttgcacaggagagaataatagatgaattggatacggagatggacagcacaaagaaccgtcttgaatttgttcagaaaaaagtgggaatggtaatgaagaaagctggagcaaaaggtcaaatgatgatgatatgtttcttgctcgtcttgttcatcatcctattcgttcttgtcttcttgacctaaagaacagagccgcgggatcttatagatgggagtttaatgtcttacattatcatgtttgtggtgaaacaaatggaatatttacataaggttgtctgttttttcttctcctatccaatcccacatataattttg

SEQ ID NO: 37184 - protein, 245 aa, Arabidopsis thaliana
  peptide (1)..(245): Ceres Seq. ID no. 12665935
  misc_feature (158)..(220): Pfam Name: SNARE domain Pfam Description: SNARE domain
  misc_feature (3)..(99): Homolog of NCBI NO: 24652619 NR Description: Syntaxin 6 CG7736-PC
  misc_feature (90)..(242): Homolog of NCBI NO: 24652619 NR Description: Syntaxin 6 CG7736-PC
  misc_feature (3)..(244): Homolog of NCBI NO: 13928922 NR Description: syntaxin 6 [Rattus norvegicus]
  misc_feature (3)..(244): Homolog of NCBI NO: 10946800 NR Description: syntaxin 6 [Mus musculus]
  misc_feature (1)..(190): Homolog of NCBI NO: 498040 NR Description: ORF
  misc_feature (1)..(66): Homolog of NCBI NO: 34905840 NR Description: putative syntaxin [Oryza sativa (japonica
  misc_feature (55)..(245): Homolog of NCBI NO: 34905840 NR Description: putative syntaxin [Oryza sativa (japonica
  misc_feature (14)..(209): Homolog of NCBI NO: 6560768 NR Description: F3M18.7 [Arabidopsis thaliana]
  misc_feature (1)..(245): Homolog of NCBI NO: 18175840 NR Description: unknown protein [Arabidopsis thaliana]
  misc_feature (1)..(245): Homolog of NCBI NO: 18396813 NR Description: syntaxin SYP6 family
MSSAQDPFYIVKEEIQDSIDKLQSTFHKWERISPDMGDQAHVAKELVATCGSIEWQVDELEKAITVAAKDPSWYGIDEAELEKRRRWTSNARTQVRNVKSGVLAGKVSSGAGHASEVRRELMRMPNSGEASRYDQYGGRDDDGFVQSESDRQMLLIKQQDEELDELSKSVQRIGGVGLTIHDELVAQERIIDELDTEMDSTKNRLEFVQKKVGMVMKKAGAKGQMMMICFLLVLFIILFVLVFLT

SEQ ID NO: 37185 - protein, 210 aa, Arabidopsis thaliana
  peptide (1)..(210): Ceres Seq. ID no. 12665936
  misc_feature (123)..(185): Pfam Name: SNARE domain Pfam Description: SNARE domain
  misc_feature (1)..(64): Homolog of NCBI NO: 24652619 NR Description: Syntaxin 6 CG7736-PC
  misc_feature (55)..(207): Homolog of NCBI NO: 24652619 NR Description: Syntaxin 6 CG7736-PC
  misc_feature (1)..(209): Homolog of NCBI NO: 13928922 NR Description: syntaxin 6 [Rattus norvegicus]
  misc_feature (1)..(209): Homolog of NCBI NO: 10946800 NR Description: syntaxin 6 [Mus musculus]
  misc_feature (1)..(155): Homolog of NCBI NO: 498040 NR Description: ORF
  misc_feature (1)..(31): Homolog of NCBI NO: 34905840 NR Description: putative syntaxin [Oryza sativa (japonica
  misc_feature (20)..(210): Homolog of NCBI NO: 34905840 NR Description: putative syntaxin [Oryza sativa (japonica
  misc_feature (1)..(174): Homolog of NCBI NO: 6560768 NR Description: F3M18.7 [Arabidopsis thaliana]
  misc_feature (1)..(210): Homolog of NCBI NO: 18175840 NR Description: unknown protein [Arabidopsis thaliana]
  misc_feature (1)..(210): Homolog of NCBI NO: 18396813 NR Description: syntaxin SYP6 family
MGDQAHVAKELVATCGSIEWQVDELEKAITVAAKDPSWYGIDEAELEKRRRWTSNARTQVRNVKSGVLAGKVSSGAGHASEVRRELMRMPNSGEASRYDQYGGRDDDGFVQSESDRQMLLIKQQDEELDELSKSVQRIGGVGLTIHDELVAQERIIDELDTEMDSTKNRLEFVQKKVGMVMKKAGAKGQMMMICFLLVLFIILFVLVFLT

SEQ ID NO: 37186 - protein, 124 aa, Arabidopsis thaliana
  peptide (1)..(124): Ceres Seq. ID no. 12665937
  misc_feature (37)..(99): Pfam Name: SNARE domain Pfam Description: SNARE domain
  misc_feature (1)..(123): Homolog of NCBI NO: 5032131 NR Description: syntaxin 6 [Homo sapiens]
  misc_feature (1)..(123): Homolog of NCBI NO: 12857762 NR Description: unnamed protein product [Mus musculus]
  misc_feature (1)..(121): Homolog of NCBI NO: 24652619 NR Description: Syntaxin 6 CG7736-PC
  misc_feature (1)..(123): Homolog of NCBI NO: 13928922 NR Description: syntaxin 6 [Rattus norvegicus]
  misc_feature (1)..(123): Homolog of NCBI NO: 10946800 NR Description: syntaxin 6 [Mus musculus]
  misc_feature (1)..(69): Homolog of NCBI NO: 498040 NR Description: ORF
  misc_feature (1)..(124): Homolog of NCBI NO: 34905840 NR Description: putative syntaxin [Oryza sativa (japonica
  misc_feature (1)..(88): Homolog of NCBI NO: 6560768 NR Description: F3M18.7 [Arabidopsis thaliana]
  misc_feature (1)..(124): Homolog of NCBI NO: 18175840 NR Description: unknown protein [Arabidopsis thaliana]
  misc_feature (1)..(124): Homolog of NCBI NO: 18396813 NR Description: syntaxin SYP6 family
MRMPNSGEASRYDQYGGRDDDGFVQSESDRQMLLIKQQDEELDELSKSVQRIGGVGLTIHDELVAQERIIDELDTEMDSTKNRLEFVQKKVGMVMKKAGAKGQMMMICFLLVLFIILFVLVFLT

SEQ ID NO: 37187 - DNA, 1846 bp, Arabidopsis thaliana
  misc_feature (1)..(1846): Ceres Seq. ID no. 13646141
  misc_feature: MA Experiment ID: 20000185 Result: Down-regulated in Transcription
  misc_feature: MA Experiment 20000185 PARAMETER Experiment Name: At_Roots__P Parameter: Age (day) Value: 7 vs. 21
  misc_feature: MA Experiment 20000185 PARAMETER Experiment Name: At_Roots__P Parameter: Organism Value: A. thaliana
  misc_feature: MA Experiment 20000185 PARAMETER Experiment Name: At_Roots__P Parameter: Tissue Value: Roots vs. Whole Plant
  misc_feature: MA Experiment ID: 20000235 Result: Up-regulated in Transcription
  misc_feature: MA Experiment 20000235 PARAMETER Experiment Name: At_Siliques_P Parameter: Age (day) Value: 21
  misc_feature: MA Experiment 20000235 PARAMETER Experiment Name: At_Siliques_P Parameter: Organism Value: A. thaliana
  misc_feature: MA Experiment 20000235 PARAMETER Experiment Name: At_Siliques_P Parameter: Plant Line Value: WS
  misc_feature: MA Experiment 20000235 PARAMETER Experiment Name: At_Siliques_P Parameter: Tissue Value: 5-10mm Siliques vs. Whole Plant
aattttaagtctttgtccgtttactctcctttgtgtttaagaaacctccttttatagagatatttctcaccattttttatctatatgnagggtatgatataacatctagaggatacaagaggtggtcaggtgcaaaagattgagttttttttataggagagtgtttacgactgaagctatgacggaaacgggtttgattctcatgtggttccctttgataatattgggattgtttgttttgaaatgggtgctgaagagagtgaatgtttggatttatgtgtccaaacttggtgagaaaaaacactatctgccaccaggtgatttgggatggccagtcataggcaacatgtggtcctttcttagagctttcaaaacatctgatcctgaatccttcatccaatcctacatcaccaggtatgggcgtaccgggatttataaagcacacatgtttgggtacccatgtgtactagtaacaacaccagagacttgtaggcgagttctaacagatgatgatgccttccacataggttggccaaaatctaccatgaaactcattggcaggaagtcctttgttggtatctcctttgaagaacacaagaggctcaggcgtttgacttctgctcctgtcaatggccctgaagctctctctgtatacatacagttcattgaagaaactgttaatactgatctagaaaaatggtccaaaatgggagaaatcgagttcttatctcatttgcgtaagcttacgtttaaggtcattatgtacatatttctcagcagtgagagtgagcatgtcatggattcattggaacgggagtataccaaccttaactatggagttcgagcaatgggtattaatcttcctgggtttgcttatcatagagctttgaaggcaaggaaaaaacttgtagctgcctttcagtccatagtgactaaccgaagaaatcaaaggaagcagaatatttcatccaatagaaaagatatgctggataatctaatagatgttaaagatgaaaacggaagagtcttagatgatgaggaaattattgaccttttgttgatgtatcttaatgcgggtcatgaatcttctggacacctcactatgtgggctaccattttgatgcaagaacaccctatgattctgcaaaaggctaaggaagaacaagagaggatcgtaaaaaagagagcaccgggacagaagttgacgcttaaagagacacgtgaaatggtgtatctttctcaggttattgatgagacccttcgagtaattacattctctctgacggccttcagggaagcaaagagtgatgtccaaatggatggctatataattccaaaaggctggaaggttctgacttggtttaggaacgtccatttggaccctgaaatctacccggatccaaagaaatttgatccttcaagatgggagggatacacaccaaaagcaggcacattccttccttttggtttgggaagccacctatgcccgggaaacgatcttgccaagctcgagatttccatttttcttcatcatttcctcctcaaataccgggtggaaaggagcaatcccggatgtccggtgatgttcttgcctcacaatcgacccaaagataattgcctagcaagaatcaccagaacgatgccataatcatcatcttcaaactagtagaccccttagcaaatatataagcttcgtctcaggtttccattgtcttcatcttctcttagaacttgatccaaaccggttcggtttgtgaatttggtttactaggatgtatcaatagtttgaaggatttgtcaaagtaatgttgaaatttttctctggtttagcttcaaatttggttat

SEQ ID NO: 37188 - protein, 489 aa, Arabidopsis thaliana
  peptide (1)..(489): Ceres Seq. ID no. 13646142
  misc_feature (1)..(485): Homolog of NCBI NO: 13021853 NR Description: ent-kaurenoic acid hydroxylase [Arabidopsis
  misc_feature (1)..(485): Homolog of NCBI NO: 15220438 NR Description: ent-kaurenoic acid hydroxylase (KAO1) /
  misc_feature (1)..(489): Homolog of NCBI NO: 13021856 NR Description: ent-kaurenoic acid hydroxylase [Arabidopsis
  misc_feature (1)..(489): Homolog of NCBI NO: 15225685 NR Description: ent-kaurenoic acid oxidase / cytochrome P450
MTETGLILMWFPLIILGLFVLKWVLKRVNVWIYVSKLGEKKHYLPPGDLGWPVIGNMWSFLRAFKTSDPESFIQSYITRYGRTGIYKAHMFGYPCVLVTTPETCRRVLTDDDAFHIGWPKSTMKLIGRKSFVGISFEEHKRLRRLTSAPVNGPEALSVYIQFIEETVNTDLEKWSKMGEIEFLSHLRKLTFKVIMYIFLSSESEHVMDSLEREYTNLNYGVRAMGINLPGFAYHRALKARKKLVAAFQSIVTNRRNQRKQNISSNRKDMLDNLIDVKDENGRVLDDEEIIDLLLMYLNAGHESSGHLTMWATILMQEHPMILQKAKEEQERIVKKRAPGQKLTLKETREMVYLSQVIDETLRVITFSLTAFREAKSDVQMDGYIIPKGWKVLTWFRNVHLDPEIYPDPKKFDPSRWEGYTPKAGTFLPFGLGSHLCPGNDLAKLEISIFLHHFLLKYRVERSNPGCPVMFLPHNRPKDNCLARITRTMP

SEQ ID NO: 37189 - protein, 481 aa, Arabidopsis thaliana
  peptide (1)..(481): Ceres Seq. ID no. 13646143
  misc_feature (1)..(477): Homolog of NCBI NO: 13021853 NR Description: ent-kaurenoic acid hydroxylase [Arabidopsis
  misc_feature (1)..(477): Homolog of NCBI NO: 15220438 NR Description: ent-kaurenoic acid hydroxylase (KAO1) /
  misc_feature (1)..(481): Homolog of NCBI NO: 13021856 NR Description: ent-kaurenoic acid hydroxylase [Arabidopsis
  misc_feature (1)..(481): Homolog of NCBI NO: 15225685 NR Description: ent-kaurenoic acid oxidase / cytochrome P450
MWFPLIILGLFVLKWVLKRVNVWIYVSKLGEKKHYLPPGDLGWPVIGNMWSFLRAFKTSDPESFIQSYITRYGRTGIYKAHMFGYPCVLVTTPETCRRVLTDDDAFHIGWPKSTMKLIGRKSFVGISFEEHKRLRRLTSAPVNGPEALSVYIQFIEETVNTDLEKWSKMGEIEFLSHLRKLTFKVIMYIFLSSESEHVMDSLEREYTNLNYGVRAMGINLPGFAYHRALKARKKLVAAFQSIVTNRRNQRKQNISSNRKDMLDNLIDVKDENGRVLDDEEIIDLLLMYLNAGHESSGHLTMWATILMQEHPMILQKAKEEQERIVKKRAPGQKLTLKETREMVYLSQVIDETLRVITFSLTAFREAKSDVQMDGYIIPKGWKVLTWFRNVHLDPEIYPDPKKFDPSRWEGYTPKAGTFLPFGLGSHLCPGNDLAKLEISIFLHHFLLKYRVERSNPGCPVMFLPHNRPKDNCLARITRTMP

SEQ ID NO: 37190 - protein, 433 aa, Arabidopsis thaliana
  peptide (1)..(433): Ceres Seq. ID no. 13646144
  misc_feature (1)..(429): Homolog of NCBI NO: 13021853 NR Description: ent-kaurenoic acid hydroxylase [Arabidopsis
  misc_feature (1)..(429): Homolog of NCBI NO: 15220438 NR Description: ent-kaurenoic acid hydroxylase (KAO1) /
  misc_feature (1)..(433): Homolog of NCBI NO: 13021856 NR Description: ent-kaurenoic acid hydroxylase [Arabidopsis
  misc_feature (1)..(433): Homolog of NCBI NO: 15225685 NR Description: ent-kaurenoic acid oxidase / cytochrome P450
MWSFLRAFKTSDPESFIQSYITRYGRTGIYKAHMFGYPCVLVTTPETCRRVLTDDDAFHIGWPKSTMKLIGRKSFVGISFEEHKRLRRLTSAPVNGPEALSVYIQFIEETVNTDLEKWSKMGEIEFLSHLRKLTFKVIMYIFLSSESEHVMDSLEREYTNLNYGVRAMGINLPGFAYHRALKARKKLVAAFQSIVTNRRNQRKQNISSNRKDMLDNLIDVKDENGRVLDDEEIIDLLLMYLNAGHESSGHLTMWATILMQEHPMILQKAKEEQERIVKKRAPGQKLTLKETREMVYLSQVIDETLRVITFSLTAFREAKSDVQMDGYIIPKGWKVLTWFRNVHLDPEIYPDPKKFDPSRWEGYTPKAGTFLPFGLGSHLCPGNDLAKLEISIFLHHFLLKYRVERSNPGCPVMFLPHNRPKDNCLARITRTMP

SEQ ID NO: 37191 - DNA, 1148 bp, Arabidopsis thaliana
  misc_feature (1)..(1148): Ceres Seq. ID no. 13622100
  misc_feature: MA Experiment ID: 20000306 Result: Down-regulated in Transcription
  misc_feature: MA Experiment 20000306 PARAMETER Experiment Name: At_Germinating_Seeds_Sub_P Parameter: Age (hr) Value: 6 vs. 0
  misc_feature: MA Experiment 20000306 PARAMETER Experiment Name: At_Germinating_Seeds_Sub_P Parameter: Organism Value: A. thaliana
  misc_feature: MA Experiment 20000306 PARAMETER Experiment Name: At_Germinating_Seeds_Sub_P Parameter: Plant Line Value: WS
  misc_feature: MA Experiment 20000306 PARAMETER Experiment Name: At_Germinating_Seeds_Sub_P Parameter: Tissue Value: Germinating Seeds
  misc_feature: MA Experiment ID: 20000307 Result: Down-regulated in Transcription
  misc_feature: MA Experiment 20000307 PARAMETER Experiment Name: At_Germinating_Seeds_Sub_P Parameter: Age (hr) Value: 24 vs. 0
  misc_feature: MA Experiment 20000307 PARAMETER Experiment Name: At_Germinating_Seeds_Sub_P Parameter: Organism Value: A. thaliana
  misc_feature: MA Experiment 20000307 PARAMETER Experiment Name: At_Germinating_Seeds_Sub_P Parameter: Plant Line Value: WS
  misc_feature: MA Experiment 20000307 PARAMETER Experiment Name: At_Germinating_Seeds_Sub_P Parameter: Tissue Value: Germinating Seeds
  misc_feature: MA Experiment ID: 20000314 Result: Down-regulated in Transcription
  misc_feature: MA Experiment 20000314 PARAMETER Experiment Name: At_14day_Shoots-Roots_Sub_P Parameter: Age (day) Value: 14
  misc_feature: MA Experiment 20000314 PARAMETER Experiment Name: At_14day_Shoots-Roots_Sub_P Parameter: Organism Value: A. thaliana
  misc_feature: MA Experiment 20000314 PARAMETER Experiment Name: At_14day_Shoots-Roots_Sub_P Parameter: Plant Line Value: WS
  misc_feature: MA Experiment 20000314 PARAMETER Experiment Name: At_14day_Shoots-Roots_Sub_P Parameter: Tissue Value: Roots vs. Whole Plant
  misc_feature: MA Experiment ID: 20000315 Result: Down-regulated in Transcription
  misc_feature: MA Experiment 20000315 PARAMETER Experiment Name: At_14day_Shoots-Roots_Sub_P Parameter: Age (day) Value: 14
  misc_feature: MA Experiment 20000315 PARAMETER Experiment Name: At_14day_Shoots-Roots_Sub_P Parameter: Organism Value: A. thaliana
  misc_feature: MA Experiment 20000315 PARAMETER Experiment Name: At_14day_Shoots-Roots_Sub_P Parameter: Plant Line Value: WS
  misc_feature: MA Experiment 20000315 PARAMETER Experiment Name: At_14day_Shoots-Roots_Sub_P Parameter: Tissue Value: Shoots vs. Whole Plant
  misc_feature: MA Experiment ID: 20000327 Result: Down-regulated in Transcription
  misc_feature: MA Experiment 20000327 PARAMETER Experiment Name: At_42deg_Heat_Sub_P Parameter: Age (day) Value: 14
  misc_feature: MA Experiment 20000327 PARAMETER Experiment Name: At_42deg_Heat_Sub_P Parameter: Organism Value: A. thaliana
  misc_feature: MA Experiment 20000327 PARAMETER Experiment Name: At_42deg_Heat_Sub_P Parameter: Plant Line Value: WS
  misc_feature: MA Experiment 20000327 PARAMETER Experiment Name: At_42deg_Heat_Sub_P Parameter: Temperature (deg C) Value: 42 vs. 22
  misc_feature: MA Experiment 20000327 PARAMETER Experiment Name: At_42deg_Heat_Sub_P Parameter: Timepoint (hr) Value: 1
  misc_feature: MA Experiment 20000327 PARAMETER Experiment Name: At_42deg_Heat_Sub_P Parameter: Tissue Value: Aerial
  misc_feature: MA Experiment ID: 20000328 Result: Down-regulated in Transcription
  misc_feature: MA Experiment 20000328 PARAMETER Experiment Name: At_42deg_Heat_Sub_P Parameter: Age (day) Value: 14
  misc_feature: MA Experiment 20000328 PARAMETER Experiment Name: At_42deg_Heat_Sub_P Parameter: Organism Value: A. thaliana
  misc_feature: MA Experiment 20000328 PARAMETER Experiment Name: At_42deg_Heat_Sub_P Parameter: Plant Line Value: WS
  misc_feature: MA Experiment 20000328 PARAMETER Experiment Name: At_42deg_Heat_Sub_P Parameter: Temperature (deg C) Value: 42 vs. 22
  misc_feature: MA Experiment 20000328 PARAMETER Experiment Name: At_42deg_Heat_Sub_P Parameter: Timepoint (hr) Value: 6
  misc_feature: MA Experiment 20000328 PARAMETER Experiment Name: At_42deg_Heat_Sub_P Parameter: Tissue Value: Aerial
  misc_feature: MA Experiment ID: 20000329 Result: Up-regulated in Transcription
  misc_feature: MA Experiment 20000329 PARAMETER Experiment Name: At_4deg_Cold_Sub_P Parameter: Age (day) Value: 14
  misc_feature: MA Experiment 20000329 PARAMETER Experiment Name: At_4deg_Cold_Sub_P Parameter: Organism Value: A. thaliana
  misc_feature: MA Experiment 20000329 PARAMETER Experiment Name: At_4deg_Cold_Sub_P Parameter: Plant Line Value: WS
  misc_feature: MA Experiment 20000329 PARAMETER Experiment Name: At_4deg_Cold_Sub_P Parameter: Temperature (deg C) Value: 4 vs. 22
  misc_feature: MA Experiment 20000329 PARAMETER Experiment Name: At_4deg_Cold_Sub_P Parameter: Timepoint (hr) Value: 6
  misc_feature: MA Experiment 20000329 PARAMETER Experiment Name: At_4deg_Cold_Sub_P Parameter: Tissue Value: Aerial
  misc_feature: MA Experiment ID: 20000355 Result: Down-regulated in Transcription
  misc_feature: MA Experiment 20000355 PARAMETER Experiment Name: At_Siliques_Sub_P Parameter: Age (day) Value: 21
  misc_feature: MA Experiment 20000355 PARAMETER Experiment Name: At_Siliques_Sub_P Parameter: Organism Value: A. thaliana
  misc_feature: MA Experiment 20000355 PARAMETER Experiment Name: At_Siliques_Sub_P Parameter: Plant Line Value: WS
  misc_feature: MA Experiment 20000355 PARAMETER Experiment Name: At_Siliques_Sub_P Parameter: Tissue Value: Less Than 5mm Siliques vs. Whole Plant
  misc_feature: MA Experiment ID: 20000440 Result: Down-regulated in Transcription
  misc_feature: MA Experiment 20000440 PARAMETER Experiment Name: At_Closed-Flower__Sub_P Parameter: Tissue Value: Closed Flower vs. Whole Plant
  misc_feature: Pfam Name: Methyltransf_11 Pfam Description: Methyltransferase domain
atagaccaatacagagatacaaagcaatagaacaacaagaacaagaaaacagagaaaaaaacaatggcttccttgtcggataagttagcggatgcttaccagaacgcaaggccgagatatccgatcgattggttcacgaaacttgctgctcgaaccggtcagcacaaatcagcttgggatgttggtactggcaacggtcaagcagctattggtcttgcagagtatttcgagaaagttacagcaaccgacataaacgaagcacagttaaaactagcggtaaaacacgaaagaatcagttaccatcacactcccacaacaatgtccgaagaccaaatggttgctctagtcggcggagataactccgttgatctaatcgtggcagcacaagccgttcactacttcgatctcgcaccattctacaacgtagcaaaacgtgttcttcgcaaagaaggaggattaatcgcagtttttgtctacaacgacataatcatctctcctgaagttgattccatcatgaaacgtcttgtggactccacgttcccgtttagaactcctgtaatgaatcttgctttcgacggttacaaaacgttgccgtttccgtttgaaagtatagggatgggatcagaagggaagcctataatgcttgacattcctcataagctatcgcttaaagggtttatcggtttcttgagatcgtggcagcccgcaatgaaagctaaagaacgtggagttgagcttgtgactgaagatttgatctccaaatttgaagatgcttggggtgatgatgatgatgttaaagatattttctacaaagctcatatgattgttggaaaactttcggcttcagatatagagcggcatcgaaagagatttgatacgaactgcgtagttacaacactaaaggatcataacaactcggctgttattgcttcagtgactgctgctgcatttgctggagtggcggcttactgtgcttactctgcaaggaagaacagttagatcctttgaaggacaaagaaacggttttctgaatctagtgaatgaaatcttttttattttacatgttgacatgttgtcatgtatttatttatgtcattgatatgagatggttaagtaatatctaaagatttaagagtcacccaacactc

SEQ ID NO: 37192 - protein, 311 aa, Arabidopsis thaliana
  peptide (1)..(311): Ceres Seq. ID no. 15219298
  misc_feature: Pfam Name: Methyltransf_11 Pfam Description: Methyltransferase domain
  misc_feature (1)..(257): Homolog of NCBI NO: 34910604 NR Description: putative embryonic abundant protein-like
  misc_feature (171)..(262): Homolog of NCBI NO: 34912212 NR Description: P0415C01.8 [Oryza sativa (japonica
  misc_feature (1)..(161): Homolog of NCBI NO: 34912212 NR Description: P0415C01.8 [Oryza sativa (japonica
  misc_feature (25)..(256): Homolog of NCBI NO: 20258825 NR Description: unknown protein [Arabidopsis thaliana]
  misc_feature (1)..(256): Homolog of NCBI NO: 15235684 NR Description: expressed protein [Arabidopsis thaliana]
  misc_feature (1)..(258): Homolog of NCBI NO: 15238280 NR Description: embryonic abundant protein -related [Arabidopsis
  misc_feature (1)..(258): Homolog of NCBI NO: 15233061 NR Description: expressed protein [Arabidopsis thaliana]
  misc_feature (1)..(264): Homolog of NCBI NO: 21594033 NR Description: embryonic abundant protein-like [Arabidopsis
  misc_feature (1)..(264): Homolog of NCBI NO: 15232436 NR Description: embryonic abundant protein -related [Arabidopsis
  misc_feature (1)..(311): Homolog of NCBI NO: 18405387 NR Description: expressed protein [Arabidopsis thaliana]
MASLSDKLADAYQNARPRYPIDWFTKLAARTGQHKSAWDVGTGNGQAAIGLAEYFEKVTATDINEAQLKLAVKHERISYHHTPTTMSEDQMVALVGGDNSVDLIVAAQAVHYFDLAPFYNVAKRVLRKEGGLIAVFVYNDIIISPEVDSIMKRLVDSTFPFRTPVMNLAFDGYKTLPFPFESIGMGSEGKPIMLDIPHKLSLKGFIGFLRSWQPAMKAKERGVELVTEDLISKFEDAWGDDDDVKDIFYKAHMIVGKLSASDIERHRKRFDTNCVVTTLKDHNNSAVIASVTAAAFAGVAAYCAYSARKNS

SEQ ID NO: 37193 - protein, 226 aa, Arabidopsis thaliana
  peptide (1)..(226): Ceres Seq. ID no. 15219299
  misc_feature: Pfam Name: Methyltransf_11 Pfam Description: Methyltransferase domain
  misc_feature (1)..(172): Homolog of NCBI NO: 34910604 NR Description: putative embryonic abundant protein-like
  misc_feature (86)..(177): Homolog of NCBI NO: 34912212 NR Description: P0415C01.8 [Oryza sativa (japonica
  misc_feature (1)..(76): Homolog of NCBI NO: 34912212 NR Description: P0415C01.8 [Oryza sativa (japonica
  misc_feature (1)..(171): Homolog of NCBI NO: 20258825 NR Description: unknown protein [Arabidopsis thaliana]
  misc_feature (1)..(171): Homolog of NCBI NO: 15235684 NR Description: expressed protein [Arabidopsis thaliana]
  misc_feature (1)..(173): Homolog of NCBI NO: 15238280 NR Description: embryonic abundant protein -related [Arabidopsis
  misc_feature (1)..(173): Homolog of NCBI NO: 15233061 NR Description: expressed protein [Arabidopsis thaliana]
  misc_feature (1)..(179): Homolog of NCBI NO: 21594033 NR Description: embryonic abundant protein-like [Arabidopsis
  misc_feature (1)..(179): Homolog of NCBI NO: 15232436 NR Description: embryonic abundant protein -related [Arabidopsis
  misc_feature (1)..(226): Homolog of NCBI NO: 18405387 NR Description: expressed protein [Arabidopsis thaliana]
MSEDQMVALVGGDNSVDLIVAAQAVHYFDLAPFYNVAKRVLRKEGGLIAVFVYNDIIISPEVDSIMKRLVDSTFPFRTPVMNLAFDGYKTLPFPFESIGMGSEGKPIMLDIPHKLSLKGFIGFLRSWQPAMKAKERGVELVTEDLISKFEDAWGDDDDVKDIFYKAHMIVGKLSASDIERHRKRFDTNCVVTTLKDHNNSAVIASVTAAAFAGVAAYCAYSARKNS

SEQ ID NO: 37194 - protein, 221 aa, Arabidopsis thaliana
  peptide (1)..(221): Ceres Seq. ID no. 15219300
  misc_feature: Pfam Name: Methyltransf_11 Pfam Description: Methyltransferase domain
  misc_feature (1)..(167): Homolog of NCBI NO: 34910604 NR Description: putative embryonic abundant protein-like
  misc_feature (81)..(172): Homolog of NCBI NO: 34912212 NR Description: P0415C01.8 [Oryza sativa (japonica
  misc_feature (1)..(71): Homolog of NCBI NO: 34912212 NR Description: P0415C01.8 [Oryza sativa (japonica
  misc_feature (1)..(166): Homolog of NCBI NO: 20258825 NR Description: unknown protein [Arabidopsis thaliana]
  misc_feature (1)..(166): Homolog of NCBI NO: 15235684 NR Description: expressed protein [Arabidopsis thaliana]
  misc_feature (1)..(168): Homolog of NCBI NO: 15238280 NR Description: embryonic abundant protein -related [Arabidopsis
  misc_feature (1)..(168): Homolog of NCBI NO: 15233061 NR Description: expressed protein [Arabidopsis thaliana]
  misc_feature (1)..(174): Homolog of NCBI NO: 21594033 NR Description: embryonic abundant protein-like [Arabidopsis
  misc_feature (1)..(174): Homolog of NCBI NO: 15232436 NR Description: embryonic abundant protein -related [Arabidopsis
  misc_feature (1)..(221): Homolog of NCBI NO: 18405387 NR Description: expressed protein [Arabidopsis thaliana]
MVALVGGDNSVDLIVAAQAVHYFDLAPFYNVAKRVLRKEGGLIAVFVYNDIIISPEVDSIMKRLVDSTFPFRTPVMNLAFDGYKTLPFPFESIGMGSEGKPIMLDIPHKLSLKGFIGFLRSWQPAMKAKERGVELVTEDLISKFEDAWGDDDDVKDIFYKAHMIVGKLSASDIERHRKRFDTNCVVTTLKDHNNSAVIASVTAAAFAGVAAYCAYSARKNS

SEQ ID NO: 37195 - DNA, 1104 bp, Arabidopsis thaliana
  misc_feature (1)..(1104): Ceres Seq. ID no. 12393770
  misc_feature: MA Experiment ID: 108462 Result: Down-regulated in Transcription
  misc_feature: MA Experiment 108462 PARAMETER Experiment Name: At_Germinating_Seeds_cDNA_P Parameter: Age (day) Value: 2 vs. 0
  misc_feature: MA Experiment 108462 PARAMETER Experiment Name: At_Germinating_Seeds_cDNA_P Parameter: Tissue Value: Germinating Seeds
  misc_feature: MA Experiment ID: 108464 Result: Down-regulated in Transcription
  misc_feature: MA Experiment 108464 PARAMETER Experiment Name: At_Germinating_Seeds_cDNA_P Parameter: Age (day) Value: 4 vs. 0
  misc_feature: MA Experiment 108464 PARAMETER Experiment Name: At_Germinating_Seeds_cDNA_P Parameter: Tissue Value: Germinating Seeds
  misc_feature: MA Experiment ID: 108573 Result: Up-regulated in Transcription
  misc_feature: MA Experiment 108573 PARAMETER Experiment Name: At_Drought_cDNA_P Parameter: Timepoint (hr) Value: 6
  misc_feature: MA Experiment 108573 PARAMETER Experiment Name: At_Drought_cDNA_P Parameter: Tissue Value: Aerial
  misc_feature: MA Experiment 108573 PARAMETER Experiment Name: At_Drought_cDNA_P Parameter: Treatment Value: Drought vs. No Drought
  misc_feature: MA Experiment ID: 108585 Result: Up-regulated in Transcription
  misc_feature: MA Experiment 108585 PARAMETER Experiment Name: At_5mM_NaNP_cDNA_P Parameter: Timepoint (hr) Value: 6
  misc_feature: MA Experiment 108585 PARAMETER Experiment Name: At_5mM_NaNP_cDNA_P Parameter: Tissue Value: Aerial
  misc_feature: MA Experiment 108585 PARAMETER Experiment Name: At_5mM_NaNP_cDNA_P Parameter: Treatment Value: null
  misc_feature: MA Experiment ID: 20000111 Result: Up-regulated in Transcription
  misc_feature: MA Experiment 20000111 PARAMETER Experiment Name: At_42deg_Heat_cDNA_P Parameter: Temperature (deg C) Value: 42 vs. 22
  misc_feature: MA Experiment 20000111 PARAMETER Experiment Name: At_42deg_Heat_cDNA_P Parameter: Timepoint (hr) Value: 6
  misc_feature: MA Experiment 20000111 PARAMETER Experiment Name: At_42deg_Heat_cDNA_P Parameter: Tissue Value: Aerial
  misc_feature: MA Experiment ID: 20000113 Result: Up-regulated in Transcription
  misc_feature: MA Experiment 20000113 PARAMETER Experiment Name: At_42deg_Heat_cDNA_P Parameter: Temperature (deg C) Value: 42 vs. 22
  misc_feature: MA Experiment 20000113 PARAMETER Experiment Name: At_42deg_Heat_cDNA_P Parameter: Timepoint (hr) Value: 8
  misc_feature: MA Experiment 20000113 PARAMETER Experiment Name: At_42deg_Heat_cDNA_P Parameter: Tissue Value: Aerial
  misc_feature: MA Experiment ID: 20000173 Result: Up-regulated in Transcription
  misc_feature: MA Experiment 20000173 PARAMETER Experiment Name: At_42deg_Heat_P Parameter: Age (day) Value: 14
  misc_feature: MA Experiment 20000173 PARAMETER Experiment Name: At_42deg_Heat_P Parameter: Organism Value: A. thaliana
  misc_feature: MA Experiment 20000173 PARAMETER Experiment Name: At_42deg_Heat_P Parameter: Plant Line Value: WS
  misc_feature: MA Experiment 20000173 PARAMETER Experiment Name: At_42deg_Heat_P Parameter: Temperature (deg C) Value: 42 vs. 22
  misc_feature: MA Experiment 20000173 PARAMETER Experiment Name: At_42deg_Heat_P Parameter: Timepoint (hr) Value: 6
  misc_feature: MA Experiment 20000173 PARAMETER Experiment Name: At_42deg_Heat_P Parameter: Tissue Value: Aerial
  misc_feature: MA Experiment ID: 20000182 Result: Up-regulated in Transcription
  misc_feature: MA Experiment 20000182 PARAMETER Experiment Name: At_2mM_SA_P Parameter: Age (day) Value: 14
  misc_feature: MA Experiment 20000182 PARAMETER Experiment Name: At_2mM_SA_P Parameter: Organism Value: A. thaliana
  misc_feature: MA Experiment 20000182 PARAMETER Experiment Name: At_2mM_SA_P Parameter: Plant Line Value: WS
  misc_feature: MA Experiment 20000182 PARAMETER Experiment Name: At_2mM_SA_P Parameter: Timepoint (hr) Value: 6
  misc_feature: MA Experiment 20000182 PARAMETER Experiment Name: At_2mM_SA_P Parameter: Tissue Value: Aerial
  misc_feature: MA Experiment 20000182 PARAMETER Experiment Name: At_2mM_SA_P Parameter: Treatment Value: 2mM SA vs. No Treatment
  misc_feature: MA Experiment ID: 20000184 Result: Down-regulated in Transcription
  misc_feature: MA Experiment 20000184 PARAMETER Experiment Name: At_Shoots__P Parameter: Age (day) Value: 7
  misc_feature: MA Experiment 20000184 PARAMETER Experiment Name: At_Shoots__P Parameter: Tissue Value: Shoots vs. Whole Plant
  misc_feature: MA Experiment ID: 20000227 Result: Down-regulated in Transcription
  misc_feature: MA Experiment 20000227 PARAMETER Experiment Name: At_Root-Tips-vs-Tops_P Parameter: Tissue Value: Root Tips vs. Root Tops
  misc_feature: MA Experiment ID: 20000437 Result: Up-regulated in Transcription
  misc_feature: MA Experiment 20000437 PARAMETER Experiment Name: At_Drought_P Parameter: Age (day) Value: 8
  misc_feature: MA Experiment 20000437 PARAMETER Experiment Name: At_Drought_P Parameter: Organism Value: A. thaliana
  misc_feature: MA Experiment 20000437 PARAMETER Experiment Name: At_Drought_P Parameter: Plant Line Value: WS
  misc_feature: MA Experiment 20000437 PARAMETER Experiment Name: At_Drought_P Parameter: Timepoint (hr) Value: 24
  misc_feature: MA Experiment 20000437 PARAMETER Experiment Name: At_Drought_P Parameter: Tissue Value: Whole Plant
  misc_feature: MA Experiment 20000437 PARAMETER Experiment Name: At_Drought_P Parameter: Treatment Value: Drought vs. No Drought
  misc_feature: MA Experiment ID: 20000438 Result: Down-regulated in Transcription
  misc_feature: MA Experiment 20000438 PARAMETER Experiment Name: At_Shoots__P Parameter: Age (day) Value: 14
  misc_feature: MA Experiment 20000438 PARAMETER Experiment Name: At_Shoots__P Parameter: Tissue Value: Shoots vs. Whole Plant
  misc_feature: MA Experiment ID: 20001555 Result: Up-regulated in Transcription
  misc_feature: MA Experiment 20001555 PARAMETER Experiment Name: At_Drought_Soil_Dry_P Parameter: Age (day) Value: 24
  misc_feature: MA Experiment 20001555 PARAMETER Experiment Name: At_Drought_Soil_Dry_P Parameter: Organism Value: A. thaliana
  misc_feature: MA Experiment 20001555 PARAMETER Experiment Name: At_Drought_Soil_Dry_P Parameter: Plant Line Value: WS
  misc_feature: MA Experiment 20001555 PARAMETER Experiment Name: At_Drought_Soil_Dry_P Parameter: Post Timepoint (hr) Value: None
  misc_feature: MA Experiment 20001555 PARAMETER Experiment Name: At_Drought_Soil_Dry_P Parameter: Post-Treatment Value: None
  misc_feature: MA Experiment 20001555 PARAMETER Experiment Name: At_Drought_Soil_Dry_P Parameter: Timepoint (day) Value: 10
  misc_feature: MA Experiment 20001555 PARAMETER Experiment Name: At_Drought_Soil_Dry_P Parameter: Treatment Value: Drought vs. No Drought
  misc_feature: MA Experiment ID: 20001556 Result: Up-regulated in Transcription
  misc_feature: MA Experiment 20001556 PARAMETER Experiment Name: At_Drought_Soil_Dry_P Parameter: Age (day) Value: 26
  misc_feature: MA Experiment 20001556 PARAMETER Experiment Name: At_Drought_Soil_Dry_P Parameter: Organism Value: A. thaliana
  misc_feature: MA Experiment 20001556 PARAMETER Experiment Name: At_Drought_Soil_Dry_P Parameter: Plant Line Value: WS
  misc_feature: MA Experiment 20001556 PARAMETER Experiment Name: At_Drought_Soil_Dry_P Parameter: Post Timepoint (hr) Value: None
  misc_feature: MA Experiment 20001556 PARAMETER Experiment Name: At_Drought_Soil_Dry_P Parameter: Post-Treatment Value: None
  misc_feature: MA Experiment 20001556 PARAMETER Experiment Name: At_Drought_Soil_Dry_P Parameter: Timepoint (day) Value: 12
  misc_feature: MA Experiment 20001556 PARAMETER Experiment Name: At_Drought_Soil_Dry_P Parameter: Treatment Value: Drought vs. No Drought
  misc_feature: MA Experiment ID: 20001557 Result: Up-regulated in Transcription
  misc_feature: MA Experiment 20001557 PARAMETER Experiment Name: At_Drought_Soil_Dry_P Parameter: Age (day) Value: 27
  misc_feature: MA Experiment 20001557 PARAMETER Experiment Name: At_Drought_Soil_Dry_P Parameter: Organism Value: A. thaliana
  misc_feature: MA Experiment 20001557 PARAMETER Experiment Name: At_Drought_Soil_Dry_P Parameter: Plant Line Value: WS
  misc_feature: MA Experiment 20001557 PARAMETER Experiment Name: At_Drought_Soil_Dry_P Parameter: Post Timepoint (hr) Value: 3
  misc_feature: MA Experiment 20001557 PARAMETER Experiment Name: At_Drought_Soil_Dry_P Parameter: Post-Treatment Value: Re-Water vs. No Drought
  misc_feature: MA Experiment 20001557 PARAMETER Experiment Name: At_Drought_Soil_Dry_P Parameter: Timepoint (day) Value: 13
  misc_feature: MA Experiment 20001557 PARAMETER Experiment Name: At_Drought_Soil_Dry_P Parameter: Treatment Value: Drought vs. No Drought
  misc_feature: MA Experiment ID: 20001905 Result: Up-regulated in Transcription
  misc_feature: MA Experiment 20001905 PARAMETER Experiment Name: At_Drought_Reproduction_P Parameter: Age (day) Value: 40
  misc_feature: MA Experiment 20001905 PARAMETER Experiment Name: At_Drought_Reproduction_P Parameter: Organism Value: A. thaliana
  misc_feature: MA Experiment 20001905 PARAMETER Experiment Name: At_Drought_Reproduction_P Parameter: Plant Line Value: WS
  misc_feature: MA Experiment 20001905 PARAMETER Experiment Name: At_Drought_Reproduction_P Parameter: Timepoint (day) Value: 10
  misc_feature: MA Experiment 20001905 PARAMETER Experiment Name: At_Drought_Reproduction_P Parameter: Tissue Value: Rosettes
  misc_feature: MA Experiment 20001905 PARAMETER Experiment Name: At_Drought_Reproduction_P Parameter: Treatment Value: Drought vs. No Drought
ccctctctttaagctctctctctttctgtggctattctctttctctctttctctctgaatccgccgccacgccttcaccatggcctggcttagccgcgtgagaggagtttcgccggtgacaaggctcgcagcgattcgtcgatcttttggatcagcggccgcgttggagtttgactacgactccgatgacgagtacttgtacggagatgatcgccgcctcgcggaaccgaggcttgggttggatggatcggggccggatagaggagtgcagtgggtgcttatgggagcccctggagcatggaggcacgtcttcgccgagaggctctccaaactgcttgaagttcctcacatttccatggggtcccttgtccgtcaagaactcaaccctagatcttctctctacaaggagattgcaagtgctgtaaatgaacgaaagctggttccaaagagtgttgtgtttgcgttgctatcaaagaggctcgaagaaggctatgcaagaggggaaactggtttcattcttcatggcattcctcgcactcgttttcaagccgaaactcttgatcaaatcgctcaaattgaccttgtcgtcaatctcaaaggctctgaagaccatctggtaaaccggaatgctctcaatgaaacagctctgcctcagcaggagttcctcggctctatgttacactcacctgttgcaatcaatgctcggagggagagtgtcggtgtctacgcacaggaggtggaagaatactataggatcagaggaaactgctagactttcatgttggcggtgccacatcagcagacacatggcagggcttgttggcagctttacatctgaagcaggtgaatttgacgacttcacagaagctaactctgtgatgatgaactacaaaacagagctttgctttataaattttgatctttctctctcattttatgggtcttcttaacccctaatatgcaactttttttttgttttctttttctgtaattcaaagttttgcgagagatcaaacgtgatgaggatgataccactaaagcttgtaatgagtctattatatatacaacaaagattttccatctatgaaaaatagttcctatatc

SEQ ID NO: 37196 - protein, 230 aa, Arabidopsis thaliana
  peptide (1)..(230): Ceres Seq. ID no. 12393771
  misc_feature (66)..(182): Homolog of NCBI NO: 27468720 NR Description: adenylate kinase [Staphylococcus epidermidis ATCC
  misc_feature (66)..(184): Homolog of NCBI NO: 2924292 NR Description: AdK adenylate kinase [Streptomyces coelicolor]
  misc_feature (66)..(184): Homolog of NCBI NO: 1076067 NR Description: adenylate kinase (EC 2.7.4.3) - Streptomyces
  misc_feature (60)..(116): Homolog of NCBI NO: 6063552 NR Description: ESTs AU065232(E60855),C23624(S1554), correspond to a region of the predicted gene.~similar to putative
  misc_feature (111)..(182): Homolog of NCBI NO: 6063552 NR Description: ESTs AU065232(E60855),C23624(S1554), correspond to a region of the predicted gene.~similar to putative
  misc_feature (61)..(180): Homolog of NCBI NO: 30687836 NR Description: adenylate kinase -related [Arabidopsis thaliana]
  misc_feature (1)..(182): Homolog of NCBI NO: 29427816 NR Description: Adenylate kinase, chloroplast precursor (ATP-AMP
  misc_feature (4)..(182): Homolog of NCBI NO: 15228109 NR Description: putative adenylate kinase
  misc_feature (1)..(220): Homolog of NCBI NO: 6091724 NR Description: putative adenylate kinase [Arabidopsis thaliana]
  misc_feature (1)..(225): Homolog of NCBI NO: 30678433 NR Description: adenylate kinase -related [Arabidopsis thaliana]
MAWLSRVRGVSPVTRLAAIRRSFGSAAALEFDYDSDDEYLYGDDRRLAEPRLGLDGSGPDRGVQWVLMGAPGAWRHVFAERLSKLLEVPHISMGSLVRQELNPRSSLYKEIASAVNERKLVPKSVVFALLSKRLEEGYARGETGFILHGIPRTRFQAETLDQIAQIDLVVNLKGSEDHLVNRNALNETALPQQEFLGSMLHSPVAINARRESVGVYAQEVEEYYRIRGNC

SEQ ID NO: 37197 - protein, 163 aa, Arabidopsis thaliana
  peptide (1)..(163): Ceres Seq. ID no. 12393772
  misc_feature (1)..(115): Homolog of NCBI NO: 27468720 NR Description: adenylate kinase [Staphylococcus epidermidis ATCC
  misc_feature (1)..(117): Homolog of NCBI NO: 2924292 NR Description: AdK adenylate kinase [Streptomyces coelicolor]
  misc_feature (1)..(117): Homolog of NCBI NO: 1076067 NR Description: adenylate kinase (EC 2.7.4.3) - Streptomyces
  misc_feature (1)..(49): Homolog of NCBI NO: 6063552 NR Description: ESTs AU065232(E60855),C23624(S1554), correspond to a region of the predicted gene.~similar to putative
  misc_feature (44)..(115): Homolog of NCBI NO: 6063552 NR Description: ESTs AU065232(E60855),C23624(S1554), correspond to a region of the predicted gene.~similar to putative
  misc_feature (1)..(113): Homolog of NCBI NO: 30687836 NR Description: adenylate kinase -related [Arabidopsis thaliana]
  misc_feature (1)..(115): Homolog of NCBI NO: 29427816 NR Description: Adenylate kinase, chloroplast precursor (ATP-AMP
  misc_feature (1)..(115): Homolog of NCBI NO: 15228109 NR Description: putative adenylate kinase
  misc_feature (1)..(153): Homolog of NCBI NO: 6091724 NR Description: putative adenylate kinase [Arabidopsis thaliana]
  misc_feature (1)..(158): Homolog of NCBI NO: 30678433 NR Description: adenylate kinase -related [Arabidopsis thaliana]
MGAPGAWRHVFAERLSKLLEVPHISMGSLVRQELNPRSSLYKEIASAVNERKLVPKSVVFALLSKRLEEGYARGETGFILHGIPRTRFQAETLDQIAQIDLVVNLKGSEDHLVNRNALNETALPQQEFLGSMLHSPVAINARRESVGVYAQEVEEYYRIRGNC

SEQ ID NO: 37198 - protein, 138 aa, Arabidopsis thaliana
  peptide (1)..(138): Ceres Seq. ID no. 12393773
  misc_feature (1)..(90): Homolog of NCBI NO: 27468720 NR Description: adenylate kinase [Staphylococcus epidermidis ATCC
  misc_feature (1)..(92): Homolog of NCBI NO: 2924292 NR Description: AdK adenylate kinase [Streptomyces coelicolor]
  misc_feature (1)..(92): Homolog of NCBI NO: 1076067 NR Description: adenylate kinase (EC 2.7.4.3) - Streptomyces
  misc_feature (1)..(24): Homolog of NCBI NO: 6063552 NR Description: ESTs AU065232(E60855),C23624(S1554), correspond to a region of the predicted gene.~similar to putative
  misc_feature (19)..(90): Homolog of NCBI NO: 6063552 NR Description: ESTs AU065232(E60855),C23624(S1554), correspond to a region of the predicted gene.~similar to putative
  misc_feature (1)..(88): Homolog of NCBI NO: 30687836 NR Description: adenylate kinase -related [Arabidopsis thaliana]
  misc_feature (1)..(90): Homolog of NCBI NO: 29427816 NR Description: Adenylate kinase, chloroplast precursor (ATP-AMP
  misc_feature (1)..(90): Homolog of NCBI NO: 15228109 NR Description: putative adenylate kinase
  misc_feature (1)..(128): Homolog of NCBI NO: 6091724 NR Description: putative adenylate kinase [Arabidopsis thaliana]
  misc_feature (1)..(133): Homolog of NCBI NO: 30678433 NR Description: adenylate kinase -related [Arabidopsis thaliana]
MGSLVRQELNPRSSLYKEIASAVNERKLVPKSVVFALLSKRLEEGYARGETGFILHGIPRTRFQAETLDQIAQIDLVVNLKGSEDHLVNRNALNETALPQQEFLGSMLHSPVAINARRESVGVYAQEVEEYYRIRGNC

SEQ ID NO: 37199 - DNA, 566 bp, Arabidopsis thaliana
  misc_feature (1)..(566): Ceres Seq. ID no. 12330413
  misc_feature: MA Experiment ID: 108595 Result: Up-regulated in Transcription
  misc_feature: MA Experiment 108595 PARAMETER Experiment Name: At_Ler-pi_Ovule_cDNA_P Parameter: Plant Line Value: null
  misc_feature: MA Experiment ID: 20000111 Result: Up-regulated in Transcription
  misc_feature: MA Experiment 20000111 PARAMETER Experiment Name: At_42deg_Heat_cDNA_P Parameter: Temperature (deg C) Value: 42 vs. 22
  misc_feature: MA Experiment 20000111 PARAMETER Experiment Name: At_42deg_Heat_cDNA_P Parameter: Timepoint (hr) Value: 6
  misc_feature: MA Experiment 20000111 PARAMETER Experiment Name: At_42deg_Heat_cDNA_P Parameter: Tissue Value: Aerial
  misc_feature: MA Experiment ID: 20000144 Result: Up-regulated in Transcription
  misc_feature: MA Experiment 20000144 PARAMETER Experiment Name: At_42deg_Heat_cDNA_P Parameter: Temperature (deg C) Value: 42 vs. 22
  misc_feature: MA Experiment 20000144 PARAMETER Experiment Name: At_42deg_Heat_cDNA_P Parameter: Timepoint (hr) Value: 1
  misc_feature: MA Experiment 20000144 PARAMETER Experiment Name: At_42deg_Heat_cDNA_P Parameter: Tissue Value: Aerial
  misc_feature: MA Experiment ID: 20000173 Result: Up-regulated in Transcription
  misc_feature: MA Experiment 20000173 PARAMETER Experiment Name: At_42deg_Heat_P Parameter: Age (day) Value: 14
  misc_feature: MA Experiment 20000173 PARAMETER Experiment Name: At_42deg_Heat_P Parameter: Organism Value: A. thaliana
  misc_feature: MA Experiment 20000173 PARAMETER Experiment Name: At_42deg_Heat_P Parameter: Plant Line Value: WS
  misc_feature: MA Experiment 20000173 PARAMETER Experiment Name: At_42deg_Heat_P Parameter: Temperature (deg C) Value: 42 vs. 22
  misc_feature: MA Experiment 20000173 PARAMETER Experiment Name: At_42deg_Heat_P Parameter: Timepoint (hr) Value: 6
  misc_feature: MA Experiment 20000173 PARAMETER Experiment Name: At_42deg_Heat_P Parameter: Tissue Value: Aerial
  misc_feature: MA Experiment ID: 20001557 Result: Up-regulated in Transcription
  misc_feature: MA Experiment 20001557 PARAMETER Experiment Name: At_Drought_Soil_Dry_P Parameter: Age (day) Value: 27
  misc_feature: MA Experiment 20001557 PARAMETER Experiment Name: At_Drought_Soil_Dry_P Parameter: Organism Value: A. thaliana
  misc_feature: MA Experiment 20001557 PARAMETER Experiment Name: At_Drought_Soil_Dry_P Parameter: Plant Line Value: WS
  misc_feature: MA Experiment 20001557 PARAMETER Experiment Name: At_Drought_Soil_Dry_P Parameter: Post Timepoint (hr) Value: 3
  misc_feature: MA Experiment 20001557 PARAMETER Experiment Name: At_Drought_Soil_Dry_P Parameter: Post-Treatment Value: Re-Water vs. No Drought
  misc_feature: MA Experiment 20001557 PARAMETER Experiment Name: At_Drought_Soil_Dry_P Parameter: Timepoint (day) Value: 13
  misc_feature: MA Experiment 20001557 PARAMETER Experiment Name: At_Drought_Soil_Dry_P Parameter: Treatment Value: Drought vs. No Drought
atcctctcctttctctctctagatttttatcccctttccctctctctctctcctagggttttcgtctctctcgttcactgttaatagtcttaacggagaggtttgattagcctccgggaagattctactgcgaactttggacacatctctctctgccatggcggctgagaagttaagggacttgagccagccgattgacgtcggtgtgctcgatgccactgttgcggccttctttgttaccggatctaaagaagaggtgcttcaatttctctgggttttgacttgttcaaggggctcgaccaatgattagtctatttcgcgggtctgttttattgtttgagcgtcttcttctcgattaggtgtgaggagtaggaattaggagcgtttcgttgttagggttttagcactctgatacatttttgtcttaagacgcttgtttcgggcagctcgagttttcaatttggatttttagggtcctagagttttagtaatgtattgaattacaatggtttagttgctcactgagactcgagattggtgaattaagtcccttgttcttttgtcgc

SEQ ID NO: 37200 - protein, 50 aa, Arabidopsis thaliana
  peptide (1)..(50): Ceres Seq. ID no. 12330414
  misc_feature (1)..(33): Homolog of NCBI NO: 15237894 NR Description: Exportin1 (XPO1) protein
  misc_feature (1)..(50): Homolog of NCBI NO: 21618204 NR Description: unknown [Arabidopsis thaliana]
MAAEKLRDLSQPIDVGVLDATVAAFFVTGSKEEVLQFLWVLTCSRGSTND

SEQ ID NO: 37201 - DNA, 2709 bp, Arabidopsis thaliana; identical to SEQ ID NO: 37146
  misc_feature (1)..(2709): Ceres Seq. ID no. 13591434
  misc_feature: MA Experiment ID: 20000184 Result: Down-regulated in Transcription
  misc_feature: MA Experiment 20000184 PARAMETER Experiment Name: At_Shoots__P Parameter: Age (day) Value: 7
  misc_feature: MA Experiment 20000184 PARAMETER Experiment Name: At_Shoots__P Parameter: Tissue Value: Shoots vs. Whole Plant

SEQ ID NO: 37202 - protein, 902 aa, Arabidopsis thaliana; identical to SEQ ID NO: 37147
  peptide (1)..(902): Ceres Seq. ID no. 13591435
  misc_feature (536)..(608): Pfam Name: Ubiquitin family Pfam Description: Ubiquitin family
  misc_feature (536)..(608): Pfam Name: Ubiquitin family Pfam Description: Ubiquitin family
  misc_feature (657)..(853): Homolog of NCBI NO: 20071327 NR Description: Shoc2 protein [Mus musculus]
  misc_feature (677)..(868): Homolog of NCBI NO: 23124578 NR Description: hypothetical protein [Nostoc punctiforme]
  misc_feature (678)..(859): Homolog of NCBI NO: 24215148 NR Description: putative outermembrane protein
  misc_feature (657)..(853): Homolog of NCBI NO: 40788390 NR Description: KIAA0862 protein [Homo sapiens]
  misc_feature (657)..(853): Homolog of NCBI NO: 14423936 NR Description: Leucine-rich repeat protein SHOC-2 (Ras-binding
  misc_feature (657)..(853): Homolog of NCBI NO: 20071327 NR Description: Shoc2 protein [Mus musculus]
  misc_feature (678)..(859): Homolog of NCBI NO: 24215148 NR Description: putative outermembrane protein
  misc_feature (657)..(853): Homolog of NCBI NO: 14423936 NR Description: Leucine-rich repeat protein SHOC-2 (Ras-binding
  misc_feature (524)..(902): Homolog of NCBI NO: 37534990 NR Description: putative leucine-rich repeat protein
  misc_feature (646)..(900): Homolog of NCBI NO: 22326653 NR Description: leucine rich repeat protein family [Arabidopsis
  misc_feature (646)..(898): Homolog of NCBI NO: 11357392 NR Description: hypothetical protein F13G24.110 - Arabidopsis
  misc_feature (663)..(874): Homolog of NCBI NO: 19074817 NR Description: LEUCINE-RICH RAS SUPPRESSOR PROTEIN
  misc_feature (657)..(853): Homolog of NCBI NO: 6677945 NR Description: soc-2 suppressor of clear homolog
  misc_feature (657)..(853): Homolog of NCBI NO: 40788390 NR Description: KIAA0862 protein [Homo sapiens]
  misc_feature (677)..(868): Homolog of NCBI NO: 23124578 NR Description: hypothetical protein [Nostoc punctiforme]
  misc_feature (657)..(853): Homolog of NCBI NO: 6677945 NR Description: soc-2 suppressor of clear homolog
  misc_feature (663)..(874): Homolog of NCBI NO: 19074817 NR Description: LEUCINE-RICH RAS SUPPRESSOR PROTEIN
  misc_feature (646)..(898): Homolog of NCBI NO: 11357392 NR Description: hypothetical protein F13G24.110 - Arabidopsis
  misc_feature (646)..(900): Homolog of NCBI NO: 22326653 NR Description: leucine rich repeat protein family [Arabidopsis
  misc_feature (524)..(902): Homolog of NCBI NO: 37534990 NR Description: putative leucine-rich repeat protein

SEQ ID NO: 37203 - protein, 851 aa, Arabidopsis thaliana; identical to SEQ ID NO: 37148
  peptide (1)..(851): Ceres Seq. ID no. 13591436
  misc_feature (485)..(557): Pfam Name: Ubiquitin family Pfam Description: Ubiquitin family
  misc_feature (485)..(557): Pfam Name: Ubiquitin family Pfam Description: Ubiquitin family
  misc_feature (606)..(802): Homolog of NCBI NO: 20071327 NR Description: Shoc2 protein [Mus musculus]
  misc_feature (626)..(817): Homolog of NCBI NO: 23124578 NR Description: hypothetical protein [Nostoc punctiforme]
  misc_feature (627)..(808): Homolog of NCBI NO: 24215148 NR Description: putative outermembrane protein
  misc_feature (606)..(802): Homolog of NCBI NO: 40788390 NR Description: KIAA0862 protein [Homo sapiens]
  misc_feature (606)..(802): Homolog of NCBI NO: 14423936 NR Description: Leucine-rich repeat protein SHOC-2 (Ras-binding
  misc_feature (606)..(802): Homolog of NCBI NO: 20071327 NR Description: Shoc2 protein [Mus musculus]
  misc_feature (627)..(808): Homolog of NCBI NO: 24215148 NR Description: putative outermembrane protein
  misc_feature (606)..(802): Homolog of NCBI NO: 14423936 NR Description: Leucine-rich repeat protein SHOC-2 (Ras-binding
  misc_feature (473)..(851): Homolog of NCBI NO: 37534990 NR Description: putative leucine-rich repeat protein
  misc_feature (595)..(849): Homolog of NCBI NO: 22326653 NR Description: leucine rich repeat protein family [Arabidopsis
  misc_feature (595)..(847): Homolog of NCBI NO: 11357392 NR Description: hypothetical protein F13G24.110 - Arabidopsis
  misc_feature (612)..(823): Homolog of NCBI NO: 19074817 NR Description: LEUCINE-RICH RAS SUPPRESSOR PROTEIN
  misc_feature (606)..(802): Homolog of NCBI NO: 6677945 NR Description: soc-2 suppressor of clear homolog
  misc_feature (606)..(802): Homolog of NCBI NO: 40788390 NR Description: KIAA0862 protein [Homo sapiens]
  misc_feature (626)..(817): Homolog of NCBI NO: 23124578 NR Description: hypothetical protein [Nostoc punctiforme]
  misc_feature (606)..(802): Homolog of NCBI NO: 6677945 NR Description: soc-2 suppressor of clear homolog
  misc_feature (612)..(823): Homolog of NCBI NO: 19074817 NR Description: LEUCINE-RICH RAS SUPPRESSOR PROTEIN
  misc_feature (595)..(847): Homolog of NCBI NO: 11357392 NR Description: hypothetical protein F13G24.110 - Arabidopsis
  misc_feature (595)..(849): Homolog of NCBI NO: 22326653 NR Description: leucine rich repeat protein family [Arabidopsis
  misc_feature (473)..(851): Homolog of NCBI NO: 37534990 NR Description: putative leucine-rich repeat protein

SEQ ID NO: 37204 - protein, 813 aa, Arabidopsis thaliana; identical to SEQ ID NO: 37149
  peptide (1)..(813): Ceres Seq. ID no. 13591437
  misc_feature (447)..(519): Pfam Name: Ubiquitin family Pfam Description: Ubiquitin family
  misc_feature (447)..(519): Pfam Name: Ubiquitin family Pfam Description: Ubiquitin family
  misc_feature (568)..(764): Homolog of NCBI NO: 20071327 NR Description: Shoc2 protein [Mus musculus]
  misc_feature (588)..(779): Homolog of NCBI NO: 23124578 NR Description: hypothetical protein [Nostoc punctiforme]
  misc_feature (589)..(770): Homolog of NCBI NO: 24215148 NR Description: putative outermembrane protein
  misc_feature (568)..(764): Homolog of NCBI NO: 40788390 NR Description: KIAA0862 protein [Homo sapiens]
  misc_feature (568)..(764): Homolog of NCBI NO: 14423936 NR Description: Leucine-rich repeat protein SHOC-2 (Ras-binding
  misc_feature (568)..(764): Homolog of NCBI NO: 20071327 NR Description: Shoc2 protein [Mus musculus]
  misc_feature (589)..(770): Homolog of NCBI NO: 24215148 NR Description: putative outermembrane protein
  misc_feature (568)..(764): Homolog of NCBI NO: 14423936 NR Description: Leucine-rich repeat protein SHOC-2 (Ras-binding
  misc_feature (435)..(813): Homolog of NCBI NO: 37534990 NR Description: putative leucine-rich repeat protein
  misc_feature (557)..(811): Homolog of NCBI NO: 22326653 NR Description: leucine rich repeat protein family [Arabidopsis
  misc_feature (557)..(809): Homolog of NCBI NO: 11357392 NR Description: hypothetical protein F13G24.110 - Arabidopsis
  misc_feature (574)..(785): Homolog of NCBI NO: 19074817 NR Description: LEUCINE-RICH RAS SUPPRESSOR PROTEIN
  misc_feature (568)..(764): Homolog of NCBI NO: 6677945 NR Description: soc-2 suppressor of clear homolog
  misc_feature (568)..(764): Homolog of NCBI NO: 40788390 NR Description: KIAA0862 protein [Homo sapiens]
  misc_feature (588)..(779): Homolog of NCBI NO: 23124578 NR Description: hypothetical protein [Nostoc punctiforme]
  misc_feature (568)..(764): Homolog of NCBI NO: 6677945 NR Description: soc-2 suppressor of clear homolog
  misc_feature (574)..(785): Homolog of NCBI NO: 19074817 NR Description: LEUCINE-RICH RAS SUPPRESSOR PROTEIN
  misc_feature (557)..(809): Homolog of NCBI NO: 11357392 NR Description: hypothetical protein F13G24.110 - Arabidopsis
  misc_feature (557)..(811): Homolog of NCBI NO: 22326653 NR Description: leucine rich repeat protein family [Arabidopsis
  misc_feature (435)..(813): Homolog of NCBI NO: 37534990 NR Description: putative leucine-rich repeat protein

SEQ ID NO: 37205 - DNA, 1376 bp, Arabidopsis thaliana
  misc_feature (1)..(1376): Ceres Seq. ID no. 13575567
  misc_feature: MA Experiment ID: 108434 Result: Down-regulated in Transcription
  misc_feature: MA Experiment 108434 PARAMETER Experiment Name: At_Root_Tips_cDNA_P Parameter: Tissue Value: Root Tips
  misc_feature: MA Experiment ID: 108576 Result: Up-regulated in Transcription
  misc_feature: MA Experiment 108576 PARAMETER Experiment Name: At_42deg_Heat_cDNA_P Parameter: Temperature (deg C) Value: 42 vs. 22
  misc_feature: MA Experiment 108576 PARAMETER Experiment Name: At_42deg_Heat_cDNA_P Parameter: Timepoint (hr) Value: 1
  misc_feature: MA Experiment 108576 PARAMETER Experiment Name: At_42deg_Heat_cDNA_P Parameter: Tissue Value: Aerial
  misc_feature: MA Experiment ID: 108577 Result: Up-regulated in Transcription
  misc_feature: MA Experiment 108577 PARAMETER Experiment Name: At_42deg_Heat_cDNA_P Parameter: Temperature (deg C) Value: 42 vs. 22
  misc_feature: MA Experiment 108577 PARAMETER Experiment Name: At_42deg_Heat_cDNA_P Parameter: Timepoint (hr) Value: 6
  misc_feature: MA Experiment 108577 PARAMETER Experiment Name: At_42deg_Heat_cDNA_P Parameter: Tissue Value: Aerial
  misc_feature: MA Experiment ID: 108595 Result: Down-regulated in Transcription
  misc_feature: MA Experiment 108595 PARAMETER Experiment Name: At_Ler-pi_Ovule_cDNA_P Parameter: Plant Line Value: null
  misc_feature: MA Experiment ID: 20000112 Result: Up-regulated in Transcription
  misc_feature: MA Experiment 20000112 PARAMETER Experiment Name: At_42deg_Heat_cDNA_P Parameter: Temperature (deg C) Value: 42 vs. 22
  misc_feature: MA Experiment 20000112 PARAMETER Experiment Name: At_42deg_Heat_cDNA_P Parameter: Timepoint (hr) Value: 2
  misc_feature: MA Experiment 20000112 PARAMETER Experiment Name: At_42deg_Heat_cDNA_P Parameter: Tissue Value: Aerial
  misc_feature: MA Experiment ID: 20000113 Result: Up-regulated in Transcription
  misc_feature: MA Experiment 20000113 PARAMETER Experiment Name: At_42deg_Heat_cDNA_P Parameter: Temperature (deg C) Value: 42 vs. 22
  misc_feature: MA Experiment 20000113 PARAMETER Experiment Name: At_42deg_Heat_cDNA_P Parameter: Timepoint (hr) Value: 8
  misc_feature: MA Experiment 20000113 PARAMETER Experiment Name: At_42deg_Heat_cDNA_P Parameter: Tissue Value: Aerial
  misc_feature: MA Experiment ID: 20000171 Result: Up-regulated in Transcription
  misc_feature: MA Experiment 20000171 PARAMETER Experiment Name: At_42deg_Heat_P Parameter: Age (day) Value: 14
  misc_feature: MA Experiment 20000171 PARAMETER Experiment Name: At_42deg_Heat_P Parameter: Organism Value: A. thaliana
  misc_feature: MA Experiment 20000171 PARAMETER Experiment Name: At_42deg_Heat_P Parameter: Plant Line Value: WS
  misc_feature: MA Experiment 20000171 PARAMETER Experiment Name: At_42deg_Heat_P Parameter: Temperature (deg C) Value: 42 vs. 22
  misc_feature: MA Experiment 20000171 PARAMETER Experiment Name: At_42deg_Heat_P Parameter: Timepoint (hr) Value: 1
  misc_feature: MA Experiment 20000171 PARAMETER Experiment Name: At_42deg_Heat_P Parameter: Tissue Value: Aerial
  misc_feature: MA Experiment ID: 20000173 Result: Up-regulated in Transcription
  misc_feature: MA Experiment 20000173 PARAMETER Experiment Name: At_42deg_Heat_P Parameter: Age (day) Value: 14
  misc_feature: MA Experiment 20000173 PARAMETER Experiment Name: At_42deg_Heat_P Parameter: Organism Value: A. thaliana
  misc_feature: MA Experiment 20000173 PARAMETER Experiment Name: At_42deg_Heat_P Parameter: Plant Line Value: WS
  misc_feature: MA Experiment 20000173 PARAMETER Experiment Name: At_42deg_Heat_P Parameter: Temperature (deg C) Value: 42 vs. 22
  misc_feature: MA Experiment 20000173 PARAMETER Experiment Name: At_42deg_Heat_P Parameter: Timepoint (hr) Value: 6
  misc_feature: MA Experiment 20000173 PARAMETER Experiment Name: At_42deg_Heat_P Parameter: Tissue Value: Aerial
  misc_feature: MA Experiment ID: 20000224 Result: Down-regulated in Transcription
  misc_feature: MA Experiment ID: 20000234 Result: Down-regulated in Transcription
  misc_feature: MA Experiment 20000234 PARAMETER Experiment Name: At_Siliques_P Parameter: Age (day) Value: 21
  misc_feature: MA Experiment 20000234 PARAMETER Experiment Name: At_Siliques_P Parameter: Organism Value: A. thaliana
  misc_feature: MA Experiment 20000234 PARAMETER Experiment Name: At_Siliques_P Parameter: Plant Line Value: WS
  misc_feature: MA Experiment 20000234 PARAMETER Experiment Name: At_Siliques_P Parameter: Tissue Value: Less Than 5mm Siliques vs. Whole Plant
gcccctttgcgtgtttcagcttcttctttatgatctaattcatgtctatgtttcgtttgattctttgttcaattctgaattgagaaaatggcgattcgagatctgtctcttcggttttttagttcgactgatttgggaatgtgaagagatcagattgatttgttgacagagtcttgggggttttcaatcttattcctctagattttcgaaattcgattcctttacatcagatttcgcttaattctctgtcctaggtacaacaagaatggaagaagagtatgagagtcgtcgattgaggagatgggaagagttggacactgacatcttagtaagaattttccagaagtttagcgtctttgagttgacttcgggattagctcatgtttgtagaggatggagagctgcttgttgcgatccgattctttggaagacggtggatttgtcaaacatgagatctagtttcatcaagatcccattagagccttatgtctatgtggaacgccgatctgatgaggccctaacccgcatcctgaaactctccatgaaccttagcggaggaagcacgaggaccttgatttttcatttcaacttgttcttgagtgatgatcagcttacttacaccgcagaaaggtgtccagggttgagacgggtcgtcctaccggcttggaacagaataaagaagactggtatatgcaaagcgataagaatctggaaagatctagagtcactaacaatgccaagcatcgcaaacccgccttatctcttaacagaaattgccaagaactgcaagaattttaaagagctgaagatcatgggtccattcgaggtcttctttgcaaacacgctcatcacttgcctcccaaacatcaaaacactcagcatcagatgctcggcgataaagcgggaagcactgatgaaaatccttgacggattaccaagccttgaagtgctcaacatatcacactctcacctagtggagtacagcggttggcagcctcagcagaaggtgattgttagagagctcgataagacgataatggagaaaacagcaaggctaaagaaattcttgacttgcatggatcacaagacgtgtgtgatgtgtcagaggactgaaaacgatgaagggattgtgagatggtacaagtatgaggaaggagactggaaggttgatgaagtgagttctcttcatctttgatgtttctgctgtgatcattctctgtgaaggacttaacttgttattgttctcatctttgactgttgaattgtttatttctttgtgttgtttgttttgatttgaatcgtattatgtgtatatatctgtaggctatgccaatgaatgtatgtagtgatcaacttttgatcaccaccaaccttgc

SEQ ID NO: 37206 - protein, 309 aa, Arabidopsis thaliana
  peptide (1)..(309): Ceres Seq. ID no. 13575568
  misc_feature (13)..(231): Homolog of NCBI NO: 18424042 NR Description: SKP1 interacting partner 1 (SKIP1) [Arabidopsis
  misc_feature (11)..(231): Homolog of NCBI NO: 30692594 NR Description: predicted protein [Arabidopsis thaliana]
  misc_feature (1)..(231): Homolog of NCBI NO: 18412951 NR Description: F-box protein family, AtFBL22 [Arabidopsis
  misc_feature (12)..(222): Homolog of NCBI NO: 37718854 NR Description: hypothetical protein [Oryza sativa (japonica
  misc_feature (1)..(231): Homolog of NCBI NO: 18412953 NR Description: F-box protein family, AtFBL9/AtFBL23 [Arabidopsis
  misc_feature (4)..(63): Homolog of NCBI NO: 15234238 NR Description: F-box protein family [Arabidopsis thaliana]
  misc_feature (59)..(307): Homolog of NCBI NO: 15234238 NR Description: F-box protein family [Arabidopsis thaliana]
  misc_feature (111)..(309): Homolog of NCBI NO: 37535806 NR Description: putative Rhizobium-induced nodule development
  misc_feature (1)..(309): Homolog of NCBI NO: 21618163 NR Description: unknown [Arabidopsis thaliana]
  misc_feature (1)..(309): Homolog of NCBI NO: 15229043 NR Description: F-box protein family [Arabidopsis thaliana]
  misc_feature (13)..(231): Homolog of NCBI NO: 18424042 NR Description: SKP1 interacting partner 1 (SKIP1) [Arabidopsis
  misc_feature (11)..(231): Homolog of NCBI NO: 30692594 NR Description: predicted protein [Arabidopsis thaliana]
  misc_feature (1)..(231): Homolog of NCBI NO: 18412951 NR Description: F-box protein family, AtFBL22 [Arabidopsis
  misc_feature (12)..(222): Homolog of NCBI NO: 37718854 NR Description: hypothetical protein [Oryza sativa (japonica
  misc_feature (1)..(231): Homolog of NCBI NO: 18412953 NR Description: F-box protein family, AtFBL9/AtFBL23 [Arabidopsis
  misc_feature (4)..(63): Homolog of NCBI NO: 15234238 NR Description: F-box protein family [Arabidopsis thaliana]
  misc_feature (59)..(307): Homolog of NCBI NO: 15234238 NR Description: F-box protein family [Arabidopsis thaliana]
  misc_feature (111)..(309): Homolog of NCBI NO: 37535806 NR Description: putative Rhizobium-induced nodule development
  misc_feature (1)..(309): Homolog of NCBI NO: 21618163 NR Description: unknown [Arabidopsis thaliana]
  misc_feature (1)..(309): Homolog of NCBI NO: 15229043 NR Description: F-box protein family [Arabidopsis thaliana]
MEEEYESRRLRRWEELDTDILVRIFQKFSVFELTSGLAHVCRGWRAACCDPILWKTVDLSNMRSSFIKIPLEPYVYVERRSDEALTRILKLSMNLSGGSTRTLIFHFNLFLSDDQLTYTAERCPGLRRVVLPAWNRIKKTGICKAIRIWKDLESLTMPSIANPPYLLTEIAKNCKNFKELKIMGPFEVFFANTLITCLPNIKTLSIRCSAIKREALMKILDGLPSLEVLNISHSHLVEYSGWQPQQKVIVRELDKTIMEKTARLKKFLTCMDHKTCVMCQRTENDEGIVRWYKYEEGDWKVDEVSSLHL

SEQ ID NO: 37207 - protein, 248 aa, Arabidopsis thaliana
  peptide (1)..(248): Ceres Seq. ID no. 13575569
  misc_feature (1)..(170): Homolog of NCBI NO: 18413178 NR Description: F-box protein family, AtFBW2 [Arabidopsis
  misc_feature (1)..(170): Homolog of NCBI NO: 18424042 NR Description: SKP1 interacting partner 1 (SKIP1) [Arabidopsis
  misc_feature (1)..(170): Homolog of NCBI NO: 30692594 NR Description: predicted protein [Arabidopsis thaliana]
  misc_feature (1)..(170): Homolog of NCBI NO: 18412951 NR Description: F-box protein family, AtFBL22 [Arabidopsis
  misc_feature (1)..(161): Homolog of NCBI NO: 37718854 NR Description: hypothetical protein [Oryza sativa (japonica
  misc_feature (1)..(170): Homolog of NCBI NO: 18412953 NR Description: F-box protein family, AtFBL9/AtFBL23 [Arabidopsis
  misc_feature (1)..(246): Homolog of NCBI NO: 15234238 NR Description: F-box protein family [Arabidopsis thaliana]
  misc_feature (50)..(248): Homolog of NCBI NO: 37535806 NR Description: putative Rhizobium-induced nodule development
  misc_feature (1)..(248): Homolog of NCBI NO: 21618163 NR Description: unknown [Arabidopsis thaliana]
  misc_feature (1)..(248): Homolog of NCBI NO: 15229043 NR Description: F-box protein family [Arabidopsis thaliana]
  misc_feature (1)..(170): Homolog of NCBI NO: 18413178 NR Description: F-box protein family, AtFBW2 [Arabidopsis
  misc_feature (1)..(170): Homolog of NCBI NO: 18424042 NR Description: SKP1 interacting partner 1 (SKIP1) [Arabidopsis
  misc_feature (1)..(170): Homolog of NCBI NO: 30692594 NR Description: predicted protein [Arabidopsis thaliana]
  misc_feature (1)..(170): Homolog of NCBI NO: 18412951 NR Description: F-box protein family, AtFBL22 [Arabidopsis
  misc_feature (1)..(161): Homolog of NCBI NO: 37718854 NR Description: hypothetical protein [Oryza sativa (japonica
  misc_feature (1)..(170): Homolog of NCBI NO: 18412953 NR Description: F-box protein family, AtFBL9/AtFBL23 [Arabidopsis
  misc_feature (1)..(246): Homolog of NCBI NO: 15234238 NR Description: F-box protein family [Arabidopsis thaliana]
  misc_feature (50)..(248): Homolog of NCBI NO: 37535806 NR Description: putative Rhizobium-induced nodule development
  misc_feature (1)..(248): Homolog of NCBI NO: 21618163 NR Description: unknown [Arabidopsis thaliana]
  misc_feature (1)..(248): Homolog of NCBI NO: 15229043 NR Description: F-box protein family [Arabidopsis thaliana]
MRSSFIKIPLEPYVYVERRSDEALTRILKLSMNLSGGSTRTLIFHFNLFLSDDQLTYTAERCPGLRRVVLPAWNRIKKTGICKAIRIWKDLESLTMPSIANPPYLLTEIAKNCKNFKELKIMGPFEVFFANTLITCLPNIKTLSIRCSAIKREALMKILDGLPSLEVLNISHSHLVEYSGWQPQQKVIVRELDKTIMEKTARLKKFLTCMDHKTCVMCQRTENDEGIVRWYKYEEGDWKVDEVSSLHL

SEQ ID NO: 37208 - protein, 217 aa, Arabidopsis thaliana
  peptide (1)..(217): Ceres Seq. ID no. 13575570
  misc_feature (1)..(139): Homolog of NCBI NO: 18413178 NR Description: F-box protein family, AtFBW2 [Arabidopsis
  misc_feature (1)..(139): Homolog of NCBI NO: 18424042 NR Description: SKP1 interacting partner 1 (SKIP1) [Arabidopsis
  misc_feature (1)..(139): Homolog of NCBI NO: 30692594 NR Description: predicted protein [Arabidopsis thaliana]
  misc_feature (1)..(139): Homolog of NCBI NO: 18412951 NR Description: F-box protein family, AtFBL22 [Arabidopsis
  misc_feature (1)..(130): Homolog of NCBI NO: 37718854 NR Description: hypothetical protein [Oryza sativa (japonica
  misc_feature (1)..(139): Homolog of NCBI NO: 18412953 NR Description: F-box protein family, AtFBL9/AtFBL23 [Arabidopsis
  misc_feature (1)..(215): Homolog of NCBI NO: 15234238 NR Description: F-box protein family [Arabidopsis thaliana]
  misc_feature (19)..(217): Homolog of NCBI NO: 37535806 NR Description: putative Rhizobium-induced nodule development
  misc_feature (1)..(217): Homolog of NCBI NO: 21618163 NR Description: unknown [Arabidopsis thaliana]
  misc_feature (1)..(217): Homolog of NCBI NO: 15229043 NR Description: F-box protein family [Arabidopsis thaliana]
  misc_feature (1)..(139): Homolog of NCBI NO: 18413178 NR Description: F-box protein family, AtFBW2 [Arabidopsis
  misc_feature (1)..(139): Homolog of NCBI NO: 18424042 NR Description: SKP1 interacting partner 1 (SKIP1) [Arabidopsis
  misc_feature (1)..(139): Homolog of NCBI NO: 30692594 NR Description: predicted protein [Arabidopsis thaliana]
  misc_feature (1)..(139): Homolog of NCBI NO: 18412951 NR Description: F-box protein family, AtFBL22 [Arabidopsis
  misc_feature (1)..(130): Homolog of NCBI NO: 37718854 NR Description: hypothetical protein [Oryza sativa (japonica
  misc_feature (1)..(139): Homolog of NCBI NO: 18412953 NR Description: F-box protein family, AtFBL9/AtFBL23 [Arabidopsis
  misc_feature (1)..(215): Homolog of NCBI NO: 15234238 NR Description: F-box protein family [Arabidopsis thaliana]
  misc_feature (19)..(217): Homolog of NCBI NO: 37535806 NR Description: putative Rhizobium-induced nodule development
  misc_feature (1)..(217): Homolog of NCBI NO: 21618163 NR Description: unknown [Arabidopsis thaliana]
  misc_feature (1)..(217): Homolog of NCBI NO: 15229043 NR Description: F-box protein family [Arabidopsis thaliana]
MNLSGGSTRTLIFHFNLFLSDDQLTYTAERCPGLRRVVLPAWNRIKKTGICKAIRIWKDLESLTMPSIANPPYLLTEIAKNCKNFKELKIMGPFEVFFANTLITCLPNIKTLSIRCSAIKREALMKILDGLPSLEVLNISHSHLVEYSGWQPQQKVIVRELDKTIMEKTARLKKFLTCMDHKTCVMCQRTENDEGIVRWYKYEEGDWKVDEVSSLHL

SEQ ID NO: 37209 - DNA, 1187 bp, Arabidopsis thaliana
  misc_feature (1)..(1187): Ceres Seq. ID no. 12384786
  misc_feature: MA Experiment ID: 20000180 Result: Down-regulated in Transcription
  misc_feature: MA Experiment 20000180 PARAMETER Experiment Name: At_Germinating_Seeds_P Parameter: Age (hr) Value: 24 vs. 0
  misc_feature: MA Experiment 20000180 PARAMETER Experiment Name: At_Germinating_Seeds_P Parameter: Tissue Value: Germinating Seeds
  misc_feature: MA Experiment ID: 20000185 Result: Up-regulated in Transcription
  misc_feature: MA Experiment 20000185 PARAMETER Experiment Name: At_Roots__P Parameter: Age (day) Value: 7 vs. 21
  misc_feature: MA Experiment 20000185 PARAMETER Experiment Name: At_Roots__P Parameter: Organism Value: A. thaliana
  misc_feature: MA Experiment 20000185 PARAMETER Experiment Name: At_Roots__P Parameter: Tissue Value: Roots vs. Whole Plant
  misc_feature: MA Experiment ID: 20000234 Result: Up-regulated in Transcription
  misc_feature: MA Experiment 20000234 PARAMETER Experiment Name: At_Siliques_P Parameter: Age (day) Value: 21
  misc_feature: MA Experiment 20000234 PARAMETER Experiment Name: At_Siliques_P Parameter: Organism Value: A. thaliana
  misc_feature: MA Experiment 20000234 PARAMETER Experiment Name: At_Siliques_P Parameter: Plant Line Value: WS
  misc_feature: MA Experiment 20000234 PARAMETER Experiment Name: At_Siliques_P Parameter: Tissue Value: Less Than 5mm Siliques vs. Whole Plant
  misc_feature: MA Experiment ID: 20000235 Result: Up-regulated in Transcription
  misc_feature: MA Experiment 20000235 PARAMETER Experiment Name: At_Siliques_P Parameter: Age (day) Value: 21
  misc_feature: MA Experiment 20000235 PARAMETER Experiment Name: At_Siliques_P Parameter: Organism Value: A. thaliana
  misc_feature: MA Experiment 20000235 PARAMETER Experiment Name: At_Siliques_P Parameter: Plant Line Value: WS
  misc_feature: MA Experiment 20000235 PARAMETER Experiment Name: At_Siliques_P Parameter: Tissue Value: 5-10mm Siliques vs. Whole Plant
  misc_feature: MA Experiment ID: 20000264 Result: Up-regulated in Transcription
  misc_feature: MA Experiment 20000264 PARAMETER Experiment Name: At_Open_Flower_P Parameter: Age (day) Value: 21
  misc_feature: MA Experiment 20000264 PARAMETER Experiment Name: At_Open_Flower_P Parameter: Plant Line Value: WS
  misc_feature: MA Experiment 20000264 PARAMETER Experiment Name: At_Open_Flower_P Parameter: Tissue Value: Open Flower vs. Whole Plant
  misc_feature: MA Experiment ID: 20000265 Result: Up-regulated in Transcription
  misc_feature: MA Experiment 20000265 PARAMETER Experiment Name: At_Open_Flower_P Parameter: Age (day) Value: 21
  misc_feature: MA Experiment 20000265 PARAMETER Experiment Name: At_Open_Flower_P Parameter: Plant Line Value: WS
  misc_feature: MA Experiment 20000265 PARAMETER Experiment Name: At_Open_Flower_P Parameter: Tissue Value: Closed Flower vs. Whole Plant
  misc_feature: MA Experiment ID: 20000269 Result: Up-regulated in Transcription
  misc_feature: MA Experiment 20000269 PARAMETER Experiment Name: At_1mM_KNO3_L-vs-H_Roots_P Parameter: Age (day) Value: 7,10,12
  misc_feature: MA Experiment 20000269 PARAMETER Experiment Name: At_1mM_KNO3_L-vs-H_Roots_P Parameter: Organism Value: A. thaliana
  misc_feature: MA Experiment 20000269 PARAMETER Experiment Name: At_1mM_KNO3_L-vs-H_Roots_P Parameter: Plant Line Value: WS
  misc_feature: MA Experiment 20000269 PARAMETER Experiment Name: At_1mM_KNO3_L-vs-H_Roots_P Parameter: Timepoint (day) Value: 7,10,12
  misc_feature: MA Experiment 20000269 PARAMETER Experiment Name: At_1mM_KNO3_L-vs-H_Roots_P Parameter: Tissue Value: Roots
  misc_feature: MA Experiment 20000269 PARAMETER Experiment Name: At_1mM_KNO3_L-vs-H_Roots_P Parameter: Treatment Value: 1mM KNO3 vs. 50mM KNO3
  misc_feature: MA Experiment ID: 20000286 Result: Up-regulated in Transcription
  misc_feature: MA Experiment 20000286 PARAMETER Experiment Name: At_Open_Flower_P Parameter: Age (day) Value: 21
  misc_feature: MA Experiment 20000286 PARAMETER Experiment Name: At_Open_Flower_P Parameter: Plant Line Value: WS
  misc_feature: MA Experiment 20000286 PARAMETER Experiment Name: At_Open_Flower_P Parameter: Tissue Value: Half Open vs. Whole Plant
  misc_feature: MA Experiment ID: 20000438 Result: Up-regulated in Transcription
  misc_feature: MA Experiment 20000438 PARAMETER Experiment Name: At_Shoots__P Parameter: Age (day) Value: 14
  misc_feature: MA Experiment 20000438 PARAMETER Experiment Name: At_Shoots__P Parameter: Tissue Value: Shoots vs. Whole Plant
  misc_feature: MA Experiment ID: 20000453 Result: Down-regulated in Transcription
  misc_feature: MA Experiment 20000453 PARAMETER Experiment Name: At_100uM_ABA_P Parameter: Age (day) Value: 15
  misc_feature: MA Experiment 20000453 PARAMETER Experiment Name: At_100uM_ABA_P Parameter: Organism Value: A. thaliana
  misc_feature: MA Experiment 20000453 PARAMETER Experiment Name: At_100uM_ABA_P Parameter: Plant Line Value: WS
  misc_feature: MA Experiment 20000453 PARAMETER Experiment Name: At_100uM_ABA_P Parameter: Timepoint (hr) Value: 24
  misc_feature: MA Experiment 20000453 PARAMETER Experiment Name: At_100uM_ABA_P Parameter: Tissue Value: Aerial
  misc_feature: MA Experiment 20000453 PARAMETER Experiment Name: At_100uM_ABA_P Parameter: Treatment Value: 100uM ABA vs. No Treatment
  misc_feature: MA Experiment ID: 20001458 Result: Down-regulated in Transcription
  misc_feature: MA Experiment 20001458 PARAMETER Experiment Name: At_50mM_NH4NO3_L-to-H_P Parameter: Age (day) Value: Undefined
  misc_feature: MA Experiment 20001458 PARAMETER Experiment Name: At_50mM_NH4NO3_L-to-H_P Parameter: Organism Value: Undefined
  misc_feature: MA Experiment 20001458 PARAMETER Experiment Name: At_50mM_NH4NO3_L-to-H_P Parameter: Plant Line Value: Undefined
  misc_feature: MA Experiment 20001458 PARAMETER Experiment Name: At_50mM_NH4NO3_L-to-H_P Parameter: Timepoint (hr) Value: 2
  misc_feature: MA Experiment 20001458 PARAMETER Experiment Name: At_50mM_NH4NO3_L-to-H_P Parameter: Tissue Value: Siliques
  misc_feature: MA Experiment 20001458 PARAMETER Experiment Name: At_50mM_NH4NO3_L-to-H_P Parameter: Treatment Value: 50mM NH4NO3 vs. 100mM Manitol
  misc_feature: MA Experiment ID: 20001557 Result: Up-regulated in Transcription
  misc_feature: MA Experiment 20001557 PARAMETER Experiment Name: At_Drought_Soil_Dry_P Parameter: Age (day) Value: 27
  misc_feature: MA Experiment 20001557 PARAMETER Experiment Name: At_Drought_Soil_Dry_P Parameter: Organism Value: A. thaliana
  misc_feature: MA Experiment 20001557 PARAMETER Experiment Name: At_Drought_Soil_Dry_P Parameter: Plant Line Value: WS
  misc_feature: MA Experiment 20001557 PARAMETER Experiment Name: At_Drought_Soil_Dry_P Parameter: Post Timepoint (hr) Value: 3
  misc_feature: MA Experiment 20001557 PARAMETER Experiment Name: At_Drought_Soil_Dry_P Parameter: Post-Treatment Value: Re-Water vs. No Drought
  misc_feature: MA Experiment 20001557 PARAMETER Experiment Name: At_Drought_Soil_Dry_P Parameter: Timepoint (day) Value: 13
  misc_feature: MA Experiment 20001557 PARAMETER Experiment Name: At_Drought_Soil_Dry_P Parameter: Treatment Value: Drought vs. No Drought
  misc_feature: MA Experiment ID: 20001761 Result: Down-regulated in Transcription
  misc_feature: MA Experiment 20001761 PARAMETER Experiment Name: At_50mM_NH4NO3_L-to-H_P Parameter: Timepoint (hr) Value: 4
  misc_feature: MA Experiment 20001761 PARAMETER Experiment Name: At_50mM_NH4NO3_L-to-H_P Parameter: Tissue Value: Siliques
  misc_feature: MA Experiment 20001761 PARAMETER Experiment Name: At_50mM_NH4NO3_L-to-H_P Parameter: Treatment Value: 50mM NH4NO3 vs 100mM Mannitol
atcattctcggtttaactgaaacacataataaaacaaagagaaagagatataatatgggtgggtgggcaatcgcagtacacggtggtgccggtatcgaccctaatcttccggcagagagacaagaagaggcgaaacagcttttaactcgttgtctcaacctcggcataatagctttgcgttccaatgtttccgccattgacgtcgttgagctcgtcattagagaattggagacggatcctctgtttaattcaggccgtggatcttctttgacggagaaaggaacggttgagatggaagctagcattatggacggtacgaagagacgatgcggtgccgtttcggggataaccaccgtgaaaaatcctatatctcttgctcgtctcgtcatggacaaatctccccactcttaccttgctttctcaggtgcagaggatttcgcccgcaaacagggagttgaaattgtggacaacgagtactttgtcacggacgacaacgtaggaatgctcaagttggccaaggaagctaactccatcttgtttgattaccggattccgccgatgggatgtgccggcgcagctgcgaccgacagtccaatccaaatgaacggtcttccgatcagcatttacgcaccggagacagtcgggtgcgttgtggttgacgggaaaggacattgtgccgccgggacatccacgggtggtttaatgaacaagatgatgggaaggattggtgactcgccgctgataggagccgggacgtatgcgtcggagttttgtggtgtgtcgtgtaccggagaaggagaagccattataagagcaaccctagctcgtgatgtgtcagctgttatggagtataaaggacttaacctccaagaagcggttgattacgtcatcaagcatcgacttgacgaagggttcgctggactcattgctgtctcgaataaaggagaggtggtttgtggttttaactctaatgggatgttcaggggatgtgcaactgaggatggattcatggacgttgctatttgggagtgagaaatattttagattaagaaaatgtcttactagtatttaatcagtcatcgctctattaatttggttattcattatcataaagctggagtagtaaatttagttctgtcgttatcaccagtcctatattgatttgtgtttaatgcggtttcaaatgg

SEQ ID NO: 37210 - protein, 343 aa, Arabidopsis thaliana
  peptide (1)..(343): Ceres Seq. ID no. 12384787
  misc_feature (20)..(343): Pfam Name: Asparaginase Pfam Description: Asparaginase
  misc_feature (19)..(343): Homolog of NCBI NO: 18401029 NR Description: putative L-asparaginase
IILGLTETHNKTKRKRYNMGGWAIAVHGGAGIDPNLPAERQEEAKQLLTRCLNLGIIALRSNVSAIDVVELVIRELETDPLFNSGRGSSLTEKGTVEMEASIMDGTKRRCGAVSGITTVKNPISLARLVMDKSPHSYLAFSGAEDFARKQGVEIVDNEYFVTDDNVGMLKLAKEANSILFDYRIPPMGCAGAAATDSPIQMNGLPISIYAPETVGCVVVDGKGHCAAGTSTGGLMNKMMGRIGDSPLIGAGTYASEFCGVSCTGEGEAIIRATLARDVSAVMEYKGLNLQEAVDYVIKHRLDEGFAGLIAVSNKGEVVCGFNSNGMFRGCATEDGFMDVAIWE

SEQ ID NO: 37211 - protein, 325 aa, Arabidopsis thaliana
  peptide (1)..(325): Ceres Seq. ID no. 12384788
  misc_feature (2)..(325): Pfam Name: Asparaginase Pfam Description: Asparaginase
  misc_feature (1)..(325): Homolog of NCBI NO: 18401029 NR Description: putative L-asparaginase
MGGWAIAVHGGAGIDPNLPAERQEEAKQLLTRCLNLGIIALRSNVSAIDVVELVIRELETDPLFNSGRGSSLTEKGTVEMEASIMDGTKRRCGAVSGITTVKNPISLARLVMDKSPHSYLAFSGAEDFARKQGVEIVDNEYFVTDDNVGMLKLAKEANSILFDYRIPPMGCAGAAATDSPIQMNGLPISIYAPETVGCVVVDGKGHCAAGTSTGGLMNKMMGRIGDSPLIGAGTYASEFCGVSCTGEGEAIIRATLARDVSAVMEYKGLNLQEAVDYVIKHRLDEGFAGLIAVSNKGEVVCGFNSNGMFRGCATEDGFMDVAIWE

SEQ ID NO: 37212 - protein, 246 aa, Arabidopsis thaliana
  peptide (1)..(246): Ceres Seq. ID no. 12384789
  misc_feature (1)..(246): Pfam Name: Asparaginase Pfam Description: Asparaginase
  misc_feature (1)..(246): Homolog of NCBI NO: 18401029 NR Description: putative L-asparaginase
MEASIMDGTKRRCGAVSGITTVKNPISLARLVMDKSPHSYLAFSGAEDFARKQGVEIVDNEYFVTDDNVGMLKLAKEANSILFDYRIPPMGCAGAAATDSPIQMNGLPISIYAPETVGCVVVDGKGHCAAGTSTGGLMNKMMGRIGDSPLIGAGTYASEFCGVSCTGEGEAIIRATLARDVSAVMEYKGLNLQEAVDYVIKHRLDEGFAGLIAVSNKGEVVCGFNSNGMFRGCATEDGFMDVAIWE

SEQ ID NO: 37213 - DNA, 909 bp, Arabidopsis thaliana
  misc_feature (1)..(909): Ceres Seq. ID no. 13489143
  misc_feature: MA Experiment ID: 108434 Result: Up-regulated in Transcription
  misc_feature: MA Experiment 108434 PARAMETER Experiment Name: At_Root_Tips_cDNA_P Parameter: Tissue Value: Root Tips
  misc_feature: MA Experiment ID: 108461 Result: Down-regulated in Transcription
  misc_feature: MA Experiment 108461 PARAMETER Experiment Name: At_Germinating_Seeds_cDNA_P Parameter: Age (day) Value: 1 vs. 0
  misc_feature: MA Experiment 108461 PARAMETER Experiment Name: At_Germinating_Seeds_cDNA_P Parameter: Tissue Value: Germinating Seeds
  misc_feature: MA Experiment ID: 108488 Result: Down-regulated in Transcription
  misc_feature: MA Experiment ID: 108576 Result: Up-regulated in Transcription
  misc_feature: MA Experiment 108576 PARAMETER Experiment Name: At_42deg_Heat_cDNA_P Parameter: Temperature (deg C) Value: 42 vs. 22
  misc_feature: MA Experiment 108576 PARAMETER Experiment Name: At_42deg_Heat_cDNA_P Parameter: Timepoint (hr) Value: 1
  misc_feature: MA Experiment 108576 PARAMETER Experiment Name: At_42deg_Heat_cDNA_P Parameter: Tissue Value: Aerial
  misc_feature: MA Experiment ID: 108577 Result: Up-regulated in Transcription
  misc_feature: MA Experiment 108577 PARAMETER Experiment Name: At_42deg_Heat_cDNA_P Parameter: Temperature (deg C) Value: 42 vs. 22
  misc_feature: MA Experiment 108577 PARAMETER Experiment Name: At_42deg_Heat_cDNA_P Parameter: Timepoint (hr) Value: 6
  misc_feature: MA Experiment 108577 PARAMETER Experiment Name: At_42deg_Heat_cDNA_P Parameter: Tissue Value: Aerial
  misc_feature: MA Experiment ID: 108585 Result: Up-regulated in Transcription
  misc_feature: MA Experiment 108585 PARAMETER Experiment Name: At_5mM_NaNP_cDNA_P Parameter: Timepoint (hr) Value: 6
  misc_feature: MA Experiment 108585 PARAMETER Experiment Name: At_5mM_NaNP_cDNA_P Parameter: Tissue Value: Aerial
  misc_feature: MA Experiment 108585 PARAMETER Experiment Name: At_5mM_NaNP_cDNA_P Parameter: Treatment Value: null
  misc_feature: MA Experiment ID: 108595 Result: Up-regulated in Transcription
  misc_feature: MA Experiment 108595 PARAMETER Experiment Name: At_Ler-pi_Ovule_cDNA_P Parameter: Plant Line Value: null
  misc_feature: MA Experiment ID: 20000069 Result: Up-regulated in Transcription
  misc_feature: MA Experiment 20000069 PARAMETER Experiment Name: At_100uM_ABA_Mutants_cDNA_P Parameter: Plant Line Value: CS23
  misc_feature: MA Experiment 20000069 PARAMETER Experiment Name: At_100uM_ABA_Mutants_cDNA_P Parameter: Timepoint (hr) Value: 6
  misc_feature: MA Experiment 20000069 PARAMETER Experiment Name: At_100uM_ABA_Mutants_cDNA_P Parameter: Tissue Value: Aerial
  misc_feature: MA Experiment 20000069 PARAMETER Experiment Name: At_100uM_ABA_Mutants_cDNA_P Parameter: Treatment Value: 100uM ABA vs. No Treatment
  misc_feature: MA Experiment ID: 20000070 Result: Up-regulated in Transcription
  misc_feature: MA Experiment 20000070 PARAMETER Experiment Name: At_100uM_ABA_Mutants_cDNA_P Parameter: Plant Line Value: CS24
  misc_feature: MA Experiment 20000070 PARAMETER Experiment Name: At_100uM_ABA_Mutants_cDNA_P Parameter: Timepoint (hr) Value: 6
  misc_feature: MA Experiment 20000070 PARAMETER Experiment Name: At_100uM_ABA_Mutants_cDNA_P Parameter: Tissue Value: Aerial
  misc_feature: MA Experiment 20000070 PARAMETER Experiment Name: At_100uM_ABA_Mutants_cDNA_P Parameter: Treatment Value: 100uM ABA vs. No Treatment
  misc_feature: MA Experiment ID: 20000071 Result: Up-regulated in Transcription
  misc_feature: MA Experiment 20000071 PARAMETER Experiment Name: At_100uM_ABA_Mutants_cDNA_P Parameter: Plant Line Value: CS8104
  misc_feature: MA Experiment 20000071 PARAMETER Experiment Name: At_100uM_ABA_Mutants_cDNA_P Parameter: Timepoint (hr) Value: 6
  misc_feature: MA Experiment 20000071 PARAMETER Experiment Name: At_100uM_ABA_Mutants_cDNA_P Parameter: Tissue Value: Aerial
  misc_feature: MA Experiment 20000071 PARAMETER Experiment Name: At_100uM_ABA_Mutants_cDNA_P Parameter: Treatment Value: 100uM ABA vs. No Treatment
  misc_feature: MA Experiment ID: 20000072 Result: Up-regulated in Transcription
  misc_feature: MA Experiment 20000072 PARAMETER Experiment Name: At_100uM_ABA_Mutants_cDNA_P Parameter: Plant Line Value: CS8105
  misc_feature: MA Experiment 20000072 PARAMETER Experiment Name: At_100uM_ABA_Mutants_cDNA_P Parameter: Timepoint (hr) Value: 6
  misc_feature: MA Experiment 20000072 PARAMETER Experiment Name: At_100uM_ABA_Mutants_cDNA_P Parameter: Tissue Value: Aerial
  misc_feature: MA Experiment 20000072 PARAMETER Experiment Name: At_100uM_ABA_Mutants_cDNA_P Parameter: Treatment Value: 100uM ABA vs. No Treatment
  misc_feature: MA Experiment ID: 20000086 Result: Up-regulated in Transcription
  misc_feature: MA Experiment 20000086 PARAMETER Experiment Name: At_100uM_ABA_Mutants_cDNA_P Parameter: Plant Line Value: CS22
  misc_feature: MA Experiment 20000086 PARAMETER Experiment Name: At_100uM_ABA_Mutants_cDNA_P Parameter: Timepoint (hr) Value: 6
  misc_feature: MA Experiment 20000086 PARAMETER Experiment Name: At_100uM_ABA_Mutants_cDNA_P Parameter: Tissue Value: Aerial
  misc_feature: MA Experiment 20000086 PARAMETER Experiment Name: At_100uM_ABA_Mutants_cDNA_P Parameter: Treatment Value: 100uM ABA vs. No Treatment
  misc_feature: MA Experiment ID: 20000087 Result: Up-regulated in Transcription
  misc_feature: MA Experiment 20000087 PARAMETER Experiment Name: At_100uM_ABA_Mutants_cDNA_P Parameter: Plant Line Value: WS
  misc_feature: MA Experiment 20000087 PARAMETER Experiment Name: At_100uM_ABA_Mutants_cDNA_P Parameter: Timepoint (hr) Value: 6
  misc_feature: MA Experiment 20000087 PARAMETER Experiment Name: At_100uM_ABA_Mutants_cDNA_P Parameter: Tissue Value: Aerial
  misc_feature: MA Experiment 20000087 PARAMETER Experiment Name: At_100uM_ABA_Mutants_cDNA_P Parameter: Treatment Value: 100uM ABA vs. No Treatment
  misc_feature: MA Experiment ID: 20000088 Result: Up-regulated in Transcription
  misc_feature: MA Experiment 20000088 PARAMETER Experiment Name: At_100uM_ABA_Mutants_cDNA_P Parameter: Plant Line Value: Landsberg
  misc_feature: MA Experiment 20000088 PARAMETER Experiment Name: At_100uM_ABA_Mutants_cDNA_P Parameter: Timepoint (hr) Value: 6
  misc_feature: MA Experiment 20000088 PARAMETER Experiment Name: At_100uM_ABA_Mutants_cDNA_P Parameter: Tissue Value: Aerial
  misc_feature: MA Experiment 20000088 PARAMETER Experiment Name: At_100uM_ABA_Mutants_cDNA_P Parameter: Treatment Value: 100uM ABA vs. No Treatment
  misc_feature: MA Experiment ID: 20000093 Result: Up-regulated in Transcription
  misc_feature: MA Experiment 20000093 PARAMETER Experiment Name: At_42deg_Heat_cDNA_P Parameter: Temperature (deg C) Value: 42 vs. 22
  misc_feature: MA Experiment 20000093 PARAMETER Experiment Name: At_42deg_Heat_cDNA_P Parameter: Timepoint (hr) Value: 0.5
  misc_feature: MA Experiment 20000093 PARAMETER Experiment Name: At_42deg_Heat_cDNA_P Parameter: Tissue Value: Aerial
  misc_feature: MA Experiment ID: 20000111 Result: Up-regulated in Transcription
  misc_feature: MA Experiment 20000111 PARAMETER Experiment Name: At_42deg_Heat_cDNA_P Parameter: Temperature (deg C) Value: 42 vs. 22
  misc_feature: MA Experiment 20000111 PARAMETER Experiment Name: At_42deg_Heat_cDNA_P Parameter: Timepoint (hr) Value: 6
  misc_feature: MA Experiment 20000111 PARAMETER Experiment Name: At_42deg_Heat_cDNA_P Parameter: Tissue Value: Aerial
  misc_feature: MA Experiment ID: 20000112 Result: Up-regulated in Transcription
  misc_feature: MA Experiment 20000112 PARAMETER Experiment Name: At_42deg_Heat_cDNA_P Parameter: Temperature (deg C) Value: 42 vs. 22
  misc_feature: MA Experiment 20000112 PARAMETER Experiment Name: At_42deg_Heat_cDNA_P Parameter: Timepoint (hr) Value: 2
  misc_feature: MA Experiment 20000112 PARAMETER Experiment Name: At_42deg_Heat_cDNA_P Parameter: Tissue Value: Aerial
  misc_feature: MA Experiment ID: 20000113 Result: Up-regulated in Transcription
  misc_feature: MA Experiment 20000113 PARAMETER Experiment Name: At_42deg_Heat_cDNA_P Parameter: Temperature (deg C) Value: 42 vs. 22
  misc_feature: MA Experiment 20000113 PARAMETER Experiment Name: At_42deg_Heat_cDNA_P Parameter: Timepoint (hr) Value: 8
  misc_feature: MA Experiment 20000113 PARAMETER Experiment Name: At_42deg_Heat_cDNA_P Parameter: Tissue Value: Aerial
  misc_feature: MA Experiment ID: 20000117 Result: Up-regulated in Transcription
  misc_feature: MA Experiment 20000117 PARAMETER Experiment Name: At_100uM_ABA_Mutants_cDNA_P Parameter: Plant Line Value: Columbia
  misc_feature: MA Experiment 20000117 PARAMETER Experiment Name: At_100uM_ABA_Mutants_cDNA_P Parameter: Timepoint (hr) Value: 6
  misc_feature: MA Experiment 20000117 PARAMETER Experiment Name: At_100uM_ABA_Mutants_cDNA_P Parameter: Tissue Value: Aerial
  misc_feature: MA Experiment 20000117 PARAMETER Experiment Name: At_100uM_ABA_Mutants_cDNA_P Parameter: Treatment Value: 100uM ABA vs. No Treatment
  misc_feature: MA Experiment ID: 20000144 Result: Up-regulated in Transcription
  misc_feature: MA Experiment 20000144 PARAMETER Experiment Name: At_42deg_Heat_cDNA_P Parameter: Temperature (deg C) Value: 42 vs. 22
  misc_feature: MA Experiment 20000144 PARAMETER Experiment Name: At_42deg_Heat_cDNA_P Parameter: Timepoint (hr) Value: 1
  misc_feature: MA Experiment 20000144 PARAMETER Experiment Name: At_42deg_Heat_cDNA_P Parameter: Tissue Value: Aerial
  misc_feature: MA Experiment ID: 20000171 Result: Up-regulated in Transcription
  misc_feature: MA Experiment 20000171 PARAMETER Experiment Name: At_42deg_Heat_P Parameter: Age (day) Value: 14
  misc_feature: MA Experiment 20000171 PARAMETER Experiment Name: At_42deg_Heat_P Parameter: Organism Value: A. thaliana
  misc_feature: MA Experiment 20000171 PARAMETER Experiment Name: At_42deg_Heat_P Parameter: Plant Line Value: WS
  misc_feature: MA Experiment 20000171 PARAMETER Experiment Name: At_42deg_Heat_P Parameter: Temperature (deg C) Value: 42 vs. 22
  misc_feature: MA Experiment 20000171 PARAMETER Experiment Name: At_42deg_Heat_P Parameter: Timepoint (hr) Value: 1
  misc_feature: MA Experiment 20000171 PARAMETER Experiment Name: At_42deg_Heat_P Parameter: Tissue Value: Aerial
  misc_feature: MA Experiment ID: 20000173 Result: Up-regulated in Transcription
  misc_feature: MA Experiment 20000173 PARAMETER Experiment Name: At_42deg_Heat_P Parameter: Age (day) Value: 14
  misc_feature: MA Experiment 20000173 PARAMETER Experiment Name: At_42deg_Heat_P Parameter: Organism Value: A. thaliana
  misc_feature: MA Experiment 20000173 PARAMETER Experiment Name: At_42deg_Heat_P Parameter: Plant Line Value: WS
  misc_feature: MA Experiment 20000173 PARAMETER Experiment Name: At_42deg_Heat_P Parameter: Temperature (deg C) Value: 42 vs. 22
  misc_feature: MA Experiment 20000173 PARAMETER Experiment Name: At_42deg_Heat_P Parameter: Timepoint (hr) Value: 6
  misc_feature: MA Experiment 20000173 PARAMETER Experiment Name: At_42deg_Heat_P Parameter: Tissue Value: Aerial
  misc_feature: MA Experiment ID: 20000443 Result: Up-regulated in Transcription
  misc_feature: MA Experiment 20000443 PARAMETER Experiment Name: At_1uM_BR-BRZ__P Parameter: Tissue Value: Shoot Apices
  misc_feature: MA Experiment 20000443 PARAMETER Experiment Name: At_1uM_BR-BRZ__P Parameter: Treatment Value: 1uM BRZ vs. No Treatment
  misc_feature: MA Experiment ID: 20000709 Result: Up-regulated in Transcription
  misc_feature: MA Experiment 20000709 PARAMETER Experiment Name: At_15mM_NH4NO3_L-to-H_P Parameter: Age (hr) Value: 14
  misc_feature: MA Experiment 20000709 PARAMETER Experiment Name: At_15mM_NH4NO3_L-to-H_P Parameter: Organism Value: A. thaliana
  misc_feature: MA Experiment 20000709 PARAMETER Experiment Name: At_15mM_NH4NO3_L-to-H_P Parameter: Plant Line Value: WS
  misc_feature: MA Experiment 20000709 PARAMETER Experiment Name: At_15mM_NH4NO3_L-to-H_P Parameter: Timepoint (hr) Value: 4
  misc_feature: MA Experiment 20000709 PARAMETER Experiment Name: At_15mM_NH4NO3_L-to-H_P Parameter: Tissue Value: Aerial
  misc_feature: MA Experiment 20000709 PARAMETER Experiment Name: At_15mM_NH4NO3_L-to-H_P Parameter: Treatment Value: 15mM NH4NO3 vs. 30mM Mannitol
  misc_feature: MA Experiment ID: 20001247 Result: Down-regulated in Transcription
  misc_feature: MA Experiment 20001247 PARAMETER Experiment Name: At_Far-red-induction_P Parameter: Age (day) Value: 7
  misc_feature: MA Experiment 20001247 PARAMETER Experiment Name: At_Far-red-induction_P Parameter: Light Value: Far-red vs. White
  misc_feature: MA Experiment 20001247 PARAMETER Experiment Name: At_Far-red-induction_P Parameter: Organism Value: A. thaliana
  misc_feature: MA Experiment 20001247 PARAMETER Experiment Name: At_Far-red-induction_P Parameter: Plant Line Value: Columbia
  misc_feature: MA Experiment 20001247 PARAMETER Experiment Name: At_Far-red-induction_P Parameter: Timepoint (hr) Value: 1
  misc_feature: MA Experiment 20001247 PARAMETER Experiment Name: At_Far-red-induction_P Parameter: Tissue Value: Whole Plant
  misc_feature: MA Experiment ID: 20001248 Result: Down-regulated in Transcription
  misc_feature: MA Experiment 20001248 PARAMETER Experiment Name: At_Far-red-induction_P Parameter: Age (day) Value: 7
  misc_feature: MA Experiment 20001248 PARAMETER Experiment Name: At_Far-red-induction_P Parameter: Light Value: Far-red vs. White
  misc_feature: MA Experiment 20001248 PARAMETER Experiment Name: At_Far-red-induction_P Parameter: Organism Value: A. thaliana
  misc_feature: MA Experiment 20001248 PARAMETER Experiment Name: At_Far-red-induction_P Parameter: Plant Line Value: Columbia
  misc_feature: MA Experiment 20001248 PARAMETER Experiment Name: At_Far-red-induction_P Parameter: Timepoint (hr) Value: 4
  misc_feature: MA Experiment 20001248 PARAMETER Experiment Name: At_Far-red-induction_P Parameter: Tissue Value: Whole Plant
  misc_feature: MA Experiment ID: 20001450 Result: Down-regulated in Transcription
  misc_feature: MA Experiment 20001450 PARAMETER Experiment Name: At_Far-red-induction_P Parameter: Age (day) Value: 7
  misc_feature: MA Experiment 20001450 PARAMETER Experiment Name: At_Far-red-induction_P Parameter: Light Value: Far-red vs. White
  misc_feature: MA Experiment 20001450 PARAMETER Experiment Name: At_Far-red-induction_P Parameter: Organism Value: A. thaliana
  misc_feature: MA Experiment 20001450 PARAMETER Experiment Name: At_Far-red-induction_P Parameter: Plant Line Value: Columbia
  misc_feature: MA Experiment 20001450 PARAMETER Experiment Name: At_Far-red-induction_P Parameter: Timepoint (hr) Value: 8
  misc_feature: MA Experiment 20001450 PARAMETER Experiment Name: At_Far-red-induction_P Parameter: Tissue Value: Whole Plant
  misc_feature: MA Experiment ID: 20001451 Result: Down-regulated in Transcription
  misc_feature: MA Experiment 20001451 PARAMETER Experiment Name: At_Far-red-induction_P Parameter: Age (day) Value: 7
  misc_feature: MA Experiment 20001451 PARAMETER Experiment Name: At_Far-red-induction_P Parameter: Light Value: Far-red vs. White
  misc_feature: MA Experiment 20001451 PARAMETER Experiment Name: At_Far-red-induction_P Parameter: Organism Value: A. thaliana
  misc_feature: MA Experiment 20001451 PARAMETER Experiment Name: At_Far-red-induction_P Parameter: Plant Line Value: Columbia
  misc_feature: MA Experiment 20001451 PARAMETER Experiment Name: At_Far-red-induction_P Parameter: Timepoint (hr) Value: 24
  misc_feature: MA Experiment 20001451 PARAMETER Experiment Name: At_Far-red-induction_P Parameter: Tissue Value: Whole Plant
  misc_feature: MA Experiment ID: 20001557 Result: Up-regulated in Transcription
  misc_feature: MA Experiment 20001557 PARAMETER Experiment Name: At_Drought_Soil_Dry_P Parameter: Age (day) Value: 27
  misc_feature: MA Experiment 20001557 PARAMETER Experiment Name: At_Drought_Soil_Dry_P Parameter: Organism Value: A. thaliana
  misc_feature: MA Experiment 20001557 PARAMETER Experiment Name: At_Drought_Soil_Dry_P Parameter: Plant Line Value: WS
  misc_feature: MA Experiment 20001557 PARAMETER Experiment Name: At_Drought_Soil_Dry_P Parameter: Post Timepoint (hr) Value: 3
  misc_feature: MA Experiment 20001557 PARAMETER Experiment Name: At_Drought_Soil_Dry_P Parameter: Post-Treatment Value: Re-Water vs. No Drought
  misc_feature: MA Experiment 20001557 PARAMETER Experiment Name: At_Drought_Soil_Dry_P Parameter: Timepoint (day) Value: 13
  misc_feature: MA Experiment 20001557 PARAMETER Experiment Name: At_Drought_Soil_Dry_P Parameter: Treatment Value: Drought vs. No Drought
  misc_feature: MA Experiment ID: 20001560 Result: Up-regulated in Transcription
  misc_feature: MA Experiment 20001560 PARAMETER Experiment Name: At_Drought_Soil_Dry_P Parameter: Age (day) Value: 28
  misc_feature: MA Experiment 20001560 PARAMETER Experiment Name: At_Drought_Soil_Dry_P Parameter: Organism Value: A. thaliana
  misc_feature: MA Experiment 20001560 PARAMETER Experiment Name: At_Drought_Soil_Dry_P Parameter: Plant Line Value: WS
  misc_feature: MA Experiment 20001560 PARAMETER Experiment Name: At_Drought_Soil_Dry_P Parameter: Post Timepoint (hr) Value: None
  misc_feature: MA Experiment 20001560 PARAMETER Experiment Name: At_Drought_Soil_Dry_P Parameter: Post-Treatment Value: None
  misc_feature: MA Experiment 20001560 PARAMETER Experiment Name: At_Drought_Soil_Dry_P Parameter: Timepoint (day) Value: 14
  misc_feature: MA Experiment 20001560 PARAMETER Experiment Name: At_Drought_Soil_Dry_P Parameter: Treatment Value: Drought vs. No Drought
  misc_feature: MA Experiment ID: 20001905 Result: Up-regulated in Transcription
  misc_feature: MA Experiment 20001905 PARAMETER Experiment Name: At_Drought_Reproduction_P Parameter: Age (day) Value: 40
  misc_feature: MA Experiment 20001905 PARAMETER Experiment Name: At_Drought_Reproduction_P Parameter: Organism Value: A. thaliana
  misc_feature: MA Experiment 20001905 PARAMETER Experiment Name: At_Drought_Reproduction_P Parameter: Plant Line Value: WS
  misc_feature: MA Experiment 20001905 PARAMETER Experiment Name: At_Drought_Reproduction_P Parameter: Timepoint (day) Value: 10
  misc_feature: MA Experiment 20001905 PARAMETER Experiment Name: At_Drought_Reproduction_P Parameter: Tissue Value: Rosettes
  misc_feature: MA Experiment 20001905 PARAMETER Experiment Name: At_Drought_Reproduction_P Parameter: Treatment Value: Drought vs. No Drought
caaagagtataaaaaatatctcatcgagcttgaaaataattaatcacttgctaattctaagcttcttctctttccaaaaatggcgtcatcatcggctttagctctcaggagacttctctcttcttccaccgtcgccgtccctcgcgccttaagagccgttcgtccggtggctgcttcatctcgcctcttcaataccaacgccgccagaaactatgaagacggtgtcgataggaaccatcactcaaaccgacatgtttctcgccacggcggcgatttcttctcacatatactcgatccgtttactccaacgagaagcttgagccagatgctgaatttcatggaccaggtaagcgaaatccctttggtatcagctactcgtggaatgggagcttctggagttagacgtggttggaacgtgaaagagaaagacgacgcgttgcatctaaggatagatatgccgggactaagcagagaggatgtgaaattggctttggaacagaacacattggtgattagaggagaaggggaaacagaggagggagaagatgtttctggagatggacggaggtttacgagtaggattgagttaccggagaaagtatacaagactgatgagattaaggcggaaatgaagaatggtgtgttgaaagtggtgattccaaagattaaagaggatgagcgtaacaatattcgtcacataaacgttgactagagtgttttattttggattgtttgagatggaatggaagtaagtgagtgaatttgtgaactttaaggtgtcctttggtgaatcaaggagaatgacatttcccacggtcctatgtgttcgggattttgacttttttcgttacatcaatgatctatgtacgtttgactactttcatatcataggttcggattttgtttccc

SEQ ID NO: 37214 - protein, 210 aa, Arabidopsis thaliana
  peptide (1)..(210): Ceres Seq. ID no. 13489144
  misc_feature (8)..(210): Homolog of NCBI NO: 7441311 NR Description: heat shock protein hsp22 precursor, mitochondrial
  misc_feature (5)..(210): Homolog of NCBI NO: 123564 NR Description: Small heat shock protein, chloroplast precursor
  misc_feature (5)..(210): Homolog of NCBI NO: 7441310 NR Description: heat shock protein MTSHP precursor, mitochondrial
  misc_feature (4)..(210): Homolog of NCBI NO: 1170368 NR Description: Heat shock 22 kDa protein, mitochondrial
  misc_feature (4)..(210): Homolog of NCBI NO: 7159338 NR Description: LMW heat shock protein [Euphorbia esula]
  misc_feature (36)..(210): Homolog of NCBI NO: 2326361 NR Description: hypothetical protein [Arabidopsis thaliana]
  misc_feature (4)..(210): Homolog of NCBI NO: 2326354 NR Description: LMW heat shock protein [Arabidopsis thaliana]
  misc_feature (4)..(210): Homolog of NCBI NO: 15234969 NR Description: mitochondrion-localized small heat shock protein
  misc_feature (1)..(210): Homolog of NCBI NO: 21554988 NR Description: mitochondrial heat shock 22 kd protein-like
  misc_feature (1)..(210): Homolog of NCBI NO: 15242086 NR Description: heat shock protein, putative [Arabidopsis
MASSSALALRRLLSSSTVAVPRALRAVRPVAASSRLFNTNAARNYEDGVDRNHHSNRHVSRHGGDFFSHILDPFTPTRSLSQMLNFMDQVSEIPLVSATRGMGASGVRRGWNVKEKDDALHLRIDMPGLSREDVKLALEQNTLVIRGEGETEEGEDVSGDGRRFTSRIELPEKVYKTDEIKAEMKNGVLKVVIPKIKEDERNNIRHINVD

SEQ ID NO: 37215 - protein, 128 aa, Arabidopsis thaliana
  peptide (1)..(128): Ceres Seq. ID no. 13489145
  misc_feature (1)..(128): Homolog of NCBI NO: 7441311 NR Description: heat shock protein hsp22 precursor, mitochondrial
  misc_feature (1)..(128): Homolog of NCBI NO: 123564 NR Description: Small heat shock protein, chloroplast precursor
  misc_feature (1)..(128): Homolog of NCBI NO: 7441310 NR Description: heat shock protein MTSHP precursor, mitochondrial
  misc_feature (1)..(128): Homolog of NCBI NO: 1170368 NR Description: Heat shock 22 kDa protein, mitochondrial
  misc_feature (1)..(128): Homolog of NCBI NO: 7159338 NR Description: LMW heat shock protein [Euphorbia esula]
  misc_feature (1)..(128): Homolog of NCBI NO: 2326361 NR Description: hypothetical protein [Arabidopsis thaliana]
  misc_feature (1)..(128): Homolog of NCBI NO: 2326354 NR Description: LMW heat shock protein [Arabidopsis thaliana]
  misc_feature (1)..(128): Homolog of NCBI NO: 15234969 NR Description: mitochondrion-localized small heat shock protein
  misc_feature (1)..(128): Homolog of NCBI NO: 21554988 NR Description: mitochondrial heat shock 22 kd protein-like
  misc_feature (1)..(128): Homolog of NCBI NO: 15242086 NR Description: heat shock protein, putative [Arabidopsis
MLNFMDQVSEIPLVSATRGMGASGVRRGWNVKEKDDALHLRIDMPGLSREDVKLALEQNTLVIRGEGETEEGEDVSGDGRRFTSRIELPEKVYKTDEIKAEMKNGVLKVVIPKIKEDERNNIRHINVD

SEQ ID NO: 37216 - protein, 124 aa, Arabidopsis thaliana
  peptide (1)..(124): Ceres Seq. ID no. 13489146
  misc_feature (1)..(124): Homolog of NCBI NO: 7441311 NR Description: heat shock protein hsp22 precursor, mitochondrial
  misc_feature (1)..(124): Homolog of NCBI NO: 123564 NR Description: Small heat shock protein, chloroplast precursor
  misc_feature (1)..(124): Homolog of NCBI NO: 7441310 NR Description: heat shock protein MTSHP precursor, mitochondrial
  misc_feature (1)..(124): Homolog of NCBI NO: 1170368 NR Description: Heat shock 22 kDa protein, mitochondrial
  misc_feature (1)..(124): Homolog of NCBI NO: 7159338 NR Description: LMW heat shock protein [Euphorbia esula]
  misc_feature (1)..(124): Homolog of NCBI NO: 2326361 NR Description: hypothetical protein [Arabidopsis thaliana]
  misc_feature (1)..(124): Homolog of NCBI NO: 2326354 NR Description: LMW heat shock protein [Arabidopsis thaliana]
  misc_feature (1)..(124): Homolog of NCBI NO: 15234969 NR Description: mitochondrion-localized small heat shock protein
  misc_feature (1)..(124): Homolog of NCBI NO: 21554988 NR Description: mitochondrial heat shock 22 kd protein-like
  misc_feature (1)..(124): Homolog of NCBI NO: 15242086 NR Description: heat shock protein, putative [Arabidopsis
MDQVSEIPLVSATRGMGASGVRRGWNVKEKDDALHLRIDMPGLSREDVKLALEQNTLVIRGEGETEEGEDVSGDGRRFTSRIELPEKVYKTDEIKAEMKNGVLKVVIPKIKEDERNNIRHINVD

SEQ ID NO: 37217 - DNA, 1076 bp, Arabidopsis thaliana
  misc_feature (1)..(1076): Ceres Seq. ID no. 13489405
  misc_feature: MA Experiment ID: 108434 Result: Down-regulated in Transcription
  misc_feature: MA Experiment 108434 PARAMETER Experiment Name: At_Root_Tips_cDNA_P Parameter: Tissue Value: Root Tips
  misc_feature: MA Experiment ID: 108462 Result: Down-regulated in Transcription
  misc_feature: MA Experiment 108462 PARAMETER Experiment Name: At_Germinating_Seeds_cDNA_P Parameter: Age (day) Value: 2 vs. 0
  misc_feature: MA Experiment 108462 PARAMETER Experiment Name: At_Germinating_Seeds_cDNA_P Parameter: Tissue Value: Germinating Seeds
  misc_feature: MA Experiment ID: 108464 Result: Down-regulated in Transcription
  misc_feature: MA Experiment 108464 PARAMETER Experiment Name: At_Germinating_Seeds_cDNA_P Parameter: Age (day) Value: 4 vs. 0
  misc_feature: MA Experiment 108464 PARAMETER Experiment Name: At_Germinating_Seeds_cDNA_P Parameter: Tissue Value: Germinating Seeds
  misc_feature: MA Experiment ID: 108574 Result: Down-regulated in Transcription
  misc_feature: MA Experiment 108574 PARAMETER Experiment Name: At_Wounding__cDNA_P Parameter: Timepoint (hr) Value: 1
  misc_feature: MA Experiment 108574 PARAMETER Experiment Name: At_Wounding__cDNA_P Parameter: Tissue Value: Aerial
  misc_feature: MA Experiment 108574 PARAMETER Experiment Name: At_Wounding__cDNA_P Parameter: Treatment Value: Wounding vs. No Wounding
  misc_feature: MA Experiment ID: 108595 Result: Down-regulated in Transcription
  misc_feature: MA Experiment 108595 PARAMETER Experiment Name: At_Ler-pi_Ovule_cDNA_P Parameter: Plant Line Value: null
  misc_feature: MA Experiment ID: 20000069 Result: Up-regulated in Transcription
  misc_feature: MA Experiment 20000069 PARAMETER Experiment Name: At_100uM_ABA_Mutants_cDNA_P Parameter: Plant Line Value: CS23
  misc_feature: MA Experiment 20000069 PARAMETER Experiment Name: At_100uM_ABA_Mutants_cDNA_P Parameter: Timepoint (hr) Value: 6
  misc_feature: MA Experiment 20000069 PARAMETER Experiment Name: At_100uM_ABA_Mutants_cDNA_P Parameter: Tissue Value: Aerial
  misc_feature: MA Experiment 20000069 PARAMETER Experiment Name: At_100uM_ABA_Mutants_cDNA_P Parameter: Treatment Value: 100uM ABA vs. No Treatment
  misc_feature: MA Experiment ID: 20000071 Result: Up-regulated in Transcription
  misc_feature: MA Experiment 20000071 PARAMETER Experiment Name: At_100uM_ABA_Mutants_cDNA_P Parameter: Plant Line Value: CS8104
  misc_feature: MA Experiment 20000071 PARAMETER Experiment Name: At_100uM_ABA_Mutants_cDNA_P Parameter: Timepoint (hr) Value: 6
  misc_feature: MA Experiment 20000071 PARAMETER Experiment Name: At_100uM_ABA_Mutants_cDNA_P Parameter: Tissue Value: Aerial
  misc_feature: MA Experiment 20000071 PARAMETER Experiment Name: At_100uM_ABA_Mutants_cDNA_P Parameter: Treatment Value: 100uM ABA vs. No Treatment
  misc_feature: MA Experiment ID: 20000072 Result: Up-regulated in Transcription
  misc_feature: MA Experiment 20000072 PARAMETER Experiment Name: At_100uM_ABA_Mutants_cDNA_P Parameter: Plant Line Value: CS8105
  misc_feature: MA Experiment 20000072 PARAMETER Experiment Name: At_100uM_ABA_Mutants_cDNA_P Parameter: Timepoint (hr) Value: 6
  misc_feature: MA Experiment 20000072 PARAMETER Experiment Name: At_100uM_ABA_Mutants_cDNA_P Parameter: Tissue Value: Aerial
  misc_feature: MA Experiment 20000072 PARAMETER Experiment Name: At_100uM_ABA_Mutants_cDNA_P Parameter: Treatment Value: 100uM ABA vs. No Treatment
  misc_feature: MA Experiment ID: 20000117 Result: Up-regulated in Transcription
  misc_feature: MA Experiment 20000117 PARAMETER Experiment Name: At_100uM_ABA_Mutants_cDNA_P Parameter: Plant Line Value: Columbia
  misc_feature: MA Experiment 20000117 PARAMETER Experiment Name: At_100uM_ABA_Mutants_cDNA_P Parameter: Timepoint (hr) Value: 6
  misc_feature: MA Experiment 20000117 PARAMETER Experiment Name: At_100uM_ABA_Mutants_cDNA_P Parameter: Tissue Value: Aerial
  misc_feature: MA Experiment 20000117 PARAMETER Experiment Name: At_100uM_ABA_Mutants_cDNA_P Parameter: Treatment Value: 100uM ABA vs. No Treatment
  misc_feature: MA Experiment ID: 20000214 Result: Down-regulated in Transcription
  misc_feature: MA Experiment 20000214 PARAMETER Experiment Name: At_4deg_Cold_P Parameter: Timepoint (hr) Value: 6
  misc_feature: MA Experiment ID: 20000224 Result: Down-regulated in Transcription
  misc_feature: MA Experiment ID: 20000234 Result: Down-regulated in Transcription
  misc_feature: MA Experiment 20000234 PARAMETER Experiment Name: At_Siliques_P Parameter: Age (day) Value: 21
  misc_feature: MA Experiment 20000234 PARAMETER Experiment Name: At_Siliques_P Parameter: Organism Value: A. thaliana
  misc_feature: MA Experiment 20000234 PARAMETER Experiment Name: At_Siliques_P Parameter: Plant Line Value: WS
  misc_feature: MA Experiment 20000234 PARAMETER Experiment Name: At_Siliques_P Parameter: Tissue Value: Less Than 5mm Siliques vs. Whole Plant
  misc_feature: MA Experiment ID: 20000265 Result: Down-regulated in Transcription
  misc_feature: MA Experiment 20000265 PARAMETER Experiment Name: At_Open_Flower_P Parameter: Age (day) Value: 21
  misc_feature: MA Experiment 20000265 PARAMETER Experiment Name: At_Open_Flower_P Parameter: Plant Line Value: WS
  misc_feature: MA Experiment 20000265 PARAMETER Experiment Name: At_Open_Flower_P Parameter: Tissue Value: Closed Flower vs. Whole Plant
  misc_feature: MA Experiment ID: 20000441 Result: Up-regulated in Transcription
  misc_feature: MA Experiment 20000441 PARAMETER Experiment Name: At_1uM_BR-BRZ__P Parameter: Tissue Value: Shoot Apices
  misc_feature: MA Experiment 20000441 PARAMETER Experiment Name: At_1uM_BR-BRZ__P Parameter: Treatment Value: 1uM BR vs. No Treatment
  misc_feature: MA Experiment ID: 20000443 Result: Up-regulated in Transcription
  misc_feature: MA Experiment 20000443 PARAMETER Experiment Name: At_1uM_BR-BRZ__P Parameter: Tissue Value: Shoot Apices
  misc_feature: MA Experiment 20000443 PARAMETER Experiment Name: At_1uM_BR-BRZ__P Parameter: Treatment Value: 1uM BRZ vs. No Treatment
  misc_feature: MA Experiment ID: 20000527 Result: Up-regulated in Transcription
  misc_feature: MA Experiment 20000527 PARAMETER Experiment Name: At_10percent_PEG_P Parameter: Age (day) Value: 20
  misc_feature: MA Experiment 20000527 PARAMETER Experiment Name: At_10percent_PEG_P Parameter: Organism Value: A. thaliana
  misc_feature: MA Experiment 20000527 PARAMETER Experiment Name: At_10percent_PEG_P Parameter: Plant Line Value: WS
  misc_feature: MA Experiment 20000527 PARAMETER Experiment Name: At_10percent_PEG_P Parameter: Timepoint (day) Value: 20
  misc_feature: MA Experiment 20000527 PARAMETER Experiment Name: At_10percent_PEG_P Parameter: Tissue Value: Whole Plant
  misc_feature: MA Experiment 20000527 PARAMETER Experiment Name: At_10percent_PEG_P Parameter: Treatment Value: 10percent PEG vs. No Treatment
  misc_feature: MA Experiment ID: 20001247 Result: Up-regulated in Transcription
  misc_feature: MA Experiment 20001247 PARAMETER Experiment Name: At_Far-red-induction_P Parameter: Age (day) Value: 7
  misc_feature: MA Experiment 20001247 PARAMETER Experiment Name: At_Far-red-induction_P Parameter: Light Value: Far-red vs. White
  misc_feature: MA Experiment 20001247 PARAMETER Experiment Name: At_Far-red-induction_P Parameter: Organism Value: A. thaliana
  misc_feature: MA Experiment 20001247 PARAMETER Experiment Name: At_Far-red-induction_P Parameter: Plant Line Value: Columbia
  misc_feature: MA Experiment 20001247 PARAMETER Experiment Name: At_Far-red-induction_P Parameter: Timepoint (hr) Value: 1
  misc_feature: MA Experiment 20001247 PARAMETER Experiment Name: At_Far-red-induction_P Parameter: Tissue Value: Whole Plant
  misc_feature: MA Experiment ID: 20001248 Result: Up-regulated in Transcription
  misc_feature: MA Experiment 20001248 PARAMETER Experiment Name: At_Far-red-induction_P Parameter: Age (day) Value: 7
  misc_feature: MA Experiment 20001248 PARAMETER Experiment Name: At_Far-red-induction_P Parameter: Light Value: Far-red vs. White
  misc_feature: MA Experiment 20001248 PARAMETER Experiment Name: At_Far-red-induction_P Parameter: Organism Value: A. thaliana
  misc_feature: MA Experiment 20001248 PARAMETER Experiment Name: At_Far-red-induction_P Parameter: Plant Line Value: Columbia
  misc_feature: MA Experiment 20001248 PARAMETER Experiment Name: At_Far-red-induction_P Parameter: Timepoint (hr) Value: 4
  misc_feature: MA Experiment 20001248 PARAMETER Experiment Name: At_Far-red-induction_P Parameter: Tissue Value: Whole Plant
  misc_feature: MA Experiment ID: 20001450 Result: Up-regulated in Transcription
  misc_feature: MA Experiment 20001450 PARAMETER Experiment Name: At_Far-red-induction_P Parameter: Age (day) Value: 7
  misc_feature: MA Experiment 20001450 PARAMETER Experiment Name: At_Far-red-induction_P Parameter: Light Value: Far-red vs. White
  misc_feature: MA Experiment 20001450 PARAMETER Experiment Name: At_Far-red-induction_P Parameter: Organism Value: A. thaliana
  misc_feature: MA Experiment 20001450 PARAMETER Experiment Name: At_Far-red-induction_P Parameter: Plant Line Value: Columbia
  misc_feature: MA Experiment 20001450 PARAMETER Experiment Name: At_Far-red-induction_P Parameter: Timepoint (hr) Value: 8
  misc_feature: MA Experiment 20001450 PARAMETER Experiment Name: At_Far-red-induction_P Parameter: Tissue Value: Whole Plant
  misc_feature: MA Experiment ID: 20001558 Result: Down-regulated in Transcription
  misc_feature: MA Experiment 20001558 PARAMETER Experiment Name: At_Drought_Soil_Dry_P Parameter: Age (day) Value: 27
  misc_feature: MA Experiment 20001558 PARAMETER Experiment Name: At_Drought_Soil_Dry_P Parameter: Organism Value: A. thaliana
  misc_feature: MA Experiment 20001558 PARAMETER Experiment Name: At_Drought_Soil_Dry_P Parameter: Plant Line Value: WS
  misc_feature: MA Experiment 20001558 PARAMETER Experiment Name: At_Drought_Soil_Dry_P Parameter: Post Timepoint (hr) Value: 6
  misc_feature: MA Experiment 20001558 PARAMETER Experiment Name: At_Drought_Soil_Dry_P Parameter: Post-Treatment Value: Re-Water vs. No Drought
  misc_feature: MA Experiment 20001558 PARAMETER Experiment Name: At_Drought_Soil_Dry_P Parameter: Timepoint (day) Value: 13
  misc_feature: MA Experiment 20001558 PARAMETER Experiment Name: At_Drought_Soil_Dry_P Parameter: Treatment Value: Drought vs. No Drought
aaatgtgtataaatgaaatctctttcttctttagaattactgtttctctccgctacaaataccagatttttctctctctcgtcgaaagcaaaacagtctcctttctctatcttctgctcatatcagccattgacacagttgctttgggtttccctcaaacggcgccgattgtctggattttgaccactgatggccttagatcaatcttttgaagatgctgctttacttggagaactctatggagaaggtgcattttgtttcaagagcaagaaacctgaacccattacagtctcggttccttctgatgatactgatgattcgaattttgactgcaatatttgcttagactcggtgcaagaacctgttgtgactctctgtggtcacctcttttgctggccttgtattcacaaatggcttgatgtacagagcttctcaacaagtgatgaataccaaagacatagacagtgtcctgtttgtaaatctaaagtttctcattctactttggttcctttgtatggtagaggccgttgtactactcaggaggaaggtaaaaacagtgtgcctaaaagacccgtaggaccggtttatcggcttgaaatgccgaattcaccttatgcaagtactgatctgcggttatcacaacgggttcatttcaatagcccacaggaaggttactaccctgtctcaggggtgatgagctcgaacagtttatcatactctgctgttttggatccggtgatggtgatggttggagaaatggtagctacgaggttgtttggaacacgagtgatggatagatttgcgtatccggacacttacaatctcgcagggactagcgggccgaggatgagaaggcggataatgcaggcagataaatcgctgggaagaatcttcttcttctttatgtgttgtgttgttctgtgtcttctcttgttttaggttttcatagctagcttggttctgctactgttcagtttcttcaggtgtaaggaaaacatagtcaaagaaatgtacatttgtgttggaaacaaatcaaagttgcttaatgttgaggaatgaggagtttatgttgggtt

SEQ ID NO: 37218 - protein, 249 aa, Arabidopsis thaliana
  peptide (1)..(249): Ceres Seq. ID no. 13489406
  misc_feature (48)..(96): Pfam Name: Zinc finger, C3HC4 type (RING finger) Pfam Description: Zinc finger, C3HC4 type (RING finger)
  misc_feature (14)..(139): Homolog of NCBI NO: 31215747 NR Description: ENSANGP00000012621 [Anopheles gambiae]
  misc_feature (28)..(144): Homolog of NCBI NO: 21912604 NR Description: putative ubiquitin ligase [Taenia solium]
  misc_feature (38)..(141): Homolog of NCBI NO: 18394721 NR Description: zinc finger (C3HC4-type RING finger) protein
  misc_feature (46)..(249): Homolog of NCBI NO: 38346627 NR Description: OSJNBa0074L08.21 [Oryza sativa (japonica
  misc_feature (19)..(240): Homolog of NCBI NO: 7488309 NR Description: RING zinc finger protein F27G19.70 - Arabidopsis
  misc_feature (19)..(249): Homolog of NCBI NO: 30687607 NR Description: zinc finger (C3HC4-type RING finger) protein
  misc_feature (181)..(249): Homolog of NCBI NO: 15235242 NR Description: zinc finger (C3HC4-type RING finger) protein
  misc_feature (39)..(169): Homolog of NCBI NO: 15235242 NR Description: zinc finger (C3HC4-type RING finger) protein
  misc_feature (35)..(249): Homolog of NCBI NO: 22795037 NR Description: putative RING protein [Populus x canescens]
  misc_feature (1)..(249): Homolog of NCBI NO: 15236326 NR Description: E3 ubiquitin ligase, RMA1 [Arabidopsis thaliana]
MALDQSFEDAALLGELYGEGAFCFKSKKPEPITVSVPSDDTDDSNFDCNICLDSVQEPVVTLCGHLFCWPCIHKWLDVQSFSTSDEYQRHRQCPVCKSKVSHSTLVPLYGRGRCTTQEEGKNSVPKRPVGPVYRLEMPNSPYASTDLRLSQRVHFNSPQEGYYPVSGVMSSNSLSYSAVLDPVMVMVGEMVATRLFGTRVMDRFAYPDTYNLAGTSGPRMRRRIMQADKSLGRIFFFFMCCVVLCLLLF

SEQ ID NO: 37219 - DNA, 1013 bp, Arabidopsis thaliana
  misc_feature (1)..(1013): Ceres Seq. ID no. 12420931
  misc_feature: MA Experiment ID: 108462 Result: Up-regulated in Transcription
  misc_feature: MA Experiment 108462 PARAMETER Experiment Name: At_Germinating_Seeds_cDNA_P Parameter: Age (day) Value: 2 vs. 0
  misc_feature: MA Experiment 108462 PARAMETER Experiment Name: At_Germinating_Seeds_cDNA_P Parameter: Tissue Value: Germinating Seeds
  misc_feature: MA Experiment ID: 108464 Result: Up-regulated in Transcription
  misc_feature: MA Experiment 108464 PARAMETER Experiment Name: At_Germinating_Seeds_cDNA_P Parameter: Age (day) Value: 4 vs. 0
  misc_feature: MA Experiment 108464 PARAMETER Experiment Name: At_Germinating_Seeds_cDNA_P Parameter: Tissue Value: Germinating Seeds
  misc_feature: MA Experiment ID: 108579 Result: Down-regulated in Transcription
  misc_feature: MA Experiment 108579 PARAMETER Experiment Name: At_4deg_Cold_cDNA_P Parameter: Temperature (deg C) Value: 4 vs. 22
  misc_feature: MA Experiment 108579 PARAMETER Experiment Name: At_4deg_Cold_cDNA_P Parameter: Timepoint (hr) Value: 6
  misc_feature: MA Experiment 108579 PARAMETER Experiment Name: At_4deg_Cold_cDNA_P Parameter: Tissue Value: Aerial
  misc_feature: MA Experiment ID: 20000179 Result: Up-regulated in Transcription
  misc_feature: MA Experiment 20000179 PARAMETER Experiment Name: At_Germinating_Seeds_P Parameter: Age (hr) Value: 6 vs. 0
  misc_feature: MA Experiment 20000179 PARAMETER Experiment Name: At_Germinating_Seeds_P Parameter: Tissue Value: Germinating Seeds
  misc_feature: MA Experiment ID: 20000180 Result: Up-regulated in Transcription
  misc_feature: MA Experiment 20000180 PARAMETER Experiment Name: At_Germinating_Seeds_P Parameter: Age (hr) Value: 24 vs. 0
  misc_feature: MA Experiment 20000180 PARAMETER Experiment Name: At_Germinating_Seeds_P Parameter: Tissue Value: Germinating Seeds
  misc_feature: MA Experiment ID: 20000184 Result: Down-regulated in Transcription
  misc_feature: MA Experiment 20000184 PARAMETER Experiment Name: At_Shoots__P Parameter: Age (day) Value: 7
  misc_feature: MA Experiment 20000184 PARAMETER Experiment Name: At_Shoots__P Parameter: Tissue Value: Shoots vs. Whole Plant
agtgaaccggagggagacagcgagatgaggccggagatagttctgttcggcgactcgatcacggcgcagtcttttaggtccggcggttggggatctgctcttgccgacgcttactctcgcaaggctgatgttgtggttcgaggctacggcggctacaacacccgatgggctctcttcttgcttcatcacatcttccctctcggctcttcgtctcctcctgttgctacgacgatattcttcggtgcaaacgatgcagctctcaaaggaagaaccagtgatagacaacatgtgccggtggaagagtacacagataatgtcagaaagattgttcagcatttgaagaaatgttcacctacaatgctaattgtgcttataactccaccaccaattgatgaagctggacgtcaaagttatgcagaatcaatctacggtgagaaagctatgaaagagcctgagagaacaaacgaaacaacaggggtatatgcacaacattgtgttgcattggccgaggaactcggtctgcgatgtgtcaacttatggtctaagatgcaggaaaccaatgattggcagaaaaagtacctaagtgatgggctccatctcacgcctgaaggcaatggggtagtttttgatgaagtctcgagagtttttagagaagcttggctctctcccgaagaaatgccgtttgatttcccccatcattcgcatatcgatggtaaaaacccatcgaaagcttttgaagagcgttgcttataacgatcatccccaaattcatgagcaggtttgttttgatttaaattcatgaacacgtttcaatgttgtgatttagaaaactctcggatgtgaataaatacctaaaaagtgcatcatcactagagatcgttttcaagagaaatgaacttatgatgtacttactatatgttgtgacttttgacttatgtacctgcactagctttctatcttccttgctatatatttcagtctgaaagattttttttaatcttcttttcaatgac

SEQ ID NO: 37220 - protein, 250 aa, Arabidopsis thaliana
  peptide (1)..(250): Ceres Seq. ID no. 12420932
  misc_feature (13)..(212): Pfam Name: GDSL-like Lipase/Acylhydrolase Pfam Description: GDSL-like Lipase/Acylhydrolase
  misc_feature (5)..(209): Homolog of NCBI NO: 27754071 NR Description: hypothetical protein 4833421E05Rik; RIKEN cDNA
  misc_feature (10)..(237): Homolog of NCBI NO: 18399151 NR Description: expressed protein
  misc_feature (10)..(237): Homolog of NCBI NO: 21554235 NR Description: CPRD49 [Arabidopsis thaliana]
  misc_feature (5)..(212): Homolog of NCBI NO: 27478045 NR Description: hypothetical protein XP_209490 [Homo sapiens]
  misc_feature (9)..(250): Homolog of NCBI NO: 13161403 NR Description: CPRD49 [Vigna unguiculata]
  misc_feature (9)..(246): Homolog of NCBI NO: 34903948 NR Description: OSJNBa0038J17.19 [Oryza sativa (japonica
  misc_feature (9)..(247): Homolog of NCBI NO: 38454102 NR Description: At5g45920 [Arabidopsis thaliana]
  misc_feature (9)..(247): Homolog of NCBI NO: 15242539 NR Description: putative protein; protein id: At5g45920.1
  misc_feature (9)..(246): Homolog of NCBI NO: 37535366 NR Description: putative esterase [Oryza sativa (japonica
  misc_feature (9)..(250): Homolog of NCBI NO: 15242002 NR Description: putative protein
SEPEGDSEMRPEIVLFGDSITAQSFRSGGWGSALADAYSRKADVVVRGYGGYNTRWALFLLHHIFPLGSSSPPVATTIFFGANDAALKGRTSDRQHVPVEEYTDNVRKIVQHLKKCSPTMLIVLITPPPIDEAGRQSYAESIYGEKAMKEPERTNETTGVYAQHCVALAEELGLRCVNLWSKMQETNDWQKKYLSDGLHLTPEGNGVVFDEVSRVFREAWLSPEEMPFDFPHHSHIDGKNPSKAFEERCL

SEQ ID NO: 37221 - protein, 242 aa, Arabidopsis thaliana
  peptide (1)..(242): Ceres Seq. ID no. 12420933
  misc_feature (5)..(204): Pfam Name: GDSL-like Lipase/Acylhydrolase Pfam Description: GDSL-like Lipase/Acylhydrolase
  misc_feature (1)..(201): Homolog of NCBI NO: 27754071 NR Description: hypothetical protein 4833421E05Rik; RIKEN cDNA
  misc_feature (2)..(229): Homolog of NCBI NO: 18399151 NR Description: expressed protein
  misc_feature (2)..(229): Homolog of NCBI NO: 21554235 NR Description: CPRD49 [Arabidopsis thaliana]
  misc_feature (1)..(204): Homolog of NCBI NO: 27478045 NR Description: hypothetical protein XP_209490 [Homo sapiens]
  misc_feature (1)..(242): Homolog of NCBI NO: 13161403 NR Description: CPRD49 [Vigna unguiculata]
  misc_feature (1)..(238): Homolog of NCBI NO: 34903948 NR Description: OSJNBa0038J17.19 [Oryza sativa (japonica
  misc_feature (1)..(239): Homolog of NCBI NO: 38454102 NR Description: At5g45920 [Arabidopsis thaliana]
  misc_feature (1)..(239): Homolog of NCBI NO: 15242539 NR Description: putative protein; protein id: At5g45920.1
  misc_feature (1)..(238): Homolog of NCBI NO: 37535366 NR Description: putative esterase [Oryza sativa (japonica
  misc_feature (1)..(242): Homolog of NCBI NO: 15242002 NR Description: putative protein
MRPEIVLFGDSITAQSFRSGGWGSALADAYSRKADVVVRGYGGYNTRWALFLLHHIFPLGSSSPPVATTIFFGANDAALKGRTSDRQHVPVEEYTDNVRKIVQHLKKCSPTMLIVLITPPPIDEAGRQSYAESIYGEKAMKEPERTNETTGVYAQHCVALAEELGLRCVNLWSKMQETNDWQKKYLSDGLHLTPEGNGVVFDEVSRVFREAWLSPEEMPFDFPHHSHIDGKNPSKAFEERCL

SEQ ID NO: 37222 - protein, 131 aa, Arabidopsis thaliana
  peptide (1)..(131): Ceres Seq. ID no. 12420934
  misc_feature (1)..(93): Pfam Name: GDSL-like Lipase/Acylhydrolase Pfam Description: GDSL-like Lipase/Acylhydrolase
  misc_feature (1)..(90): Homolog of NCBI NO: 27754071 NR Description: hypothetical protein 4833421E05Rik; RIKEN cDNA
  misc_feature (1)..(118): Homolog of NCBI NO: 18399151 NR Description: expressed protein
  misc_feature (1)..(118): Homolog of NCBI NO: 21554235 NR Description: CPRD49 [Arabidopsis thaliana]
  misc_feature (1)..(93): Homolog of NCBI NO: 27478045 NR Description: hypothetical protein XP_209490 [Homo sapiens]
  misc_feature (1)..(131): Homolog of NCBI NO: 13161403 NR Description: CPRD49 [Vigna unguiculata]
  misc_feature (1)..(127): Homolog of NCBI NO: 34903948 NR Description: OSJNBa0038J17.19 [Oryza sativa (japonica
  misc_feature (1)..(128): Homolog of NCBI NO: 38454102 NR Description: At5g45920 [Arabidopsis thaliana]
  misc_feature (1)..(128): Homolog of NCBI NO: 15242539 NR Description: putative protein; protein id: At5g45920.1
  misc_feature (1)..(127): Homolog of NCBI NO: 37535366 NR Description: putative esterase [Oryza sativa (japonica
  misc_feature (1)..(131): Homolog of NCBI NO: 15242002 NR Description: putative protein
MLIVLITPPPIDEAGRQSYAESIYGEKAMKEPERTNETTGVYAQHCVALAEELGLRCVNLWSKMQETNDWQKKYLSDGLHLTPEGNGVVFDEVSRVFREAWLSPEEMPFDFPHHSHIDGKNPSKAFEERCL

SEQ ID NO: 37223 - DNA, 3652 bp, Arabidopsis thaliana
  misc_feature (1)..(3652): Ceres Seq. ID no. 13648943
  misc_feature: MA Experiment ID: 20000179 Result: Up-regulated in Transcription
  misc_feature: MA Experiment 20000179 PARAMETER Experiment Name: At_Germinating_Seeds_P Parameter: Age (hr) Value: 6 vs. 0
  misc_feature: MA Experiment 20000179 PARAMETER Experiment Name: At_Germinating_Seeds_P Parameter: Tissue Value: Germinating Seeds
  misc_feature: MA Experiment ID: 20000180 Result: Up-regulated in Transcription
  misc_feature: MA Experiment 20000180 PARAMETER Experiment Name: At_Germinating_Seeds_P Parameter: Age (hr) Value: 24 vs. 0
  misc_feature: MA Experiment 20000180 PARAMETER Experiment Name: At_Germinating_Seeds_P Parameter: Tissue Value: Germinating Seeds
  misc_feature: MA Experiment ID: 20000235 Result: Up-regulated in Transcription
  misc_feature: MA Experiment 20000235 PARAMETER Experiment Name: At_Siliques_P Parameter: Age (day) Value: 21
  misc_feature: MA Experiment 20000235 PARAMETER Experiment Name: At_Siliques_P Parameter: Organism Value: A. thaliana
  misc_feature: MA Experiment 20000235 PARAMETER Experiment Name: At_Siliques_P Parameter: Plant Line Value: WS
  misc_feature: MA Experiment 20000235 PARAMETER Experiment Name: At_Siliques_P Parameter: Tissue Value: 5-10mm Siliques vs. Whole Plant
  misc_feature: MA Experiment ID: 20001247 Result: Up-regulated in Transcription
  misc_feature: MA Experiment 20001247 PARAMETER Experiment Name: At_Far-red-induction_P Parameter: Age (day) Value: 7
  misc_feature: MA Experiment 20001247 PARAMETER Experiment Name: At_Far-red-induction_P Parameter: Light Value: Far-red vs. White
  misc_feature: MA Experiment 20001247 PARAMETER Experiment Name: At_Far-red-induction_P Parameter: Organism Value: A. thaliana
  misc_feature: MA Experiment 20001247 PARAMETER Experiment Name: At_Far-red-induction_P Parameter: Plant Line Value: Columbia
  misc_feature: MA Experiment 20001247 PARAMETER Experiment Name: At_Far-red-induction_P Parameter: Timepoint (hr) Value: 1
  misc_feature: MA Experiment 20001247 PARAMETER Experiment Name: At_Far-red-induction_P Parameter: Tissue Value: Whole Plant
  misc_feature: MA Experiment ID: 20001557 Result: Up-regulated in Transcription
  misc_feature: MA Experiment 20001557 PARAMETER Experiment Name: At_Drought_Soil_Dry_P Parameter: Age (day) Value: 27
  misc_feature: MA Experiment 20001557 PARAMETER Experiment Name: At_Drought_Soil_Dry_P Parameter: Organism Value: A. thaliana
  misc_feature: MA Experiment 20001557 PARAMETER Experiment Name: At_Drought_Soil_Dry_P Parameter: Plant Line Value: WS
  misc_feature: MA Experiment 20001557 PARAMETER Experiment Name: At_Drought_Soil_Dry_P Parameter: Post Timepoint (hr) Value: 3
  misc_feature: MA Experiment 20001557 PARAMETER Experiment Name: At_Drought_Soil_Dry_P Parameter: Post-Treatment Value: Re-Water vs. No Drought
  misc_feature: MA Experiment 20001557 PARAMETER Experiment Name: At_Drought_Soil_Dry_P Parameter: Timepoint (day) Value: 13
  misc_feature: MA Experiment 20001557 PARAMETER Experiment Name: At_Drought_Soil_Dry_P Parameter: Treatment Value: Drought vs. No Drought
  misc_feature: MA Experiment ID: 20001905 Result: Down-regulated in Transcription
  misc_feature: MA Experiment 20001905 PARAMETER Experiment Name: At_Drought_Reproduction_P Parameter: Age (day) Value: 40
  misc_feature: MA Experiment 20001905 PARAMETER Experiment Name: At_Drought_Reproduction_P Parameter: Organism Value: A. thaliana
  misc_feature: MA Experiment 20001905 PARAMETER Experiment Name: At_Drought_Reproduction_P Parameter: Plant Line Value: WS
  misc_feature: MA Experiment 20001905 PARAMETER Experiment Name: At_Drought_Reproduction_P Parameter: Timepoint (day) Value: 10
  misc_feature: MA Experiment 20001905 PARAMETER Experiment Name: At_Drought_Reproduction_P Parameter: Tissue Value: Rosettes
  misc_feature: MA Experiment 20001905 PARAMETER Experiment Name: At_Drought_Reproduction_P Parameter: Treatment Value: Drought vs. No Drought
ggactcgcgcgcctgcaggtcgacactagtggatccaaagaattcgcggccgcgtcgactacggctgcgagaagacgacagaaggggatcccaagattctcctcttcgtcttccttataaactatctctctgtagagaagaaagcttggatccagattgagagagattcagagagtcacatcaccacactccatcttcagatctcatgatttaaactattccgacgtttcggtgttggaagcaactaagtgacgaatggaatccgaaggagaaaccgcgggaaagccgatgaagaacattgttccgcagacttgccagatctgtagtgacaatgttggcaagactgttgatggagatcgttttgtggcttgtgatatttgttcattcccagtttgtcggccttgctacgagtatgagaggaaagatgggaatcaatcttgtcctcagtgcaaaaccagatacaagaggctcaaaggtagtcctgctattcctggtgataaagacgaggatggcttagctgatgaaggtactgttgagttcaactaccctcagaaggagaaaatttcagagcggatgcttggttggcatcttactcgtgggaagggagaggaaatgggggaaccccagtatgataaagaggtctctcacaatcatcttcctcgtctcacgagcagacaagatacttcaggagagttttctgctgcctcacctgaacgcctctctgtatcttctactatcgctgggggaaagcgccttccctattcatcagatgtcaatcaatcaccaaatagaaggattgtggatcctgttggactcgggaatgtagcttggaaggagagagttgatggctggaaaatgaagcaagagaagaatactggtcctgtcagcacgcaggctgcttctgaaagaggtggagtagatattgatgccagcacagatatcctagcagatgaggctctgctgaatgacgaagcgaggcagcctctgtcaaggaaagtttcaattccttcatcacggatcaatccttacagaatggttattatgctgcggcttgttatcctttgtctcttcttgcattaccgtataacaaacccagtgccaaatgcctttgctctatggctggtctctgtgatatgtgagatctggtttgccttatcctggattttggatcagtttcccaagtggtttcctgtgaaccgtgaaacctacctcgacaggcttgctttaagatatgatcgtgaaggtgagccatcacagttagctgctgttgacattttcgtgagtactgttgaccccttgaaggagccaccccttgtgacagccaacacagtgctctctattctggctgttgactacccagttgacaaggtgtcctgttatgtttctgatgatggtgctgctatgttatcatttgaatcacttgcagaaacatcagagtttgctcgtaaatgggtaccattttgcaagaaatatagcatagagcctcgtgcaccagaatggtactttgctgcgaaaatagattacttgaaggataaagttcagacatcatttgtcaaagatcgtagagctatgaagagggaatatgaggaatttaaaatccgaatcaatgcacttgtttccaaagccctaaaatgtcctgaagaagggtgggttatgcaagatggcacaccgtggcctggaaataatacaagggaccatccaggaatgatccaggtcttcttagggcaaaatggtggacttgatgcagagggcaatgagctcccgcgtttggtatatgtttctcgagaaaagcgaccaggattccagcaccacaaaaaggctggtgctatgaatgcactggtgagagtttcagcagttcttaccaatggacctttcatcttgaatcttgattgtgatcattacataaataacagcaaagccttaagagaagcaatgtgcttcctgatggacccaaacctcgggaagcaagtttgttatgttcagttcccacaaagatttgatggtatcgataagaacgatagatatgctaatcgtaataccgtgttctttgatattaacttgagaggtttagatgggattcaaggacctgtatatgtcggaactggatgtgttttcaacagaacagcattatacggttatgaacctccaataaaagtaaaacacaagaagccaagtcttttatctaagctctgtggtggatcaagaaagaagaattccaaagctaagaaagagtcggacaaaaagaaatcaggcaggcatactgactcaactgttcctgtattcaacctcgatgacatagaagagggagttgaaggtgctggttttgatgatgaaaaggcgctcttaatgtcgcaaatgagcctggagaagcgatttggacagtctgctgtttttgttgcttctaccctaatggaaaatggtggtgttcctccttcagcaactccagaaaaccttctcaaagaggctatccatgtcattagttgtggttatgaggataagtcagattggggaatggagattggatggatctatggttctgtgacagaagatattctgactgggttcaaaatgcatgcccgtggatggcgatccatttactgcatgcctaagcttccagctttcaagggttctgctcctatcaatctttcagatcgtctgaaccaagtgctgaggtgggctttaggttcagttgagattctcttcagtcggcattgtcctatatggtatggttacaatgggaggctaaaatttcttgagaggtttgcgtatgtgaacaccaccatctaccctatcacctccattcctcttctcatgtattgtacattgccagccgtttgtctcttcaccaaccagtttattattcctcagattagtaacattgcaagtatatggtttctgtctctctttctctccattttcgccacgggtatactagaaatgaggtggagtggcgtaggcatagacgaatggtggagaaacgagcagttttgggtcattggtggagtatccgctcatttattcgctgtgtttcaaggtatcctcaaagtccttgccggtattgacacaaacttcacagttacctcaaaagcttcagatgaagacggagactttgctgagctctacttgttcaaatggacaacacttctgattccgccaacgacgctgctcattgtaaacttagtgggagttgttgcaggagtctcttatgctatcaacagtggataccaatcatggggaccactctttggtaagttgttctttgccttctgggtgattgttcacttgtaccctttcctcaagggtttgatgggtcgacagaaccggactcctaccattgttgtggtctggtctgttctcttggcttctatcttctcgttgttgtgggttaggattgatcccttcactagccgagtcactggcccggacattctggaatgtggaatcaactgttgagaagcgagcaaatatttacctgttttgagggttaaaaaaaacacagaatttaaattatttttcattgttttatttgttcacttttttacttttgttgtgtgtatctgtctgttcgttcttctgtcttggtgtcataaatttatgtgtagaatatatcttactctagttactttggaaagttataattaaagtgaaagcc

SEQ ID NO: 37224 - protein, 1065 aa, Arabidopsis thaliana
  peptide (1)..(1065): Ceres Seq. ID no. 13648944
  misc_feature (219)..(453): Homolog of NCBI NO: 27372782 NR Description: cellulose synthase-like protein D4 [Populus
  misc_feature (456)..(1048): Homolog of NCBI NO: 27372782 NR Description: cellulose synthase-like protein D4 [Populus
  misc_feature (39)..(85): Homolog of NCBI NO: 15217853 NR Description: cellulose synthase family [Arabidopsis thaliana]
  misc_feature (238)..(453): Homolog of NCBI NO: 15217853 NR Description: cellulose synthase family [Arabidopsis thaliana]
  misc_feature (476)..(1048): Homolog of NCBI NO: 15217853 NR Description: cellulose synthase family [Arabidopsis thaliana]
  misc_feature (220)..(453): Homolog of NCBI NO: 15228448 NR Description: cellulose synthase family [Arabidopsis thaliana]
  misc_feature (417)..(1048): Homolog of NCBI NO: 15228448 NR Description: cellulose synthase family [Arabidopsis thaliana]
  misc_feature (19)..(70): Homolog of NCBI NO: 15237873 NR Description: cellulose synthase family [Arabidopsis thaliana]
  misc_feature (220)..(453): Homolog of NCBI NO: 15237873 NR Description: cellulose synthase family [Arabidopsis thaliana]
  misc_feature (417)..(1048): Homolog of NCBI NO: 15237873 NR Description: cellulose synthase family [Arabidopsis thaliana]
  misc_feature (219)..(453): Homolog of NCBI NO: 27372782 NR Description: cellulose synthase-like protein D4 [Populus
  misc_feature (456)..(1048): Homolog of NCBI NO: 27372782 NR Description: cellulose synthase-like protein D4 [Populus
  misc_feature (39)..(85): Homolog of NCBI NO: 15217853 NR Description: cellulose synthase family [Arabidopsis thaliana]
  misc_feature (238)..(453): Homolog of NCBI NO: 15217853 NR Description: cellulose synthase family [Arabidopsis thaliana]
  misc_feature (476)..(1048): Homolog of NCBI NO: 15217853 NR Description: cellulose synthase family [Arabidopsis thaliana]
  misc_feature (220)..(453): Homolog of NCBI NO: 15228448 NR Description: cellulose synthase family [Arabidopsis thaliana]
  misc_feature (417)..(1048): Homolog of NCBI NO: 15228448 NR Description: cellulose synthase family [Arabidopsis thaliana]
  misc_feature (19)..(70): Homolog of NCBI NO: 15237873 NR Description: cellulose synthase family [Arabidopsis thaliana]
  misc_feature (220)..(453): Homolog of NCBI NO: 15237873 NR Description: cellulose synthase family [Arabidopsis thaliana]
  misc_feature (417)..(1048): Homolog of NCBI NO: 15237873 NR Description: cellulose synthase family [Arabidopsis thaliana]
  misc_feature (219)..(453): Homolog of NCBI NO: 27372782 NR Description: cellulose synthase-like protein D4 [Populus
  misc_feature (456)..(1048): Homolog of NCBI NO: 27372782 NR Description: cellulose synthase-like protein D4 [Populus
  misc_feature (39)..(85): Homolog of NCBI NO: 15217853 NR Description: cellulose synthase family [Arabidopsis thaliana]
  misc_feature (238)..(453): Homolog of NCBI NO: 15217853 NR Description: cellulose synthase family [Arabidopsis thaliana]
  misc_feature (476)..(1048): Homolog of NCBI NO: 15217853 NR Description: cellulose synthase family [Arabidopsis thaliana]
  misc_feature (220)..(453): Homolog of NCBI NO: 15228448 NR Description: cellulose synthase family [Arabidopsis thaliana]
  misc_feature (417)..(1048): Homolog of NCBI NO: 15228448 NR Description: cellulose synthase family [Arabidopsis thaliana]
  misc_feature (19)..(70): Homolog of NCBI NO: 15237873 NR Description: cellulose synthase family [Arabidopsis thaliana]
  misc_feature (220)..(453): Homolog of NCBI NO: 15237873 NR Description: cellulose synthase family [Arabidopsis thaliana]
  misc_feature (417)..(1048): Homolog of NCBI NO: 15237873 NR Description: cellulose synthase family [Arabidopsis thaliana]
MESEGETAGKPMKNIVPQTCQICSDNVGKTVDGDRFVACDICSFPVCRPCYEYERKDGNQSCPQCKTRYKRLKGSPAIPGDKDEDGLADEGTVEFNYPQKEKISERMLGWHLTRGKGEEMGEPQYDKEVSHNHLPRLTSRQDTSGEFSAASPERLSVSSTIAGGKRLPYSSDVNQSPNRRIVDPVGLGNVAWKERVDGWKMKQEKNTGPVSTQAASERGGVDIDASTDILADEALLNDEARQPLSRKVSIPSSRINPYRMVIMLRLVILCLFLHYRITNPVPNAFALWLVSVICEIWFALSWILDQFPKWFPVNRETYLDRLALRYDREGEPSQLAAVDIFVSTVDPLKEPPLVTANTVLSILAVDYPVDKVSCYVSDDGAAMLSFESLAETSEFARKWVPFCKKYSIEPRAPEWYFAAKIDYLKDKVQTSFVKDRRAMKREYEEFKIRINALVSKALKCPEEGWVMQDGTPWPGNNTRDHPGMIQVFLGQNGGLDAEGNELPRLVYVSREKRPGFQHHKKAGAMNALVRVSAVLTNGPFILNLDCDHYINNSKALREAMCFLMDPNLGKQVCYVQFPQRFDGIDKNDRYANRNTVFFDINLRGLDGIQGPVYVGTGCVFNRTALYGYEPPIKVKHKKPSLLSKLCGGSRKKNSKAKKESDKKKSGRHTDSTVPVFNLDDIEEGVEGAGFDDEKALLMSQMSLEKRFGQSAVFVASTLMENGGVPPSATPENLLKEAIHVISCGYEDKSDWGMEIGWIYGSVTEDILTGFKMHARGWRSIYCMPKLPAFKGSAPINLSDRLNQVLRWALGSVEILFSRHCPIWYGYNGRLKFLERFAYVNTTIYPITSIPLLMYCTLPAVCLFTNQFIIPQISNIASIWFLSLFLSIFATGILEMRWSGVGIDEWWRNEQFWVIGGVSAHLFAVFQGILKVLAGIDTNFTVTSKASDEDGDFAELYLFKWTTLLIPPTTLLIVNLVGVVAGVSYAINSGYQSWGPLFGKLFFAFWVIVHLYPFLKGLMGRQNRTPTIVVVWSVLLASIFSLLWVRIDPFTSRVTGPDILECGINC

SEQ ID NO: 37225 - protein, 1054 aa, Arabidopsis thaliana
  peptide (1)..(1054): Ceres Seq. ID no. 13648945
  misc_feature (208)..(442): Homolog of NCBI NO: 27372782 NR Description: cellulose synthase-like protein D4 [Populus
  misc_feature (445)..(1037): Homolog of NCBI NO: 27372782 NR Description: cellulose synthase-like protein D4 [Populus
  misc_feature (28)..(74): Homolog of NCBI NO: 15217853 NR Description: cellulose synthase family [Arabidopsis thaliana]
  misc_feature (227)..(442): Homolog of NCBI NO: 15217853 NR Description: cellulose synthase family [Arabidopsis thaliana]
  misc_feature (465)..(1037): Homolog of NCBI NO: 15217853 NR Description: cellulose synthase family [Arabidopsis thaliana]
  misc_feature (209)..(442): Homolog of NCBI NO: 15228448 NR Description: cellulose synthase family [Arabidopsis thaliana]
  misc_feature (406)..(1037): Homolog of NCBI NO: 15228448 NR Description: cellulose synthase family [Arabidopsis thaliana]
  misc_feature (8)..(59): Homolog of NCBI NO: 15237873 NR Description: cellulose synthase family [Arabidopsis thaliana]
  misc_feature (209)..(442): Homolog of NCBI NO: 15237873 NR Description: cellulose synthase family [Arabidopsis thaliana]
  misc_feature (406)..(1037): Homolog of NCBI NO: 15237873 NR Description: cellulose synthase family [Arabidopsis thaliana]
  misc_feature (208)..(442): Homolog of NCBI NO: 27372782 NR Description: cellulose synthase-like protein D4 [Populus
  misc_feature (445)..(1037): Homolog of NCBI NO: 27372782 NR Description: cellulose synthase-like protein D4 [Populus
  misc_feature (28)..(74): Homolog of NCBI NO: 15217853 NR Description: cellulose synthase family [Arabidopsis thaliana]
  misc_feature (227)..(442): Homolog of NCBI NO: 15217853 NR Description: cellulose synthase family [Arabidopsis thaliana]
  misc_feature (465)..(1037): Homolog of NCBI NO: 15217853 NR Description: cellulose synthase family [Arabidopsis thaliana]
  misc_feature (209)..(442): Homolog of NCBI NO: 15228448 NR Description: cellulose synthase family [Arabidopsis thaliana]
  misc_feature (406)..(1037): Homolog of NCBI NO: 15228448 NR Description: cellulose synthase family [Arabidopsis thaliana]
  misc_feature (8)..(59): Homolog of NCBI NO: 15237873 NR Description: cellulose synthase family [Arabidopsis thaliana]
  misc_feature (209)..(442): Homolog of NCBI NO: 15237873 NR Description: cellulose synthase family [Arabidopsis thaliana]
  misc_feature (406)..(1037): Homolog of NCBI NO: 15237873 NR Description: cellulose synthase family [Arabidopsis thaliana]
  misc_feature (208)..(442): Homolog of NCBI NO: 27372782 NR Description: cellulose synthase-like protein D4 [Populus
  misc_feature (445)..(1037): Homolog of NCBI NO: 27372782 NR Description: cellulose synthase-like protein D4 [Populus
  misc_feature (28)..(74): Homolog of NCBI NO: 15217853 NR Description: cellulose synthase family [Arabidopsis thaliana]
  misc_feature (227)..(442): Homolog of NCBI NO: 15217853 NR Description: cellulose synthase family [Arabidopsis thaliana]
  misc_feature (465)..(1037): Homolog of NCBI NO: 15217853 NR Description: cellulose synthase family [Arabidopsis thaliana]
  misc_feature (209)..(442): Homolog of NCBI NO: 15228448 NR Description: cellulose synthase family [Arabidopsis thaliana]
  misc_feature (406)..(1037): Homolog of NCBI NO: 15228448 NR Description: cellulose synthase family [Arabidopsis thaliana]
  misc_feature (8)..(59): Homolog of NCBI NO: 15237873 NR Description: cellulose synthase family [Arabidopsis thaliana]
  misc_feature (209)..(442): Homolog of NCBI NO: 15237873 NR Description: cellulose synthase family [Arabidopsis thaliana]
  misc_feature (406)..(1037): Homolog of NCBI NO: 15237873 NR Description: cellulose synthase family [Arabidopsis thaliana]
MKNIVPQTCQICSDNVGKTVDGDRFVACDICSFPVCRPCYEYERKDGNQSCPQCKTRYKRLKGSPAIPGDKDEDGLADEGTVEFNYPQKEKISERMLGWHLTRGKGEEMGEPQYDKEVSHNHLPRLTSRQDTSGEFSAASPERLSVSSTIAGGKRLPYSSDVNQSPNRRIVDPVGLGNVAWKERVDGWKMKQEKNTGPVSTQAASERGGVDIDASTDILADEALLNDEARQPLSRKVSIPSSRINPYRMVIMLRLVILCLFLHYRITNPVPNAFALWLVSVICEIWFALSWILDQFPKWFPVNRETYLDRLALRYDREGEPSQLAAVDIFVSTVDPLKEPPLVTANTVLSILAVDYPVDKVSCYVSDDGAAMLSFESLAETSEFARKWVPFCKKYSIEPRAPEWYFAAKIDYLKDKVQTSFVKDRRAMKREYEEFKIRINALVSKALKCPEEGWVMQDGTPWPGNNTRDHPGMIQVFLGQNGGLDAEGNELPRLVYVSREKRPGFQHHKKAGAMNALVRVSAVLTNGPFILNLDCDHYINNSKALREAMCFLMDPNLGKQVCYVQFPQRFDGIDKNDRYANRNTVFFDINLRGLDGIQGPVYVGTGCVFNRTALYGYEPPIKVKHKKPSLLSKLCGGSRKKNSKAKKESDKKKSGRHTDSTVPVFNLDDIEEGVEGAGFDDEKALLMSQMSLEKRFGQSAVFVASTLMENGGVPPSATPENLLKEAIHVISCGYEDKSDWGMEIGWIYGSVTEDILTGFKMHARGWRSIYCMPKLPAFKGSAPINLSDRLNQVLRWALGSVEILFSRHCPIWYGYNGRLKFLERFAYVNTTIYPITSIPLLMYCTLPAVCLFTNQFIIPQISNIASIWFLSLFLSIFATGILEMRWSGVGIDEWWRNEQFWVIGGVSAHLFAVFQGILKVLAGIDTNFTVTSKASDEDGDFAELYLFKWTTLLIPPTTLLIVNLVGVVAGVSYAINSGYQSWGPLFGKLFFAFWVIVHLYPFLKGLMGRQNRTPTIVVVWSVLLASIFSLLWVRIDPFTSRVTGPDILECGINC

SEQ ID NO: 37226 - protein, 959 aa, Arabidopsis thaliana
  peptide (1)..(959): Ceres Seq. ID no. 13648946
  misc_feature (618)..(944): Homolog of NCBI NO: 28973666 NR Description: unknown protein [Arabidopsis thaliana]
  misc_feature (618)..(944): Homolog of NCBI NO: 15233733 NR Description: cellulose synthase family [Arabidopsis thaliana]
  misc_feature (113)..(347): Homolog of NCBI NO: 27372782 NR Description: cellulose synthase-like protein D4 [Populus
  misc_feature (350)..(942): Homolog of NCBI NO: 27372782 NR Description: cellulose synthase-like protein D4 [Populus
  misc_feature (132)..(347): Homolog of NCBI NO: 15217853 NR Description: cellulose synthase family [Arabidopsis thaliana]
  misc_feature (370)..(942): Homolog of NCBI NO: 15217853 NR Description: cellulose synthase family [Arabidopsis thaliana]
  misc_feature (114)..(347): Homolog of NCBI NO: 15228448 NR Description: cellulose synthase family [Arabidopsis thaliana]
  misc_feature (311)..(942): Homolog of NCBI NO: 15228448 NR Description: cellulose synthase family [Arabidopsis thaliana]
  misc_feature (114)..(347): Homolog of NCBI NO: 15237873 NR Description: cellulose synthase family [Arabidopsis thaliana]
  misc_feature (311)..(942): Homolog of NCBI NO: 15237873 NR Description: cellulose synthase family [Arabidopsis thaliana]
  misc_feature (618)..(944): Homolog of NCBI NO: 28973666 NR Description: unknown protein [Arabidopsis thaliana]
  misc_feature (618)..(944): Homolog of NCBI NO: 15233733 NR Description: cellulose synthase family [Arabidopsis thaliana]
  misc_feature (113)..(347): Homolog of NCBI NO: 27372782 NR Description: cellulose synthase-like protein D4 [Populus
  misc_feature (350)..(942): Homolog of NCBI NO: 27372782 NR Description: cellulose synthase-like protein D4 [Populus
  misc_feature (132)..(347): Homolog of NCBI NO: 15217853 NR Description: cellulose synthase family [Arabidopsis thaliana]
  misc_feature (370)..(942): Homolog of NCBI NO: 15217853 NR Description: cellulose synthase family [Arabidopsis thaliana]
  misc_feature (114)..(347): Homolog of NCBI NO: 15228448 NR Description: cellulose synthase family [Arabidopsis thaliana]
  misc_feature (311)..(942): Homolog of NCBI NO: 15228448 NR Description: cellulose synthase family [Arabidopsis thaliana]
  misc_feature (114)..(347): Homolog of NCBI NO: 15237873 NR Description: cellulose synthase family [Arabidopsis thaliana]
  misc_feature (311)..(942): Homolog of NCBI NO: 15237873 NR Description: cellulose synthase family [Arabidopsis thaliana]
  misc_feature (618)..(944): Homolog of NCBI NO: 28973666 NR Description: unknown protein [Arabidopsis thaliana]
  misc_feature (618)..(944): Homolog of NCBI NO: 15233733 NR Description: cellulose synthase family [Arabidopsis thaliana]
  misc_feature (113)..(347): Homolog of NCBI NO: 27372782 NR Description: cellulose synthase-like protein D4 [Populus
  misc_feature (350)..(942): Homolog of NCBI NO: 27372782 NR Description: cellulose synthase-like protein D4 [Populus
  misc_feature (132)..(347): Homolog of NCBI NO: 15217853 NR Description: cellulose synthase family [Arabidopsis thaliana]
  misc_feature (370)..(942): Homolog of NCBI NO: 15217853 NR Description: cellulose synthase family [Arabidopsis thaliana]
  misc_feature (114)..(347): Homolog of NCBI NO: 15228448 NR Description: cellulose synthase family [Arabidopsis thaliana]
  misc_feature (311)..(942): Homolog of NCBI NO: 15228448 NR Description: cellulose synthase family [Arabidopsis thaliana]
  misc_feature (114)..(347): Homolog of NCBI NO: 15237873 NR Description: cellulose synthase family [Arabidopsis thaliana]
  misc_feature (311)..(942): Homolog of NCBI NO: 15237873 NR Description: cellulose synthase family [Arabidopsis thaliana]
MLGWHLTRGKGEEMGEPQYDKEVSHNHLPRLTSRQDTSGEFSAASPERLSVSSTIAGGKRLPYSSDVNQSPNRRIVDPVGLGNVAWKERVDGWKMKQEKNTGPVSTQAASERGGVDIDASTDILADEALLNDEARQPLSRKVSIPSSRINPYRMVIMLRLVILCLFLHYRITNPVPNAFALWLVSVICEIWFALSWILDQFPKWFPVNRETYLDRLALRYDREGEPSQLAAVDIFVSTVDPLKEPPLVTANTVLSILAVDYPVDKVSCYVSDDGAAMLSFESLAETSEFARKWVPFCKKYSIEPRAPEWYFAAKIDYLKDKVQTSFVKDRRAMKREYEEFKIRINALVSKALKCPEEGWVMQDGTPWPGNNTRDHPGMIQVFLGQNGGLDAEGNELPRLVYVSREKRPGFQHHKKAGAMNALVRVSAVLTNGPFILNLDCDHYINNSKALREAMCFLMDPNLGKQVCYVQFPQRFDGIDKNDRYANRNTVFFDINLRGLDGIQGPVYVGTGCVFNRTALYGYEPPIKVKHKKPSLLSKLCGGSRKKNSKAKKESDKKKSGRHTDSTVPVFNLDDIEEGVEGAGFDDEKALLMSQMSLEKRFGQSAVFVASTLMENGGVPPSATPENLLKEAIHVISCGYEDKSDWGMEIGWIYGSVTEDILTGFKMHARGWRSIYCMPKLPAFKGSAPINLSDRLNQVLRWALGSVEILFSRHCPIWYGYNGRLKFLERFAYVNTTIYPITSIPLLMYCTLPAVCLFTNQFIIPQISNIASIWFLSLFLSIFATGILEMRWSGVGIDEWWRNEQFWVIGGVSAHLFAVFQGILKVLAGIDTNFTVTSKASDEDGDFAELYLFKWTTLLIPPTTLLIVNLVGVVAGVSYAINSGYQSWGPLFGKLFFAFWVIVHLYPFLKGLMGRQNRTPTIVVVWSVLLASIFSLLWVRIDPFTSRVTGPDILECGINC

SEQ ID NO: 37227 - DNA, 846 bp, Arabidopsis thaliana
  misc_feature (1)..(846): Ceres Seq. ID no. 12393939
  misc_feature: MA Experiment ID: 108435 Result: Down-regulated in Transcription
  misc_feature: MA Experiment 108435 PARAMETER Experiment Name: At_stm_Mutants_cDNA_P Parameter: Plant Line Value: wt Landsburg vs stm
  misc_feature: MA Experiment 108435 PARAMETER Experiment Name: At_stm_Mutants_cDNA_P Parameter: Tissue Value: Shoot Apical Meristem Region
  misc_feature: MA Experiment ID: 108462 Result: Up-regulated in Transcription
  misc_feature: MA Experiment 108462 PARAMETER Experiment Name: At_Germinating_Seeds_cDNA_P Parameter: Age (day) Value: 2 vs. 0
  misc_feature: MA Experiment 108462 PARAMETER Experiment Name: At_Germinating_Seeds_cDNA_P Parameter: Tissue Value: Germinating Seeds
  misc_feature: MA Experiment ID: 108464 Result: Up-regulated in Transcription
  misc_feature: MA Experiment 108464 PARAMETER Experiment Name: At_Germinating_Seeds_cDNA_P Parameter: Age (day) Value: 4 vs. 0
  misc_feature: MA Experiment 108464 PARAMETER Experiment Name: At_Germinating_Seeds_cDNA_P Parameter: Tissue Value: Germinating Seeds
  misc_feature: MA Experiment ID: 108488 Result: Up-regulated in Transcription
  misc_feature: MA Experiment ID: 108595 Result: Down-regulated in Transcription
  misc_feature: MA Experiment 108595 PARAMETER Experiment Name: At_Ler-pi_Ovule_cDNA_P Parameter: Plant Line Value: null
  misc_feature: MA Experiment ID: 20000069 Result: Down-regulated in Transcription
  misc_feature: MA Experiment 20000069 PARAMETER Experiment Name: At_100uM_ABA_Mutants_cDNA_P Parameter: Plant Line Value: CS23
  misc_feature: MA Experiment 20000069 PARAMETER Experiment Name: At_100uM_ABA_Mutants_cDNA_P Parameter: Timepoint (hr) Value: 6
  misc_feature: MA Experiment 20000069 PARAMETER Experiment Name: At_100uM_ABA_Mutants_cDNA_P Parameter: Tissue Value: Aerial
  misc_feature: MA Experiment 20000069 PARAMETER Experiment Name: At_100uM_ABA_Mutants_cDNA_P Parameter: Treatment Value: 100uM ABA vs. No Treatment
  misc_feature: MA Experiment ID: 20000070 Result: Down-regulated in Transcription
  misc_feature: MA Experiment 20000070 PARAMETER Experiment Name: At_100uM_ABA_Mutants_cDNA_P Parameter: Plant Line Value: CS24
  misc_feature: MA Experiment 20000070 PARAMETER Experiment Name: At_100uM_ABA_Mutants_cDNA_P Parameter: Timepoint (hr) Value: 6
  misc_feature: MA Experiment 20000070 PARAMETER Experiment Name: At_100uM_ABA_Mutants_cDNA_P Parameter: Tissue Value: Aerial
  misc_feature: MA Experiment 20000070 PARAMETER Experiment Name: At_100uM_ABA_Mutants_cDNA_P Parameter: Treatment Value: 100uM ABA vs. No Treatment
  misc_feature: MA Experiment ID: 20000086 Result: Down-regulated in Transcription
  misc_feature: MA Experiment 20000086 PARAMETER Experiment Name: At_100uM_ABA_Mutants_cDNA_P Parameter: Plant Line Value: CS22
  misc_feature: MA Experiment 20000086 PARAMETER Experiment Name: At_100uM_ABA_Mutants_cDNA_P Parameter: Timepoint (hr) Value: 6
  misc_feature: MA Experiment 20000086 PARAMETER Experiment Name: At_100uM_ABA_Mutants_cDNA_P Parameter: Tissue Value: Aerial
  misc_feature: MA Experiment 20000086 PARAMETER Experiment Name: At_100uM_ABA_Mutants_cDNA_P Parameter: Treatment Value: 100uM ABA vs. No Treatment
  misc_feature: MA Experiment ID: 20000087 Result: Down-regulated in Transcription
  misc_feature: MA Experiment 20000087 PARAMETER Experiment Name: At_100uM_ABA_Mutants_cDNA_P Parameter: Plant Line Value: WS
  misc_feature: MA Experiment 20000087 PARAMETER Experiment Name: At_100uM_ABA_Mutants_cDNA_P Parameter: Timepoint (hr) Value: 6
  misc_feature: MA Experiment 20000087 PARAMETER Experiment Name: At_100uM_ABA_Mutants_cDNA_P Parameter: Tissue Value: Aerial
  misc_feature: MA Experiment 20000087 PARAMETER Experiment Name: At_100uM_ABA_Mutants_cDNA_P Parameter: Treatment Value: 100uM ABA vs. No Treatment
  misc_feature: MA Experiment ID: 20000184 Result: Up-regulated in Transcription
  misc_feature: MA Experiment 20000184 PARAMETER Experiment Name: At_Shoots__P Parameter: Age (day) Value: 7
  misc_feature: MA Experiment 20000184 PARAMETER Experiment Name: At_Shoots__P Parameter: Tissue Value: Shoots vs. Whole Plant
  misc_feature: MA Experiment ID: 20000185 Result: Down-regulated in Transcription
  misc_feature: MA Experiment 20000185 PARAMETER Experiment Name: At_Roots__P Parameter: Age (day) Value: 7 vs. 21
  misc_feature: MA Experiment 20000185 PARAMETER Experiment Name: At_Roots__P Parameter: Organism Value: A. thaliana
  misc_feature: MA Experiment 20000185 PARAMETER Experiment Name: At_Roots__P Parameter: Tissue Value: Roots vs. Whole Plant
  misc_feature: MA Experiment ID: 20000224 Result: Down-regulated in Transcription
  misc_feature: MA Experiment ID: 20000286 Result: Down-regulated in Transcription
  misc_feature: MA Experiment 20000286 PARAMETER Experiment Name: At_Open_Flower_P Parameter: Age (day) Value: 21
  misc_feature: MA Experiment 20000286 PARAMETER Experiment Name: At_Open_Flower_P Parameter: Plant Line Value: WS
  misc_feature: MA Experiment 20000286 PARAMETER Experiment Name: At_Open_Flower_P Parameter: Tissue Value: Half Open vs. Whole Plant
  misc_feature: MA Experiment ID: 20000437 Result: Down-regulated in Transcription
  misc_feature: MA Experiment 20000437 PARAMETER Experiment Name: At_Drought_P Parameter: Age (day) Value: 8
  misc_feature: MA Experiment 20000437 PARAMETER Experiment Name: At_Drought_P Parameter: Organism Value: A. thaliana
  misc_feature: MA Experiment 20000437 PARAMETER Experiment Name: At_Drought_P Parameter: Plant Line Value: WS
  misc_feature: MA Experiment 20000437 PARAMETER Experiment Name: At_Drought_P Parameter: Timepoint (hr) Value: 24
  misc_feature: MA Experiment 20000437 PARAMETER Experiment Name: At_Drought_P Parameter: Tissue Value: Whole Plant
  misc_feature: MA Experiment 20000437 PARAMETER Experiment Name: At_Drought_P Parameter: Treatment Value: Drought vs. No Drought
  misc_feature: MA Experiment ID: 20000438 Result: Up-regulated in Transcription
  misc_feature: MA Experiment 20000438 PARAMETER Experiment Name: At_Shoots__P Parameter: Age (day) Value: 14
  misc_feature: MA Experiment 20000438 PARAMETER Experiment Name: At_Shoots__P Parameter: Tissue Value: Shoots vs. Whole Plant
  misc_feature: MA Experiment ID: 20000439 Result: Down-regulated in Transcription
  misc_feature: MA Experiment 20000439 PARAMETER Experiment Name: At_Roots__P Parameter: Age (day) Value: 14 vs. 21
  misc_feature: MA Experiment 20000439 PARAMETER Experiment Name: At_Roots__P Parameter: Organism Value: A. thaliana
  misc_feature: MA Experiment 20000439 PARAMETER Experiment Name: At_Roots__P Parameter: Tissue Value: Roots vs. Whole Plant
  misc_feature: MA Experiment ID: 20001248 Result: Down-regulated in Transcription
  misc_feature: MA Experiment 20001248 PARAMETER Experiment Name: At_Far-red-induction_P Parameter: Age (day) Value: 7
  misc_feature: MA Experiment 20001248 PARAMETER Experiment Name: At_Far-red-induction_P Parameter: Light Value: Far-red vs. White
  misc_feature: MA Experiment 20001248 PARAMETER Experiment Name: At_Far-red-induction_P Parameter: Organism Value: A. thaliana
  misc_feature: MA Experiment 20001248 PARAMETER Experiment Name: At_Far-red-induction_P Parameter: Plant Line Value: Columbia
  misc_feature: MA Experiment 20001248 PARAMETER Experiment Name: At_Far-red-induction_P Parameter: Timepoint (hr) Value: 4
  misc_feature: MA Experiment 20001248 PARAMETER Experiment Name: At_Far-red-induction_P Parameter: Tissue Value: Whole Plant
  misc_feature: MA Experiment ID: 20001451 Result: Down-regulated in Transcription
  misc_feature: MA Experiment 20001451 PARAMETER Experiment Name: At_Far-red-induction_P Parameter: Age (day) Value: 7
  misc_feature: MA Experiment 20001451 PARAMETER Experiment Name: At_Far-red-induction_P Parameter: Light Value: Far-red vs. White
  misc_feature: MA Experiment 20001451 PARAMETER Experiment Name: At_Far-red-induction_P Parameter: Organism Value: A. thaliana
  misc_feature: MA Experiment 20001451 PARAMETER Experiment Name: At_Far-red-induction_P Parameter: Plant Line Value: Columbia
  misc_feature: MA Experiment 20001451 PARAMETER Experiment Name: At_Far-red-induction_P Parameter: Timepoint (hr) Value: 24
  misc_feature: MA Experiment 20001451 PARAMETER Experiment Name: At_Far-red-induction_P Parameter: Tissue Value: Whole Plant
  misc_feature: MA Experiment ID: 20001557 Result: Down-regulated in Transcription
  misc_feature: MA Experiment 20001557 PARAMETER Experiment Name: At_Drought_Soil_Dry_P Parameter: Age (day) Value: 27
  misc_feature: MA Experiment 20001557 PARAMETER Experiment Name: At_Drought_Soil_Dry_P Parameter: Organism Value: A. thaliana
  misc_feature: MA Experiment 20001557 PARAMETER Experiment Name: At_Drought_Soil_Dry_P Parameter: Plant Line Value: WS
  misc_feature: MA Experiment 20001557 PARAMETER Experiment Name: At_Drought_Soil_Dry_P Parameter: Post Timepoint (hr) Value: 3
  misc_feature: MA Experiment 20001557 PARAMETER Experiment Name: At_Drought_Soil_Dry_P Parameter: Post-Treatment Value: Re-Water vs. No Drought
  misc_feature: MA Experiment 20001557 PARAMETER Experiment Name: At_Drought_Soil_Dry_P Parameter: Timepoint (day) Value: 13
  misc_feature: MA Experiment 20001557 PARAMETER Experiment Name: At_Drought_Soil_Dry_P Parameter: Treatment Value: Drought vs. No Drought
  misc_feature: MA Experiment ID: 20001904 Result: Down-regulated in Transcription
  misc_feature: MA Experiment 20001904 PARAMETER Experiment Name: At_Drought_Reproduction_P Parameter: Age (day) Value: 37
  misc_feature: MA Experiment 20001904 PARAMETER Experiment Name: At_Drought_Reproduction_P Parameter: Organism Value: A. thaliana
  misc_feature: MA Experiment 20001904 PARAMETER Experiment Name: At_Drought_Reproduction_P Parameter: Plant Line Value: WS
  misc_feature: MA Experiment 20001904 PARAMETER Experiment Name: At_Drought_Reproduction_P Parameter: Timepoint (day) Value: 7
  misc_feature: MA Experiment 20001904 PARAMETER Experiment Name: At_Drought_Reproduction_P Parameter: Tissue Value: Rosettes
  misc_feature: MA Experiment 20001904 PARAMETER Experiment Name: At_Drought_Reproduction_P Parameter: Treatment Value: Drought vs. No Drought
  misc_feature: MA Experiment ID: 20001908 Result: Down-regulated in Transcription
  misc_feature: MA Experiment 20001908 PARAMETER Experiment Name: At_Drought_Reproduction_P Parameter: Age (day) Value: 40
  misc_feature: MA Experiment 20001908 PARAMETER Experiment Name: At_Drought_Reproduction_P Parameter: Organism Value: A. thaliana
  misc_feature: MA Experiment 20001908 PARAMETER Experiment Name: At_Drought_Reproduction_P Parameter: Plant Line Value: WS
  misc_feature: MA Experiment 20001908 PARAMETER Experiment Name: At_Drought_Reproduction_P Parameter: Timepoint (day) Value: 10
  misc_feature: MA Experiment 20001908 PARAMETER Experiment Name: At_Drought_Reproduction_P Parameter: Tissue Value: Siliques
  misc_feature: MA Experiment 20001908 PARAMETER Experiment Name: At_Drought_Reproduction_P Parameter: Treatment Value: Drought vs. No Drought
atcctgatcgggaaacccaaaacgagtggtcgaatagtttccgactgattcttccgaggcttgaagctcaatagctatggcttctctttcagtctcttcctcttcaaccatcatcgattcaagagctcctccttctcgactagcctccgcctccgcctcttctccgtcgtgcatttcacttcccacacttccgattcagtctcatacccgtgccgctaaagccactgcttactgtcggaagattgtgaggaacgttgtgacgagagctactactgaagttggtgaagctcctgccactactaccgaagctgagactactgagttacctgaaatcgtcaagactgctcaagaagcttgggagaaagtggatgacaagtacgctattggttctcttgcctttgctagtgtagtggctctttggggttctgctggaatgatttcggcaatcgataggcttccattggttcctggtgttcttgaacttgtaggcatcggttacacaggatggttcacttacaagaacctggtcttcaaaccagacagggaggctttgtttgagaaggtcaagagcacatacaaagacatattagggagcagctgaatcaaaggaggaagaagaagaagaagagcctttttgaggccattcatgaattggaatgaaggatatcaaaagaatctaacacaaaggccacgtccttccttcaatctttccttcttgtaactaaataattttcatcctttctctctctctgtctctggtcttttttagctcaaagtatcatccatttatgtcaaagtgttgtaaattcctcaagactatatatgagatgttttgtttcattttcc

SEQ ID NO: 37228 - protein, 174 aa, Arabidopsis thaliana
  peptide (1)..(174): Ceres Seq. ID no. 12393940
  misc_feature (22)..(173): Homolog of NCBI NO: 38175474 NR Description: unknown protein [Oryza sativa (japonica
  misc_feature (17)..(172): Homolog of NCBI NO: 34909746 NR Description: contains ESTs
  misc_feature (80)..(172): Homolog of NCBI NO: 21554231 NR Description: unknown [Arabidopsis thaliana]
  misc_feature (3)..(173): Homolog of NCBI NO: 18411555 NR Description: expressed protein
  misc_feature (3)..(173): Homolog of NCBI NO: 687677 NR Description: unknown
  misc_feature (80)..(172): Homolog of NCBI NO: 18403896 NR Description: expressed protein
  misc_feature (1)..(171): Homolog of NCBI NO: 37536446 NR Description: hypothetical protein [Oryza sativa (japonica
  misc_feature (27)..(174): Homolog of NCBI NO: 34393236 NR Description: unknown protein [Oryza sativa (japonica
  misc_feature (1)..(174): Homolog of NCBI NO: 21555057 NR Description: unknown [Arabidopsis thaliana]
  misc_feature (1)..(174): Homolog of NCBI NO: 18407178 NR Description: expressed protein
MASLSVSSSSTIIDSRAPPSRLASASASSPSCISLPTLPIQSHTRAAKATAYCRKIVRNVVTRATTEVGEAPATTTEAETTELPEIVKTAQEAWEKVDDKYAIGSLAFASVVALWGSAGMISAIDRLPLVPGVLELVGIGYTGWFTYKNLVFKPDREALFEKVKSTYKDILGSS

SEQ ID NO: 37229 - DNA, 757 bp, Arabidopsis thaliana
  misc_feature (1)..(757): Ceres Seq. ID no. 12673410
  misc_feature: MA Experiment ID: 108434 Result: Down-regulated in Transcription
  misc_feature: MA Experiment 108434 PARAMETER Experiment Name: At_Root_Tips_cDNA_P Parameter: Tissue Value: Root Tips
  misc_feature: MA Experiment ID: 108462 Result: Up-regulated in Transcription
  misc_feature: MA Experiment 108462 PARAMETER Experiment Name: At_Germinating_Seeds_cDNA_P Parameter: Age (day) Value: 2 vs. 0
  misc_feature: MA Experiment 108462 PARAMETER Experiment Name: At_Germinating_Seeds_cDNA_P Parameter: Tissue Value: Germinating Seeds
  misc_feature: MA Experiment ID: 108464 Result: Up-regulated in Transcription
  misc_feature: MA Experiment 108464 PARAMETER Experiment Name: At_Germinating_Seeds_cDNA_P Parameter: Age (day) Value: 4 vs. 0
  misc_feature: MA Experiment 108464 PARAMETER Experiment Name: At_Germinating_Seeds_cDNA_P Parameter: Tissue Value: Germinating Seeds
  misc_feature: MA Experiment ID: 108561 Result: Up-regulated in Transcription
  misc_feature: MA Experiment 108561 PARAMETER Experiment Name: At_100uM_ABA_cDNA_P Parameter: Timepoint (hr) Value: 6
  misc_feature: MA Experiment 108561 PARAMETER Experiment Name: At_100uM_ABA_cDNA_P Parameter: Tissue Value: Aerial
  misc_feature: MA Experiment 108561 PARAMETER Experiment Name: At_100uM_ABA_cDNA_P Parameter: Treatment Value: 100uM ABA vs. No Treatment
  misc_feature: MA Experiment ID: 108585 Result: Up-regulated in Transcription
  misc_feature: MA Experiment 108585 PARAMETER Experiment Name: At_5mM_NaNP_cDNA_P Parameter: Timepoint (hr) Value: 6
  misc_feature: MA Experiment 108585 PARAMETER Experiment Name: At_5mM_NaNP_cDNA_P Parameter: Tissue Value: Aerial
  misc_feature: MA Experiment 108585 PARAMETER Experiment Name: At_5mM_NaNP_cDNA_P Parameter: Treatment Value: null
  misc_feature: MA Experiment ID: 108595 Result: Up-regulated in Transcription
  misc_feature: MA Experiment 108595 PARAMETER Experiment Name: At_Ler-pi_Ovule_cDNA_P Parameter: Plant Line Value: null
  misc_feature: MA Experiment ID: 108605 Result: Up-regulated in Transcription
  misc_feature: MA Experiment 108605 PARAMETER Experiment Name: At_100uM_ABA_cDNA_P Parameter: Timepoint (hr) Value: 6
  misc_feature: MA Experiment 108605 PARAMETER Experiment Name: At_100uM_ABA_cDNA_P Parameter: Tissue Value: Aerial
  misc_feature: MA Experiment 108605 PARAMETER Experiment Name: At_100uM_ABA_cDNA_P Parameter: Treatment Value: 100uM ABA vs. No Treatment
  misc_feature: MA Experiment ID: 108607 Result: Up-regulated in Transcription
  misc_feature: MA Experiment 108607 PARAMETER Experiment Name: At_100uM_ABA_cDNA_P Parameter: Timepoint (hr) Value: 4
  misc_feature: MA Experiment 108607 PARAMETER Experiment Name: At_100uM_ABA_cDNA_P Parameter: Tissue Value: Aerial
  misc_feature: MA Experiment 108607 PARAMETER Experiment Name: At_100uM_ABA_cDNA_P Parameter: Treatment Value: 100uM ABA vs. No Treatment
  misc_feature: MA Experiment ID: 108668 Result: Up-regulated in Transcription
  misc_feature: MA Experiment 108668 PARAMETER Experiment Name: At_2mM_SA_cDNA_P Parameter: Plant Line Value: WS
  misc_feature: MA Experiment 108668 PARAMETER Experiment Name: At_2mM_SA_cDNA_P Parameter: Timepoint (hr) Value: 6
  misc_feature: MA Experiment 108668 PARAMETER Experiment Name: At_2mM_SA_cDNA_P Parameter: Treatment Value: 2mM SA vs. No Treatment
  misc_feature: MA Experiment ID: 20000069 Result: Up-regulated in Transcription
  misc_feature: MA Experiment 20000069 PARAMETER Experiment Name: At_100uM_ABA_Mutants_cDNA_P Parameter: Plant Line Value: CS23
  misc_feature: MA Experiment 20000069 PARAMETER Experiment Name: At_100uM_ABA_Mutants_cDNA_P Parameter: Timepoint (hr) Value: 6
  misc_feature: MA Experiment 20000069 PARAMETER Experiment Name: At_100uM_ABA_Mutants_cDNA_P Parameter: Tissue Value: Aerial
  misc_feature: MA Experiment 20000069 PARAMETER Experiment Name: At_100uM_ABA_Mutants_cDNA_P Parameter: Treatment Value: 100uM ABA vs. No Treatment
  misc_feature: MA Experiment ID: 20000070 Result: Up-regulated in Transcription
  misc_feature: MA Experiment 20000070 PARAMETER Experiment Name: At_100uM_ABA_Mutants_cDNA_P Parameter: Plant Line Value: CS24
  misc_feature: MA Experiment 20000070 PARAMETER Experiment Name: At_100uM_ABA_Mutants_cDNA_P Parameter: Timepoint (hr) Value: 6
  misc_feature: MA Experiment 20000070 PARAMETER Experiment Name: At_100uM_ABA_Mutants_cDNA_P Parameter: Tissue Value: Aerial
  misc_feature: MA Experiment 20000070 PARAMETER Experiment Name: At_100uM_ABA_Mutants_cDNA_P Parameter: Treatment Value: 100uM ABA vs. No Treatment
  misc_feature: MA Experiment ID: 20000087 Result: Up-regulated in Transcription
  misc_feature: MA Experiment 20000087 PARAMETER Experiment Name: At_100uM_ABA_Mutants_cDNA_P Parameter: Plant Line Value: WS
  misc_feature: MA Experiment 20000087 PARAMETER Experiment Name: At_100uM_ABA_Mutants_cDNA_P Parameter: Timepoint (hr) Value: 6
  misc_feature: MA Experiment 20000087 PARAMETER Experiment Name: At_100uM_ABA_Mutants_cDNA_P Parameter: Tissue Value: Aerial
  misc_feature: MA Experiment 20000087 PARAMETER Experiment Name: At_100uM_ABA_Mutants_cDNA_P Parameter: Treatment Value: 100uM ABA vs. No Treatment
  misc_feature: MA Experiment ID: 20000089 Result: Up-regulated in Transcription
  misc_feature: MA Experiment ID: 20000111 Result: Down-regulated in Transcription
  misc_feature: MA Experiment 20000111 PARAMETER Experiment Name: At_42deg_Heat_cDNA_P Parameter: Temperature (deg C) Value: 42 vs. 22
  misc_feature: MA Experiment 20000111 PARAMETER Experiment Name: At_42deg_Heat_cDNA_P Parameter: Timepoint (hr) Value: 6
  misc_feature: MA Experiment 20000111 PARAMETER Experiment Name: At_42deg_Heat_cDNA_P Parameter: Tissue Value: Aerial
  misc_feature: MA Experiment ID: 20000113 Result: Down-regulated in Transcription
  misc_feature: MA Experiment 20000113 PARAMETER Experiment Name: At_42deg_Heat_cDNA_P Parameter: Temperature (deg C) Value: 42 vs. 22
  misc_feature: MA Experiment 20000113 PARAMETER Experiment Name: At_42deg_Heat_cDNA_P Parameter: Timepoint (hr) Value: 8
  misc_feature: MA Experiment 20000113 PARAMETER Experiment Name: At_42deg_Heat_cDNA_P Parameter: Tissue Value: Aerial
  misc_feature: MA Experiment ID: 20000117 Result: Up-regulated in Transcription
  misc_feature: MA Experiment 20000117 PARAMETER Experiment Name: At_100uM_ABA_Mutants_cDNA_P Parameter: Plant Line Value: Columbia
  misc_feature: MA Experiment 20000117 PARAMETER Experiment Name: At_100uM_ABA_Mutants_cDNA_P Parameter: Timepoint (hr) Value: 6
  misc_feature: MA Experiment 20000117 PARAMETER Experiment Name: At_100uM_ABA_Mutants_cDNA_P Parameter: Tissue Value: Aerial
  misc_feature: MA Experiment 20000117 PARAMETER Experiment Name: At_100uM_ABA_Mutants_cDNA_P Parameter: Treatment Value: 100uM ABA vs. No Treatment
  misc_feature: MA Experiment ID: 20000307 Result: Up-regulated in Transcription
  misc_feature: MA Experiment 20000307 PARAMETER Experiment Name: At_Germinating_Seeds_Sub_P Parameter: Age (hr) Value: 24 vs. 0
  misc_feature: MA Experiment 20000307 PARAMETER Experiment Name: At_Germinating_Seeds_Sub_P Parameter: Organism Value: A. thaliana
  misc_feature: MA Experiment 20000307 PARAMETER Experiment Name: At_Germinating_Seeds_Sub_P Parameter: Plant Line Value: WS
  misc_feature: MA Experiment 20000307 PARAMETER Experiment Name: At_Germinating_Seeds_Sub_P Parameter: Tissue Value: Germinating Seeds
  misc_feature: MA Experiment ID: 20000315 Result: Down-regulated in Transcription
  misc_feature: MA Experiment 20000315 PARAMETER Experiment Name: At_14day_Shoots-Roots_Sub_P Parameter: Age (day) Value: 14
  misc_feature: MA Experiment 20000315 PARAMETER Experiment Name: At_14day_Shoots-Roots_Sub_P Parameter: Organism Value: A. thaliana
  misc_feature: MA Experiment 20000315 PARAMETER Experiment Name: At_14day_Shoots-Roots_Sub_P Parameter: Plant Line Value: WS
  misc_feature: MA Experiment 20000315 PARAMETER Experiment Name: At_14day_Shoots-Roots_Sub_P Parameter: Tissue Value: Shoots vs. Whole Plant
  misc_feature: MA Experiment ID: 20000328 Result: Down-regulated in Transcription
  misc_feature: MA Experiment 20000328 PARAMETER Experiment Name: At_42deg_Heat_Sub_P Parameter: Age (day) Value: 14
  misc_feature: MA Experiment 20000328 PARAMETER Experiment Name: At_42deg_Heat_Sub_P Parameter: Organism Value: A. thaliana
  misc_feature: MA Experiment 20000328 PARAMETER Experiment Name: At_42deg_Heat_Sub_P Parameter: Plant Line Value: WS
  misc_feature: MA Experiment 20000328 PARAMETER Experiment Name: At_42deg_Heat_Sub_P Parameter: Temperature (deg C) Value: 42 vs. 22
  misc_feature: MA Experiment 20000328 PARAMETER Experiment Name: At_42deg_Heat_Sub_P Parameter: Timepoint (hr) Value: 6
  misc_feature: MA Experiment 20000328 PARAMETER Experiment Name: At_42deg_Heat_Sub_P Parameter: Tissue Value: Aerial
  misc_feature: MA Experiment ID: 20000347 Result: Up-regulated in Transcription
  misc_feature: MA Experiment 20000347 PARAMETER Experiment Name: At_2mM_SA_Sub_P Parameter: Age (day) Value: 14
  misc_feature: MA Experiment 20000347 PARAMETER Experiment Name: At_2mM_SA_Sub_P Parameter: Organism Value: A. thaliana
  misc_feature: MA Experiment 20000347 PARAMETER Experiment Name: At_2mM_SA_Sub_P Parameter: Plant Line Value: WS
  misc_feature: MA Experiment 20000347 PARAMETER Experiment Name: At_2mM_SA_Sub_P Parameter: Timepoint (hr) Value: 6
  misc_feature: MA Experiment 20000347 PARAMETER Experiment Name: At_2mM_SA_Sub_P Parameter: Tissue Value: Aerial
  misc_feature: MA Experiment 20000347 PARAMETER Experiment Name: At_2mM_SA_Sub_P Parameter: Treatment Value: 2mM SA vs. No Treatment
atgattccttgctctaagcttcaccactacctctgatctgatttataccaaatccaacttttcttctttcaaaaagtaaaaaaatcaatcatttataatttattatggagaagtgagagcaagtgttagcttttgatctttcttatattcttctctgaaatagtaacacactgtgaagagtttttcctacatctgaattttgtctgatccagctgagaacaggaaaaagaagaaaatggcgtttgtgacaactgcggaagtttgtgacgcgaatcaagagctgattcggagtggtcagctacgagctttgcaacccattttccagatttatggccgtcgacaaatattctcaggaccagttgtcactgtcaaagtttttgaagacaatggcttaatccgtcaattcatcgaggagaaaggaaacggtagagttcttgtggtggatggtggagggagtcaacgatgtgcaatactcggaggtaaccccgttgttcaagctcagaacaacggatgggcaggaatcgttgtgaacggatgcatcagagacgtcgatgagatcaacggttgtgatatcggagtgagagctttggcctctcatccgataaaagcgagtaagaaaggacttggagaacaacgagttccggtaaatatcgcagggactcggatttgtgatggtgaatggctttatgcagatactgatgggattcttgtctcccaaattgagttatccgtttaataaaaaaggctttgatcagtt

SEQ ID NO: 37230 - protein, 166 aa, Arabidopsis thaliana; identical to SEQ ID NO: 29350
  peptide (1)..(166): Ceres Seq. ID no. 12673411
  misc_feature (2)..(159): Pfam Name: Demethylmenaquinone methyltransferase Pfam Description: Demethylmenaquinone methyltransferase
  misc_feature (6)..(166): Homolog of NCBI NO: 23468849 NR Description: hypothetical protein [Pseudomonas syringae pv.
  misc_feature (1)..(160): Homolog of NCBI NO: 34497095 NR Description: S-adenosylmethionine:2-demethylmenaquinone
  misc_feature (4)..(164): Homolog of NCBI NO: 17546073 NR Description: PROBABLE
  misc_feature (1)..(164): Homolog of NCBI NO: 22978085 NR Description: hypothetical protein [Ralstonia metallidurans]
  misc_feature (1)..(164): Homolog of NCBI NO: 22982141 NR Description: hypothetical protein [Burkholderia fungorum]
  misc_feature (1)..(166): Homolog of NCBI NO: 15241161 NR Description: expressed protein; protein id: At5g56260.1
  misc_feature (4)..(166): Homolog of NCBI NO: 34910724 NR Description: S-adenosylmethionine:2-demethylmenaquinone
  misc_feature (1)..(166): Homolog of NCBI NO: 15232963 NR Description: expressed protein
  misc_feature (1)..(166): Homolog of NCBI NO: 21537415 NR Description: S-adenosylmethionine:2-demethylmenaquinone
  misc_feature (1)..(166): Homolog of NCBI NO: 15237348 NR Description: expressed protein

SEQ ID NO: 37231 - DNA, 727 bp, Arabidopsis thaliana
  misc_feature (1)..(727): Ceres Seq. ID no. 12420803
  misc_feature: MA Experiment ID: 108434 Result: Down-regulated in Transcription
  misc_feature: MA Experiment 108434 PARAMETER Experiment Name: At_Root_Tips_cDNA_P Parameter: Tissue Value: Root Tips
  misc_feature: MA Experiment ID: 108573 Result: Up-regulated in Transcription
  misc_feature: MA Experiment 108573 PARAMETER Experiment Name: At_Drought_cDNA_P Parameter: Timepoint (hr) Value: 6
  misc_feature: MA Experiment 108573 PARAMETER Experiment Name: At_Drought_cDNA_P Parameter: Tissue Value: Aerial
  misc_feature: MA Experiment 108573 PARAMETER Experiment Name: At_Drought_cDNA_P Parameter: Treatment Value: Drought vs. No Drought
  misc_feature: MA Experiment ID: 108579 Result: Up-regulated in Transcription
  misc_feature: MA Experiment 108579 PARAMETER Experiment Name: At_4deg_Cold_cDNA_P Parameter: Temperature (deg C) Value: 4 vs. 22
  misc_feature: MA Experiment 108579 PARAMETER Experiment Name: At_4deg_Cold_cDNA_P Parameter: Timepoint (hr) Value: 6
  misc_feature: MA Experiment 108579 PARAMETER Experiment Name: At_4deg_Cold_cDNA_P Parameter: Tissue Value: Aerial
  misc_feature: MA Experiment ID: 20000030 Result: Down-regulated in Transcription
  misc_feature: MA Experiment 20000030 PARAMETER Experiment Name: At_CS6630_Roots_cDNA_P Parameter: Plant Line Value: CS6630 vs. WS
  misc_feature: MA Experiment 20000030 PARAMETER Experiment Name: At_CS6630_Roots_cDNA_P Parameter: Tissue Value: Roots
  misc_feature: MA Experiment ID: 20000068 Result: Down-regulated in Transcription
  misc_feature: MA Experiment ID: 20000069 Result: Down-regulated in Transcription
  misc_feature: MA Experiment 20000069 PARAMETER Experiment Name: At_100uM_ABA_Mutants_cDNA_P Parameter: Plant Line Value: CS23
  misc_feature: MA Experiment 20000069 PARAMETER Experiment Name: At_100uM_ABA_Mutants_cDNA_P Parameter: Timepoint (hr) Value: 6
  misc_feature: MA Experiment 20000069 PARAMETER Experiment Name: At_100uM_ABA_Mutants_cDNA_P Parameter: Tissue Value: Aerial
  misc_feature: MA Experiment 20000069 PARAMETER Experiment Name: At_100uM_ABA_Mutants_cDNA_P Parameter: Treatment Value: 100uM ABA vs. No Treatment
  misc_feature: MA Experiment ID: 20000087 Result: Down-regulated in Transcription
  misc_feature: MA Experiment 20000087 PARAMETER Experiment Name: At_100uM_ABA_Mutants_cDNA_P Parameter: Plant Line Value: WS
  misc_feature: MA Experiment 20000087 PARAMETER Experiment Name: At_100uM_ABA_Mutants_cDNA_P Parameter: Timepoint (hr) Value: 6
  misc_feature: MA Experiment 20000087 PARAMETER Experiment Name: At_100uM_ABA_Mutants_cDNA_P Parameter: Tissue Value: Aerial
  misc_feature: MA Experiment 20000087 PARAMETER Experiment Name: At_100uM_ABA_Mutants_cDNA_P Parameter: Treatment Value: 100uM ABA vs. No Treatment
  misc_feature: MA Experiment ID: 20000327 Result: Up-regulated in Transcription
  misc_feature: MA Experiment 20000327 PARAMETER Experiment Name: At_42deg_Heat_Sub_P Parameter: Age (day) Value: 14
  misc_feature: MA Experiment 20000327 PARAMETER Experiment Name: At_42deg_Heat_Sub_P Parameter: Organism Value: A. thaliana
  misc_feature: MA Experiment 20000327 PARAMETER Experiment Name: At_42deg_Heat_Sub_P Parameter: Plant Line Value: WS
  misc_feature: MA Experiment 20000327 PARAMETER Experiment Name: At_42deg_Heat_Sub_P Parameter: Temperature (deg C) Value: 42 vs. 22
  misc_feature: MA Experiment 20000327 PARAMETER Experiment Name: At_42deg_Heat_Sub_P Parameter: Timepoint (hr) Value: 1
  misc_feature: MA Experiment 20000327 PARAMETER Experiment Name: At_42deg_Heat_Sub_P Parameter: Tissue Value: Aerial
  misc_feature: MA Experiment ID: 20000328 Result: Up-regulated in Transcription
  misc_feature: MA Experiment 20000328 PARAMETER Experiment Name: At_42deg_Heat_Sub_P Parameter: Age (day) Value: 14
  misc_feature: MA Experiment 20000328 PARAMETER Experiment Name: At_42deg_Heat_Sub_P Parameter: Organism Value: A. thaliana
  misc_feature: MA Experiment 20000328 PARAMETER Experiment Name: At_42deg_Heat_Sub_P Parameter: Plant Line Value: WS
  misc_feature: MA Experiment 20000328 PARAMETER Experiment Name: At_42deg_Heat_Sub_P Parameter: Temperature (deg C) Value: 42 vs. 22
  misc_feature: MA Experiment 20000328 PARAMETER Experiment Name: At_42deg_Heat_Sub_P Parameter: Timepoint (hr) Value: 6
  misc_feature: MA Experiment 20000328 PARAMETER Experiment Name: At_42deg_Heat_Sub_P Parameter: Tissue Value: Aerial
  misc_feature: MA Experiment ID: 20000355 Result: Down-regulated in Transcription
  misc_feature: MA Experiment 20000355 PARAMETER Experiment Name: At_Siliques_Sub_P Parameter: Age (day) Value: 21
  misc_feature: MA Experiment 20000355 PARAMETER Experiment Name: At_Siliques_Sub_P Parameter: Organism Value: A. thaliana
  misc_feature: MA Experiment 20000355 PARAMETER Experiment Name: At_Siliques_Sub_P Parameter: Plant Line Value: WS
  misc_feature: MA Experiment 20000355 PARAMETER Experiment Name: At_Siliques_Sub_P Parameter: Tissue Value: Less Than 5mm Siliques vs. Whole Plant
atgccttcttctcatttctcaccaactccctccaaacccaacaaaagtgtttatattagcaaagccgccaaagtgtaaacgaaagtttataaatttcatttctgtgatcttacgtaattggaggaagatcaaaattttcaatccccattcttcgattgcttcaattgaagtttctccgatggcgcaagttagcagaatctgcaatggtgtgcagaacccatctcttatctccaatctctcgaaatccagtcaacgcaaatctcccttatcggtttctctgaagacgcagcagcatccacgagcttatccgatttcgtcgtcgtggggattgaagaagagtgggatggacgttaattggctctgaccttcgtcctcttaaggtcatgtcttctgtttccacggcggagaaagcgtcggagattgtacttcaacccattagagaaatctccggtcttattaagcttcctggctccaagtctctatcaaatcggatcctgcttctcgctgctctatctgagggaacaactgtagtggacaacttgttgaatagcgatgacatcaattacatgcttgatgcgttgaagagattgggacttaatgtggaaactgacagtgaaaataatcgtgctgtagttgaaggatgtggcgggatattcccagcttccatagattcaaagagtgatatcgaactttacctcggtaatgcaggaacagcaatgcgtccact

SEQ ID NO: 37232 - protein, 120 aa, Arabidopsis thaliana
  peptide (1)..(120): Ceres Seq. ID no. 12420804
  misc_feature (60)..(118): Homolog of NCBI NO: 114171 NR Description: 3-phosphoshikimate 1-carboxyvinyltransferase, precursor (3-enolpyruvylshikimate-5-phosphate synthase) (EPSP
  misc_feature (60)..(118): Homolog of NCBI NO: 18251236 NR Description: 5-enolpyruvylshikimate-3-phosphate synthase
  misc_feature (60)..(115): Homolog of NCBI NO: 15225450 NR Description: 5-enolpyruvylshikimate-3-phosphate (EPSP) synthase
  misc_feature (60)..(115): Homolog of NCBI NO: 1351978 NR Description: 3-phosphoshikimate 1-carboxyvinyltransferase, precursor (3-enolpyruvylshikimate-5-phosphate synthase) (EPSP
  misc_feature (60)..(115): Homolog of NCBI NO: 66618 NR Description: 3-phosphoshikimate 1-carboxyvinyltransferase (EC
CLLLISHQLPPNPTKVFILAKPPKCKRKFINFISVILRNWRKIKIFNPHSSIASIEVSPMAQVSRICNGVQNPSLISNLSKSSQRKSPLSVSLKTQQHPRAYPISSSWGLKKSGMDVNWL

SEQ ID NO: 37233 - protein, 114 aa, Arabidopsis thaliana
  peptide (1)..(114): Ceres Seq. ID no. 12420805
  misc_feature (1)..(113): Homolog of NCBI NO: 66619 NR Description: 3-phosphoshikimate 1-carboxyvinyltransferase (EC
  misc_feature (1)..(113): Homolog of NCBI NO: 114165 NR Description: 3-phosphoshikimate 1-carboxyvinyltransferase 1, precursor (5-enolpyruvylshikimate-3-phosphate synthase 1) (EPSP
  misc_feature (1)..(113): Homolog of NCBI NO: 114176 NR Description: 3-phosphoshikimate 1-carboxyvinyltransferase, precursor (5-enolpyruvylshikimate-3-phosphate synthase) (EPSP
  misc_feature (1)..(113): Homolog of NCBI NO: 21555078 NR Description: 5-enolpyruvylshikimate-3-phosphate (EPSP)
  misc_feature (1)..(113): Homolog of NCBI NO: 15221986 NR Description: 5-enolpyruvylshikimate-3-phosphate (EPSP)
  misc_feature (1)..(113): Homolog of NCBI NO: 114171 NR Description: 3-phosphoshikimate 1-carboxyvinyltransferase, precursor (3-enolpyruvylshikimate-5-phosphate synthase) (EPSP
  misc_feature (1)..(113): Homolog of NCBI NO: 18251236 NR Description: 5-enolpyruvylshikimate-3-phosphate synthase
  misc_feature (1)..(113): Homolog of NCBI NO: 15225450 NR Description: 5-enolpyruvylshikimate-3-phosphate (EPSP) synthase
  misc_feature (1)..(113): Homolog of NCBI NO: 1351978 NR Description: 3-phosphoshikimate 1-carboxyvinyltransferase, precursor (3-enolpyruvylshikimate-5-phosphate synthase) (EPSP
  misc_feature (1)..(113): Homolog of NCBI NO: 66618 NR Description: 3-phosphoshikimate 1-carboxyvinyltransferase (EC
MSSVSTAEKASEIVLQPIREISGLIKLPGSKSLSNRILLLAALSEGTTVVDNLLNSDDINYMLDALKRLGLNVETDSENNRAVVEGCGGIFPASIDSKSDIELYLGNAGTAMRP

SEQ ID NO: 37234 - protein, 61 aa, Arabidopsis thaliana
  peptide (1)..(61): Ceres Seq. ID no. 12420806
  misc_feature (1)..(59): Homolog of NCBI NO: 114171 NR Description: 3-phosphoshikimate 1-carboxyvinyltransferase, precursor (3-enolpyruvylshikimate-5-phosphate synthase) (EPSP
  misc_feature (1)..(59): Homolog of NCBI NO: 18251236 NR Description: 5-enolpyruvylshikimate-3-phosphate synthase
  misc_feature (1)..(56): Homolog of NCBI NO: 15225450 NR Description: 5-enolpyruvylshikimate-3-phosphate (EPSP) synthase
  misc_feature (1)..(56): Homolog of NCBI NO: 1351978 NR Description: 3-phosphoshikimate 1-carboxyvinyltransferase, precursor (3-enolpyruvylshikimate-5-phosphate synthase) (EPSP
  misc_feature (1)..(56): Homolog of NCBI NO: 66618 NR Description: 3-phosphoshikimate 1-carboxyvinyltransferase (EC
MAQVSRICNGVQNPSLISNLSKSSQRKSPLSVSLKTQQHPRAYPISSSWGLKKSGMDVNWL

SEQ ID NO: 37235 - DNA, 843 bp, Arabidopsis thaliana
  misc_feature (1)..(843): Ceres Seq. ID no. 13592896
  misc_feature: MA Experiment ID: 20000180 Result: Down-regulated in Transcription
  misc_feature: MA Experiment 20000180 PARAMETER Experiment Name: At_Germinating_Seeds_P Parameter: Age (hr) Value: 24 vs. 0
  misc_feature: MA Experiment 20000180 PARAMETER Experiment Name: At_Germinating_Seeds_P Parameter: Tissue Value: Germinating Seeds
  misc_feature: MA Experiment ID: 20000184 Result: Down-regulated in Transcription
  misc_feature: MA Experiment 20000184 PARAMETER Experiment Name: At_Shoots__P Parameter: Age (day) Value: 7
  misc_feature: MA Experiment 20000184 PARAMETER Experiment Name: At_Shoots__P Parameter: Tissue Value: Shoots vs. Whole Plant
  misc_feature: MA Experiment ID: 20000264 Result: Up-regulated in Transcription
  misc_feature: MA Experiment 20000264 PARAMETER Experiment Name: At_Open_Flower_P Parameter: Age (day) Value: 21
  misc_feature: MA Experiment 20000264 PARAMETER Experiment Name: At_Open_Flower_P Parameter: Plant Line Value: WS
  misc_feature: MA Experiment 20000264 PARAMETER Experiment Name: At_Open_Flower_P Parameter: Tissue Value: Open Flower vs. Whole Plant
  misc_feature: MA Experiment ID: 20000574 Result: Up-regulated in Transcription
  misc_feature: MA Experiment 20000574 PARAMETER Experiment Name: At_100uM_ABA_Mutants__P Parameter: Organism Value: A. thaliana
  misc_feature: MA Experiment 20000574 PARAMETER Experiment Name: At_100uM_ABA_Mutants__P Parameter: Plant Line Value: CS23 vs. Ler wt
  misc_feature: MA Experiment 20000574 PARAMETER Experiment Name: At_100uM_ABA_Mutants__P Parameter: Timepoint (hr) Value: N/A
  misc_feature: MA Experiment 20000574 PARAMETER Experiment Name: At_100uM_ABA_Mutants__P Parameter: Tissue Value: Whole Plant
  misc_feature: MA Experiment 20000574 PARAMETER Experiment Name: At_100uM_ABA_Mutants__P Parameter: Treatment Value: None
  misc_feature: MA Experiment ID: 20001248 Result: Down-regulated in Transcription
  misc_feature: MA Experiment 20001248 PARAMETER Experiment Name: At_Far-red-induction_P Parameter: Age (day) Value: 7
  misc_feature: MA Experiment 20001248 PARAMETER Experiment Name: At_Far-red-induction_P Parameter: Light Value: Far-red vs. White
  misc_feature: MA Experiment 20001248 PARAMETER Experiment Name: At_Far-red-induction_P Parameter: Organism Value: A. thaliana
  misc_feature: MA Experiment 20001248 PARAMETER Experiment Name: At_Far-red-induction_P Parameter: Plant Line Value: Columbia
  misc_feature: MA Experiment 20001248 PARAMETER Experiment Name: At_Far-red-induction_P Parameter: Timepoint (hr) Value: 4
  misc_feature: MA Experiment 20001248 PARAMETER Experiment Name: At_Far-red-induction_P Parameter: Tissue Value: Whole Plant
  misc_feature: MA Experiment ID: 20001450 Result: Down-regulated in Transcription
  misc_feature: MA Experiment 20001450 PARAMETER Experiment Name: At_Far-red-induction_P Parameter: Age (day) Value: 7
  misc_feature: MA Experiment 20001450 PARAMETER Experiment Name: At_Far-red-induction_P Parameter: Light Value: Far-red vs. White
  misc_feature: MA Experiment 20001450 PARAMETER Experiment Name: At_Far-red-induction_P Parameter: Organism Value: A. thaliana
  misc_feature: MA Experiment 20001450 PARAMETER Experiment Name: At_Far-red-induction_P Parameter: Plant Line Value: Columbia
  misc_feature: MA Experiment 20001450 PARAMETER Experiment Name: At_Far-red-induction_P Parameter: Timepoint (hr) Value: 8
  misc_feature: MA Experiment 20001450 PARAMETER Experiment Name: At_Far-red-induction_P Parameter: Tissue Value: Whole Plant
actcaaaacataatttgctctcaataagacattaacaaagtcccagaggcagagagagagaatcagagagagagaagtcgagatgtttttccacatagtattggagcggaacatgcagttgcatcctcgtttctttggtcgtaacctaaaagaaaacctcgtatctaagctcatgaaagatgtcgaaggcacttgcagtggccgacatggatttgtagtggcgataactggaatagatacaataggaaagggtttgatcagagatgggactggttttgtcacctttccagttaaataccaatgcgtcgttttcagacctttcaaaggcgagattttggaagctgttgtcactttggtcaataagatgggattcttcgctgaagctggccctgttcagatttttgtgtctaagcatttgattccagatgatatggagtttcaagctggagacatgcctaactataccacatcagatggatcagttaagatccagaaggagtgtgaagtgagactaaagattattggaacaagagttgatgccactgcgattttttgtgtgggtaccatcaaagacgattttttgggagtcataaacgaccctgcagcggcataaaaagtttcaagcagatttcaattttggtcttctttctttcacagagaatgctgtcttgtgataaagttgtattatagttgaagttttggatctatttaatccgaaagattggaaccacgcttgttggatttaacttatatgcaagtttagtgaactttgtatttgttcaaaactgttgtcattttgagaacaatatagtaccgagtggtggatcaaattctacatgtcac

SEQ ID NO: 37236 - protein, 176 aa, Arabidopsis thaliana
  peptide (1)..(176): Ceres Seq. ID no. 13592897
  misc_feature (78)..(160): Pfam Name: S1 RNA binding domain Pfam Description: S1 RNA binding domain
  misc_feature (1)..(168): Homolog of NCBI NO: 13811986 NR Description: RNA polymerase II RPB7 subunit-like protein
  misc_feature (1)..(168): Homolog of NCBI NO: 12655858 NR Description: RNA polymerase II subunit 7 [Candida albicans]
  misc_feature (2)..(170): Homolog of NCBI NO: 19114885 NR Description: RNA polymerase II subunit rpb7
  misc_feature (1)..(171): Homolog of NCBI NO: 28278826 NR Description: Unknown (protein for MGC:55297) [Danio rerio]
  misc_feature (1)..(169): Homolog of NCBI NO: 17510349 NR Description: RNA polymerase Rpb7, N-terminal domain and S1 RNA
  misc_feature (1)..(171): Homolog of NCBI NO: 4505947 NR Description: DNA directed RNA polymerase II polypeptide G
  misc_feature (1)..(169): Homolog of NCBI NO: 39595528 NR Description: Hypothetical protein CBG04195 [Caenorhabditis
  misc_feature (1)..(172): Homolog of NCBI NO: 24647020 NR Description: CG31155-PA [Drosophila melanogaster]
  misc_feature (1)..(174): Homolog of NCBI NO: 1173137 NR Description: DNA-DIRECTED RNA POLYMERASE II 19 KD POLYPEPTIDE
  misc_feature (1)..(176): Homolog of NCBI NO: 15237831 NR Description: RNA polymerase II [Arabidopsis thaliana]
MFFHIVLERNMQLHPRFFGRNLKENLVSKLMKDVEGTCSGRHGFVVAITGIDTIGKGLIRDGTGFVTFPVKYQCVVFRPFKGEILEAVVTLVNKMGFFAEAGPVQIFVSKHLIPDDMEFQAGDMPNYTTSDGSVKIQKECEVRLKIIGTRVDATAIFCVGTIKDDFLGVINDPAAA

SEQ ID NO: 37237 - protein, 166 aa, Arabidopsis thaliana
  peptide (1)..(166): Ceres Seq. ID no. 13592898
  misc_feature (68)..(150): Pfam Name: S1 RNA binding domain Pfam Description: S1 RNA binding domain
  misc_feature (1)..(158): Homolog of NCBI NO: 13811986 NR Description: RNA polymerase II RPB7 subunit-like protein
  misc_feature (1)..(158): Homolog of NCBI NO: 12655858 NR Description: RNA polymerase II subunit 7 [Candida albicans]
  misc_feature (1)..(160): Homolog of NCBI NO: 19114885 NR Description: RNA polymerase II subunit rpb7
  misc_feature (1)..(161): Homolog of NCBI NO: 28278826 NR Description: Unknown (protein for MGC:55297) [Danio rerio]
  misc_feature (1)..(159): Homolog of NCBI NO: 17510349 NR Description: RNA polymerase Rpb7, N-terminal domain and S1 RNA
  misc_feature (1)..(161): Homolog of NCBI NO: 4505947 NR Description: DNA directed RNA polymerase II polypeptide G
  misc_feature (1)..(159): Homolog of NCBI NO: 39595528 NR Description: Hypothetical protein CBG04195 [Caenorhabditis
  misc_feature (1)..(162): Homolog of NCBI NO: 24647020 NR Description: CG31155-PA [Drosophila melanogaster]
  misc_feature (1)..(164): Homolog of NCBI NO: 1173137 NR Description: DNA-DIRECTED RNA POLYMERASE II 19 KD POLYPEPTIDE
  misc_feature (1)..(166): Homolog of NCBI NO: 15237831 NR Description: RNA polymerase II [Arabidopsis thaliana]
MQLHPRFFGRNLKENLVSKLMKDVEGTCSGRHGFVVAITGIDTIGKGLIRDGTGFVTFPVKYQCVVFRPFKGEILEAVVTLVNKMGFFAEAGPVQIFVSKHLIPDDMEFQAGDMPNYTTSDGSVKIQKECEVRLKIIGTRVDATAIFCVGTIKDDFLGVINDPAAA

SEQ ID NO: 37238 - protein, 146 aa, Arabidopsis thaliana
  peptide (1)..(146): Ceres Seq. ID no. 13592899
  misc_feature (48)..(130): Pfam Name: S1 RNA binding domain Pfam Description: S1 RNA binding domain
  misc_feature (1)..(138): Homolog of NCBI NO: 13811986 NR Description: RNA polymerase II RPB7 subunit-like protein
  misc_feature (1)..(138): Homolog of NCBI NO: 12655858 NR Description: RNA polymerase II subunit 7 [Candida albicans]
  misc_feature (1)..(140): Homolog of NCBI NO: 19114885 NR Description: RNA polymerase II subunit rpb7
  misc_feature (1)..(139): Homolog of NCBI NO: 17510349 NR Description: RNA polymerase Rpb7, N-terminal domain and S1 RNA
  misc_feature (1)..(141): Homolog of NCBI NO: 28278826 NR Description: Unknown (protein for MGC:55297) [Danio rerio]
  misc_feature (1)..(141): Homolog of NCBI NO: 4505947 NR Description: DNA directed RNA polymerase II polypeptide G
  misc_feature (1)..(139): Homolog of NCBI NO: 39595528 NR Description: Hypothetical protein CBG04195 [Caenorhabditis
  misc_feature (1)..(142): Homolog of NCBI NO: 24647020 NR Description: CG31155-PA [Drosophila melanogaster]
  misc_feature (1)..(144): Homolog of NCBI NO: 1173137 NR Description: DNA-DIRECTED RNA POLYMERASE II 19 KD POLYPEPTIDE
  misc_feature (1)..(146): Homolog of NCBI NO: 15237831 NR Description: RNA polymerase II [Arabidopsis thaliana]
MKDVEGTCSGRHGFVVAITGIDTIGKGLIRDGTGFVTFPVKYQCVVFRPFKGEILEAVVTLVNKMGFFAEAGPVQIFVSKHLIPDDMEFQAGDMPNYTTSDGSVKIQKECEVRLKIIGTRVDATAIFCVGTIKDDFLGVINDPAAA

SEQ ID NO: 37239 - DNA, 597 bp, Arabidopsis thaliana; identical to SEQ ID NO: 28582
  misc_feature (1)..(597): Ceres Seq. ID no. 12579462
  misc_feature: MA Experiment ID: 108569 Result: Down-regulated in Transcription
  misc_feature: MA Experiment 108569 PARAMETER Experiment Name: At_0.001%_MeJA__cDNA_P Parameter: Timepoint (hr) Value: 6
  misc_feature: MA Experiment 108569 PARAMETER Experiment Name: At_0.001%_MeJA__cDNA_P Parameter: Tissue Value: Aerial
  misc_feature: MA Experiment 108569 PARAMETER Experiment Name: At_0.001%_MeJA__cDNA_P Parameter: Treatment Value: 0.001% MeJA vs. No Treatment
  misc_feature: MA Experiment ID: 20000173 Result: Down-regulated in Transcription
  misc_feature: MA Experiment 20000173 PARAMETER Experiment Name: At_42deg_Heat_P Parameter: Age (day) Value: 14
  misc_feature: MA Experiment 20000173 PARAMETER Experiment Name: At_42deg_Heat_P Parameter: Organism Value: A. thaliana
  misc_feature: MA Experiment 20000173 PARAMETER Experiment Name: At_42deg_Heat_P Parameter: Plant Line Value: WS
  misc_feature: MA Experiment 20000173 PARAMETER Experiment Name: At_42deg_Heat_P Parameter: Temperature (deg C) Value: 42 vs. 22
  misc_feature: MA Experiment 20000173 PARAMETER Experiment Name: At_42deg_Heat_P Parameter: Timepoint (hr) Value: 6
  misc_feature: MA Experiment 20000173 PARAMETER Experiment Name: At_42deg_Heat_P Parameter: Tissue Value: Aerial
  misc_feature: MA Experiment ID: 20001560 Result: Up-regulated in Transcription
  misc_feature: MA Experiment 20001560 PARAMETER Experiment Name: At_Drought_Soil_Dry_P Parameter: Age (day) Value: 28
  misc_feature: MA Experiment 20001560 PARAMETER Experiment Name: At_Drought_Soil_Dry_P Parameter: Organism Value: A. thaliana
  misc_feature: MA Experiment 20001560 PARAMETER Experiment Name: At_Drought_Soil_Dry_P Parameter: Plant Line Value: WS
  misc_feature: MA Experiment 20001560 PARAMETER Experiment Name: At_Drought_Soil_Dry_P Parameter: Post Timepoint (hr) Value: None
  misc_feature: MA Experiment 20001560 PARAMETER Experiment Name: At_Drought_Soil_Dry_P Parameter: Post-Treatment Value: None
  misc_feature: MA Experiment 20001560 PARAMETER Experiment Name: At_Drought_Soil_Dry_P Parameter: Timepoint (day) Value: 14
  misc_feature: MA Experiment 20001560 PARAMETER Experiment Name: At_Drought_Soil_Dry_P Parameter: Treatment Value: Drought vs. No Drought
  misc_feature: MA Experiment ID: 20001911 Result: Down-regulated in Transcription
  misc_feature: MA Experiment 20001911 PARAMETER Experiment Name: At_Drought_Reproduction_P Parameter: Age (day) Value: 40
  misc_feature: MA Experiment 20001911 PARAMETER Experiment Name: At_Drought_Reproduction_P Parameter: Organism Value: A. thaliana
  misc_feature: MA Experiment 20001911 PARAMETER Experiment Name: At_Drought_Reproduction_P Parameter: Plant Line Value: WS
  misc_feature: MA Experiment 20001911 PARAMETER Experiment Name: At_Drought_Reproduction_P Parameter: Timepoint (day) Value: 10
  misc_feature: MA Experiment 20001911 PARAMETER Experiment Name: At_Drought_Reproduction_P Parameter: Tissue Value: Flowers
  misc_feature: MA Experiment 20001911 PARAMETER Experiment Name: At_Drought_Reproduction_P Parameter: Treatment Value: Drought vs. No Drought

SEQ ID NO: 37240 - protein, 99 aa, Arabidopsis thaliana; identical to SEQ ID NO: 24405
  peptide (1)..(99): Ceres Seq. ID no. 12579463
  misc_feature (1)..(73): Pfam Name: Domain of unknown function (DUF543) Pfam Description: Domain of unknown function (DUF543)
  misc_feature (1)..(73): Pfam Name: Domain of unknown function (DUF543) Pfam Description: Domain of unknown function (DUF543)
  misc_feature (2)..(95): Homolog of NCBI NO: 25406151 NR Description: unknown protein T9N14.2 [imported] - Arabidopsis
  misc_feature (2)..(99): Homolog of NCBI NO: 21553491 NR Description: unknown [Arabidopsis thaliana]
  misc_feature (2)..(95): Homolog of NCBI NO: 25406151 NR Description: unknown protein T9N14.2 [imported] - Arabidopsis
  misc_feature (2)..(99): Homolog of NCBI NO: 18410008 NR Description: unknown protein
  misc_feature (1)..(99): Homolog of NCBI NO: 18395129 NR Description: expressed protein
  misc_feature (2)..(99): Homolog of NCBI NO: 21553491 NR Description: unknown [Arabidopsis thaliana]
  misc_feature (2)..(99): Homolog of NCBI NO: 18410008 NR Description: unknown protein
  misc_feature (1)..(99): Homolog of NCBI NO: 18395129 NR Description: expressed protein

SEQ ID NO: 37241 - protein, 71 aa, Arabidopsis thaliana; identical to SEQ ID NO: 24406
  peptide (1)..(71): Ceres Seq. ID no. 12579464

SEQ ID NO: 37242 - protein, 56 aa, Arabidopsis thaliana; identical to SEQ ID NO: 24407
  peptide (1)..(56): Ceres Seq. ID no. 12579465

SEQ ID NO: 37243 - DNA, 1136 bp, Arabidopsis thaliana
  misc_feature (1)..(1136): Ceres Seq. ID no. 13489147
  misc_feature: MA Experiment ID: 20000169 Result: Up-regulated in Transcription
  misc_feature: MA Experiment 20000169 PARAMETER Experiment Name: At_100uM_ABA_P Parameter: Age (day) Value: 14
  misc_feature: MA Experiment 20000169 PARAMETER Experiment Name: At_100uM_ABA_P Parameter: Organism Value: A. thaliana
  misc_feature: MA Experiment 20000169 PARAMETER Experiment Name: At_100uM_ABA_P Parameter: Plant Line Value: WS
  misc_feature: MA Experiment 20000169 PARAMETER Experiment Name: At_100uM_ABA_P Parameter: Timepoint (hr) Value: 6
  misc_feature: MA Experiment 20000169 PARAMETER Experiment Name: At_100uM_ABA_P Parameter: Tissue Value: Aerial
  misc_feature: MA Experiment 20000169 PARAMETER Experiment Name: At_100uM_ABA_P Parameter: Treatment Value: 100uM ABA vs. No Treatment
  misc_feature: MA Experiment ID: 20000182 Result: Up-regulated in Transcription
  misc_feature: MA Experiment 20000182 PARAMETER Experiment Name: At_2mM_SA_P Parameter: Age (day) Value: 14
  misc_feature: MA Experiment 20000182 PARAMETER Experiment Name: At_2mM_SA_P Parameter: Organism Value: A. thaliana
  misc_feature: MA Experiment 20000182 PARAMETER Experiment Name: At_2mM_SA_P Parameter: Plant Line Value: WS
  misc_feature: MA Experiment 20000182 PARAMETER Experiment Name: At_2mM_SA_P Parameter: Timepoint (hr) Value: 6
  misc_feature: MA Experiment 20000182 PARAMETER Experiment Name: At_2mM_SA_P Parameter: Tissue Value: Aerial
  misc_feature: MA Experiment 20000182 PARAMETER Experiment Name: At_2mM_SA_P Parameter: Treatment Value: 2mM SA vs. No Treatment
  misc_feature: MA Experiment ID: 20000227 Result: Down-regulated in Transcription
  misc_feature: MA Experiment 20000227 PARAMETER Experiment Name: At_Root-Tips-vs-Tops_P Parameter: Tissue Value: Root Tips vs. Root Tops
  misc_feature: MA Experiment ID: 20000234 Result: Down-regulated in Transcription
  misc_feature: MA Experiment 20000234 PARAMETER Experiment Name: At_Siliques_P Parameter: Age (day) Value: 21
  misc_feature: MA Experiment 20000234 PARAMETER Experiment Name: At_Siliques_P Parameter: Organism Value: A. thaliana
  misc_feature: MA Experiment 20000234 PARAMETER Experiment Name: At_Siliques_P Parameter: Plant Line Value: WS
  misc_feature: MA Experiment 20000234 PARAMETER Experiment Name: At_Siliques_P Parameter: Tissue Value: Less Than 5mm Siliques vs. Whole Plant
  misc_feature: MA Experiment ID: 20000235 Result: Down-regulated in Transcription
  misc_feature: MA Experiment 20000235 PARAMETER Experiment Name: At_Siliques_P Parameter: Age (day) Value: 21
  misc_feature: MA Experiment 20000235 PARAMETER Experiment Name: At_Siliques_P Parameter: Organism Value: A. thaliana
  misc_feature: MA Experiment 20000235 PARAMETER Experiment Name: At_Siliques_P Parameter: Plant Line Value: WS
  misc_feature: MA Experiment 20000235 PARAMETER Experiment Name: At_Siliques_P Parameter: Tissue Value: 5-10mm Siliques vs. Whole Plant
  misc_feature: MA Experiment ID: 20000265 Result: Down-regulated in Transcription
  misc_feature: MA Experiment 20000265 PARAMETER Experiment Name: At_Open_Flower_P Parameter: Age (day) Value: 21
  misc_feature: MA Experiment 20000265 PARAMETER Experiment Name: At_Open_Flower_P Parameter: Plant Line Value: WS
  misc_feature: MA Experiment 20000265 PARAMETER Experiment Name: At_Open_Flower_P Parameter: Tissue Value: Closed Flower vs. Whole Plant
  misc_feature: MA Experiment ID: 20000286 Result: Down-regulated in Transcription
  misc_feature: MA Experiment 20000286 PARAMETER Experiment Name: At_Open_Flower_P Parameter: Age (day) Value: 21
  misc_feature: MA Experiment 20000286 PARAMETER Experiment Name: At_Open_Flower_P Parameter: Plant Line Value: WS
  misc_feature: MA Experiment 20000286 PARAMETER Experiment Name: At_Open_Flower_P Parameter: Tissue Value: Half Open vs. Whole Plant
  misc_feature: MA Experiment ID: 20000438 Result: Down-regulated in Transcription
  misc_feature: MA Experiment 20000438 PARAMETER Experiment Name: At_Shoots__P Parameter: Age (day) Value: 14
  misc_feature: MA Experiment 20000438 PARAMETER Experiment Name: At_Shoots__P Parameter: Tissue Value: Shoots vs. Whole Plant
  misc_feature: MA Experiment ID: 20000453 Result: Up-regulated in Transcription
  misc_feature: MA Experiment 20000453 PARAMETER Experiment Name: At_100uM_ABA_P Parameter: Age (day) Value: 15
  misc_feature: MA Experiment 20000453 PARAMETER Experiment Name: At_100uM_ABA_P Parameter: Organism Value: A. thaliana
  misc_feature: MA Experiment 20000453 PARAMETER Experiment Name: At_100uM_ABA_P Parameter: Plant Line Value: WS
  misc_feature: MA Experiment 20000453 PARAMETER Experiment Name: At_100uM_ABA_P Parameter: Timepoint (hr) Value: 24
  misc_feature: MA Experiment 20000453 PARAMETER Experiment Name: At_100uM_ABA_P Parameter: Tissue Value: Aerial
  misc_feature: MA Experiment 20000453 PARAMETER Experiment Name: At_100uM_ABA_P Parameter: Treatment Value: 100uM ABA vs. No Treatment
  misc_feature: MA Experiment ID: 20000527 Result: Down-regulated in Transcription
  misc_feature: MA Experiment 20000527 PARAMETER Experiment Name: At_10percent_PEG_P Parameter: Age (day) Value: 20
  misc_feature: MA Experiment 20000527 PARAMETER Experiment Name: At_10percent_PEG_P Parameter: Organism Value: A. thaliana
  misc_feature: MA Experiment 20000527 PARAMETER Experiment Name: At_10percent_PEG_P Parameter: Plant Line Value: WS
  misc_feature: MA Experiment 20000527 PARAMETER Experiment Name: At_10percent_PEG_P Parameter: Timepoint (day) Value: 20
  misc_feature: MA Experiment 20000527 PARAMETER Experiment Name: At_10percent_PEG_P Parameter: Tissue Value: Whole Plant
  misc_feature: MA Experiment 20000527 PARAMETER Experiment Name: At_10percent_PEG_P Parameter: Treatment Value: 10percent PEG vs. No Treatment
  misc_feature: MA Experiment ID: 20001457 Result: Down-regulated in Transcription
  misc_feature: MA Experiment 20001457 PARAMETER Experiment Name: At_50mM_NH4NO3_L-to-H_P Parameter: Age (day) Value: Undefined
  misc_feature: MA Experiment 20001457 PARAMETER Experiment Name: At_50mM_NH4NO3_L-to-H_P Parameter: Organism Value: Undefined
  misc_feature: MA Experiment 20001457 PARAMETER Experiment Name: At_50mM_NH4NO3_L-to-H_P Parameter: Plant Line Value: Undefined
  misc_feature: MA Experiment 20001457 PARAMETER Experiment Name: At_50mM_NH4NO3_L-to-H_P Parameter: Timepoint (hr) Value: 0.5
  misc_feature: MA Experiment 20001457 PARAMETER Experiment Name: At_50mM_NH4NO3_L-to-H_P Parameter: Tissue Value: Siliques
  misc_feature: MA Experiment 20001457 PARAMETER Experiment Name: At_50mM_NH4NO3_L-to-H_P Parameter: Treatment Value: 50mM NH4NO3 vs. 100mM Manitol
  misc_feature: MA Experiment ID: 20001554 Result: Up-regulated in Transcription
  misc_feature: MA Experiment 20001554 PARAMETER Experiment Name: At_Drought_Soil_Dry_P Parameter: Age (day) Value: 21
  misc_feature: MA Experiment 20001554 PARAMETER Experiment Name: At_Drought_Soil_Dry_P Parameter: Organism Value: A. thaliana
  misc_feature: MA Experiment 20001554 PARAMETER Experiment Name: At_Drought_Soil_Dry_P Parameter: Plant Line Value: WS
  misc_feature: MA Experiment 20001554 PARAMETER Experiment Name: At_Drought_Soil_Dry_P Parameter: Post Timepoint (hr) Value: None
  misc_feature: MA Experiment 20001554 PARAMETER Experiment Name: At_Drought_Soil_Dry_P Parameter: Post-Treatment Value: None
  misc_feature: MA Experiment 20001554 PARAMETER Experiment Name: At_Drought_Soil_Dry_P Parameter: Timepoint (day) Value: 7
  misc_feature: MA Experiment 20001554 PARAMETER Experiment Name: At_Drought_Soil_Dry_P Parameter: Treatment Value: Drought vs. No Drought
  misc_feature: MA Experiment ID: 20001555 Result: Up-regulated in Transcription
  misc_feature: MA Experiment 20001555 PARAMETER Experiment Name: At_Drought_Soil_Dry_P Parameter: Age (day) Value: 24
  misc_feature: MA Experiment 20001555 PARAMETER Experiment Name: At_Drought_Soil_Dry_P Parameter: Organism Value: A. thaliana
  misc_feature: MA Experiment 20001555 PARAMETER Experiment Name: At_Drought_Soil_Dry_P Parameter: Plant Line Value: WS
  misc_feature: MA Experiment 20001555 PARAMETER Experiment Name: At_Drought_Soil_Dry_P Parameter: Post Timepoint (hr) Value: None
  misc_feature: MA Experiment 20001555 PARAMETER Experiment Name: At_Drought_Soil_Dry_P Parameter: Post-Treatment Value: None
  misc_feature: MA Experiment 20001555 PARAMETER Experiment Name: At_Drought_Soil_Dry_P Parameter: Timepoint (day) Value: 10
  misc_feature: MA Experiment 20001555 PARAMETER Experiment Name: At_Drought_Soil_Dry_P Parameter: Treatment Value: Drought vs. No Drought
  misc_feature: MA Experiment ID: 20001557 Result: Up-regulated in Transcription
  misc_feature: MA Experiment 20001557 PARAMETER Experiment Name: At_Drought_Soil_Dry_P Parameter: Age (day) Value: 27
  misc_feature: MA Experiment 20001557 PARAMETER Experiment Name: At_Drought_Soil_Dry_P Parameter: Organism Value: A. thaliana
  misc_feature: MA Experiment 20001557 PARAMETER Experiment Name: At_Drought_Soil_Dry_P Parameter: Plant Line Value: WS
  misc_feature: MA Experiment 20001557 PARAMETER Experiment Name: At_Drought_Soil_Dry_P Parameter: Post Timepoint (hr) Value: 3
  misc_feature: MA Experiment 20001557 PARAMETER Experiment Name: At_Drought_Soil_Dry_P Parameter: Post-Treatment Value: Re-Water vs. No Drought
  misc_feature: MA Experiment 20001557 PARAMETER Experiment Name: At_Drought_Soil_Dry_P Parameter: Timepoint (day) Value: 13
  misc_feature: MA Experiment 20001557 PARAMETER Experiment Name: At_Drought_Soil_Dry_P Parameter: Treatment Value: Drought vs. No Drought
tgattcttctcttgatctcttcttctttaacgtttatactttatatacatcgaaagcatttcttctttgtccgttcacatcattttcgaatttgtgttttccctagaaattgtctttttttttttctttcttatagagaaaatcaagaaaatgtaaaaaagattgatatatttatttattctcgttcaaatgaatcactctttatttgactcgttagtccatgtctcgtctcactctcttaatctctatttcctctcagatctctcaaaaagtgtagttttgtgacaaaaactgttttttaaagttagctataagaagatgaggaagatcatagggtttagaatcgggagacgagtctcaagatggatctttcgcaaaacccggatccaacgttcaggatacaaccggatacactcgacccagcaagcttgcatgctgatgagaccattagccaaactcaaaagttggggccaacgtctcaagcaaagtttcagacgcaggtctacgagaagatccgcatacatacccgttgatcataagaaagccgacccggttccaaggggacacttagctatctacgtgggtcaaaaagacggcgactgtcatagagttttggtacccatcgtttactttaaccatcctttgttcggtgagctgcttcgagaagccgaaaaagagtacggattttgccacgaaggaggtatcactattccttgtctgtattcagatttcgaacgggtcaagacccggatcgcatcggggtcaagttctcgggtatttccatggggccgtcattgccgcaattgaagacaattatggaaatagttcttaggattttcaagcttttattttctttgtagatattgttccctttcatttaccattttctaatcttgttactttttgtcactttacacttttcttgtgatagtctcaattatacagtaagctgataacgtaaataattattaagagtctaatagtgattatcgataatgatgtgattagcatggggacacttagtggtatactgtctttggacattgatataaagatgaaatggaaattggtgatgaaacaccaaaggaaaagtgtaacacgattctattctctatatgggtctactcaagattttt

SEQ ID NO: 37244 - protein, 162 aa, Arabidopsis thaliana
  peptide (1)..(162): Ceres Seq. ID no. 13489148
  misc_feature (37)..(146): Pfam Name: Auxin responsive protein Pfam Description: Auxin responsive protein
  misc_feature (79)..(145): Homolog of NCBI NO: 15228626 NR Description: auxin-induced (indole-3-acetic acid induced)
  misc_feature (75)..(159): Homolog of NCBI NO: 15226425 NR Description: auxin-induced (indole-3-acetic acid induced)
  misc_feature (72)..(142): Homolog of NCBI NO: 18411465 NR Description: auxin-induced (indole-3-acetic acid induced)
  misc_feature (73)..(162): Homolog of NCBI NO: 38454072 NR Description: At5g53590 [Arabidopsis thaliana]
  misc_feature (73)..(162): Homolog of NCBI NO: 15238779 NR Description: auxin-induced (indole-3-acetic acid induced)
  misc_feature (6)..(151): Homolog of NCBI NO: 38567865 NR Description: OSJNBa0091D06.3 [Oryza sativa (japonica
  misc_feature (1)..(152): Homolog of NCBI NO: 15235723 NR Description: auxin-induced (indole-3-acetic acid induced)
  misc_feature (1)..(152): Homolog of NCBI NO: 15234550 NR Description: auxin-induced (indole-3-acetic acid induced)
  misc_feature (1)..(158): Homolog of NCBI NO: 15232400 NR Description: auxin-induced (indole-3-acetic acid induced)
  misc_feature (1)..(162): Homolog of NCBI NO: 15225432 NR Description: auxin-induced (indole-3-acetic acid induced)
MRKIIGFRIGRRVSRWIFRKTRIQRSGYNRIHSTQQACMLMRPLAKLKSWGQRLKQSFRRRSTRRSAYIPVDHKKADPVPRGHLAIYVGQKDGDCHRVLVPIVYFNHPLFGELLREAEKEYGFCHEGGITIPCLYSDFERVKTRIASGSSSRVFPWGRHCRN

SEQ ID NO: 37245 - protein, 124 aa, Arabidopsis thaliana
  peptide (1)..(124): Ceres Seq. ID no. 13489149
  misc_feature (1)..(108): Pfam Name: Auxin responsive protein Pfam Description: Auxin responsive protein
  misc_feature (41)..(107): Homolog of NCBI NO: 15228626 NR Description: auxin-induced (indole-3-acetic acid induced)
  misc_feature (37)..(121): Homolog of NCBI NO: 15226425 NR Description: auxin-induced (indole-3-acetic acid induced)
  misc_feature (34)..(104): Homolog of NCBI NO: 18411465 NR Description: auxin-induced (indole-3-acetic acid induced)
  misc_feature (35)..(124): Homolog of NCBI NO: 38454072 NR Description: At5g53590 [Arabidopsis thaliana]
  misc_feature (35)..(124): Homolog of NCBI NO: 15238779 NR Description: auxin-induced (indole-3-acetic acid induced)
  misc_feature (1)..(113): Homolog of NCBI NO: 38567865 NR Description: OSJNBa0091D06.3 [Oryza sativa (japonica
  misc_feature (1)..(114): Homolog of NCBI NO: 15235723 NR Description: auxin-induced (indole-3-acetic acid induced)
  misc_feature (1)..(114): Homolog of NCBI NO: 15234550 NR Description: auxin-induced (indole-3-acetic acid induced)
  misc_feature (1)..(120): Homolog of NCBI NO: 15232400 NR Description: auxin-induced (indole-3-acetic acid induced)
  misc_feature (1)..(124): Homolog of NCBI NO: 15225432 NR Description: auxin-induced (indole-3-acetic acid induced)
MLMRPLAKLKSWGQRLKQSFRRRSTRRSAYIPVDHKKADPVPRGHLAIYVGQKDGDCHRVLVPIVYFNHPLFGELLREAEKEYGFCHEGGITIPCLYSDFERVKTRIASGSSSRVFPWGRHCRN

SEQ ID NO: 37246 - protein, 122 aa, Arabidopsis thaliana
  peptide (1)..(122): Ceres Seq. ID no. 13489150
  misc_feature (1)..(106): Pfam Name: Auxin responsive protein Pfam Description: Auxin responsive protein
  misc_feature (39)..(105): Homolog of NCBI NO: 15228626 NR Description: auxin-induced (indole-3-acetic acid induced)
  misc_feature (35)..(119): Homolog of NCBI NO: 15226425 NR Description: auxin-induced (indole-3-acetic acid induced)
  misc_feature (32)..(102): Homolog of NCBI NO: 18411465 NR Description: auxin-induced (indole-3-acetic acid induced)
  misc_feature (33)..(122): Homolog of NCBI NO: 38454072 NR Description: At5g53590 [Arabidopsis thaliana]
  misc_feature (33)..(122): Homolog of NCBI NO: 15238779 NR Description: auxin-induced (indole-3-acetic acid induced)
  misc_feature (1)..(111): Homolog of NCBI NO: 38567865 NR Description: OSJNBa0091D06.3 [Oryza sativa (japonica
  misc_feature (1)..(112): Homolog of NCBI NO: 15235723 NR Description: auxin-induced (indole-3-acetic acid induced)
  misc_feature (1)..(112): Homolog of NCBI NO: 15234550 NR Description: auxin-induced (indole-3-acetic acid induced)
  misc_feature (1)..(118): Homolog of NCBI NO: 15232400 NR Description: auxin-induced (indole-3-acetic acid induced)
  misc_feature (1)..(122): Homolog of NCBI NO: 15225432 NR Description: auxin-induced (indole-3-acetic acid induced)
MRPLAKLKSWGQRLKQSFRRRSTRRSAYIPVDHKKADPVPRGHLAIYVGQKDGDCHRVLVPIVYFNHPLFGELLREAEKEYGFCHEGGITIPCLYSDFERVKTRIASGSSSRVFPWGRHCRN

SEQ ID NO: 37247 - DNA, 913 bp, Arabidopsis thaliana
  misc_feature (1)..(913): Ceres Seq. ID no. 12604865
  misc_feature: MA Experiment ID: 20000184 Result: Down-regulated in Transcription
  misc_feature: MA Experiment 20000184 PARAMETER Experiment Name: At_Shoots__P Parameter: Age (day) Value: 7
  misc_feature: MA Experiment 20000184 PARAMETER Experiment Name: At_Shoots__P Parameter: Tissue Value: Shoots vs. Whole Plant
  misc_feature: MA Experiment ID: 20000573 Result: Down-regulated in Transcription
  misc_feature: MA Experiment 20000573 PARAMETER Experiment Name: At_100uM_ABA_Mutants__P Parameter: Organism Value: A. thaliana
  misc_feature: MA Experiment 20000573 PARAMETER Experiment Name: At_100uM_ABA_Mutants__P Parameter: Plant Line Value: CS22 vs. Ler wt
  misc_feature: MA Experiment 20000573 PARAMETER Experiment Name: At_100uM_ABA_Mutants__P Parameter: Timepoint (hr) Value: N/A
  misc_feature: MA Experiment 20000573 PARAMETER Experiment Name: At_100uM_ABA_Mutants__P Parameter: Tissue Value: Whole Plant
  misc_feature: MA Experiment 20000573 PARAMETER Experiment Name: At_100uM_ABA_Mutants__P Parameter: Treatment Value: None
  misc_feature: MA Experiment ID: 20001451 Result: Down-regulated in Transcription
  misc_feature: MA Experiment 20001451 PARAMETER Experiment Name: At_Far-red-induction_P Parameter: Age (day) Value: 7
  misc_feature: MA Experiment 20001451 PARAMETER Experiment Name: At_Far-red-induction_P Parameter: Light Value: Far-red vs. White
  misc_feature: MA Experiment 20001451 PARAMETER Experiment Name: At_Far-red-induction_P Parameter: Organism Value: A. thaliana
  misc_feature: MA Experiment 20001451 PARAMETER Experiment Name: At_Far-red-induction_P Parameter: Plant Line Value: Columbia
  misc_feature: MA Experiment 20001451 PARAMETER Experiment Name: At_Far-red-induction_P Parameter: Timepoint (hr) Value: 24
  misc_feature: MA Experiment 20001451 PARAMETER Experiment Name: At_Far-red-induction_P Parameter: Tissue Value: Whole Plant
accaaagatcggatttttatcagacggaaaggaggagacggaagaaaatgccggtgagagttgttgagagcaacacgcctgctcaagtttcaggaactgatcctgggaatcgatcaccacttccccctagttcacttctcggcgctggccaggcattttctggtacgcaaaatgtctctaatcaacagaaggaggaagcttggagagtcaacgtccagatacagggtattgaccttgaacatggttatctttgtggcaccatggaagctctaaacgttcccatggcagacactcctgtcataacattctgggaaggggaaatcgttgatggaaagaattataccttttacaccggaaaatgggaagcaacgagggaagatgatatgagacattggtcaaagttcccgtctttttcgcctcttcagggacaagttgaatctgatggtggcaggcaattggatcttaacaattatccttatatatttatgagatggaaagagcaatactttgtaaacgttggcacagattgtggactaacaatagctggattttactacgtatgcttctcctgcagcgatggttccatcagcggtttctattatgatccaaacagcagtccgtttcagaagctggagctgaaaacagttaacgaaggaagatctggtttcagcttttcttcttacgagttgcaatgatgaatgctaccaaaatcatcagacagcgccatatgatactctcgtctaaacatgcgatgcacgtgatccagtacattatgacgtgtcaattattataaattattagtaagatatttttttgcttagctagtagaccagaccaagtaaagaactaaaaatactattttgtcattatggtaccaagctaatagtttatctggaaaaagaacaaattgtcc

SEQ ID NO: 37248 - protein, 230 aa, Arabidopsis thaliana
  peptide (1)..(230): Ceres Seq. ID no. 12604866
  misc_feature (38)..(217): Homolog of NCBI NO: 32406292 NR Description: hypothetical protein [Neurospora crassa]
  misc_feature (16)..(217): Homolog of NCBI NO: 18676842 NR Description: unnamed protein product [Homo sapiens]
  misc_feature (16)..(217): Homolog of NCBI NO: 23111007 NR Description: hypothetical protein MGC3048 [Homo sapiens]
  misc_feature (16)..(217): Homolog of NCBI NO: 34328469 NR Description: RIKEN cDNA 4933439F18 [Mus musculus]
  misc_feature (16)..(217): Homolog of NCBI NO: 12848536 NR Description: unnamed protein product [Mus musculus]
  misc_feature (16)..(217): Homolog of NCBI NO: 34870809 NR Description: similar to RIKEN cDNA 4933439F18 [Rattus
  misc_feature (12)..(218): Homolog of NCBI NO: 40747141 NR Description: hypothetical protein AN1179.2 [Aspergillus
  misc_feature (143)..(230): Homolog of NCBI NO: 34895748 NR Description: P0024G09.20 [Oryza sativa (japonica
  misc_feature (50)..(185): Homolog of NCBI NO: 15224341 NR Description: hypothetical protein; protein id: At2g37680.1
  misc_feature (16)..(230): Homolog of NCBI NO: 29150393 NR Description: unknown protein [Oryza sativa (japonica
QRSDFYQTERRRRKKMPVRVVESNTPAQVSGTDPGNRSPLPPSSLLGAGQAFSGTQNVSNQQKEEAWRVNVQIQGIDLEHGYLCGTMEALNVPMADTPVITFWEGEIVDGKNYTFYTGKWEATREDDMRHWSKFPSFSPLQGQVESDGGRQLDLNNYPYIFMRWKEQYFVNVGTDCGLTIAGFYYVCFSCSDGSISGFYYDPNSSPFQKLELKTVNEGRSGFSFSSYELQ

SEQ ID NO: 37249 - protein, 215 aa, Arabidopsis thaliana
  peptide (1)..(215): Ceres Seq. ID no. 12604867
  misc_feature (23)..(202): Homolog of NCBI NO: 32406292 NR Description: hypothetical protein [Neurospora crassa]
  misc_feature (1)..(202): Homolog of NCBI NO: 18676842 NR Description: unnamed protein product [Homo sapiens]
  misc_feature (1)..(202): Homolog of NCBI NO: 23111007 NR Description: hypothetical protein MGC3048 [Homo sapiens]
  misc_feature (1)..(202): Homolog of NCBI NO: 34328469 NR Description: RIKEN cDNA 4933439F18 [Mus musculus]
  misc_feature (1)..(202): Homolog of NCBI NO: 12848536 NR Description: unnamed protein product [Mus musculus]
  misc_feature (1)..(202): Homolog of NCBI NO: 34870809 NR Description: similar to RIKEN cDNA 4933439F18 [Rattus
  misc_feature (1)..(203): Homolog of NCBI NO: 40747141 NR Description: hypothetical protein AN1179.2 [Aspergillus
  misc_feature (128)..(215): Homolog of NCBI NO: 34895748 NR Description: P0024G09.20 [Oryza sativa (japonica
  misc_feature (35)..(170): Homolog of NCBI NO: 15224341 NR Description: hypothetical protein; protein id: At2g37680.1
  misc_feature (1)..(215): Homolog of NCBI NO: 29150393 NR Description: unknown protein [Oryza sativa (japonica
MPVRVVESNTPAQVSGTDPGNRSPLPPSSLLGAGQAFSGTQNVSNQQKEEAWRVNVQIQGIDLEHGYLCGTMEALNVPMADTPVITFWEGEIVDGKNYTFYTGKWEATREDDMRHWSKFPSFSPLQGQVESDGGRQLDLNNYPYIFMRWKEQYFVNVGTDCGLTIAGFYYVCFSCSDGSISGFYYDPNSSPFQKLELKTVNEGRSGFSFSSYELQ

SEQ ID NO: 37250 - protein, 144 aa, Arabidopsis thaliana
  peptide (1)..(144): Ceres Seq. ID no. 12604868
  misc_feature (1)..(131): Homolog of NCBI NO: 32406292 NR Description: hypothetical protein [Neurospora crassa]
  misc_feature (1)..(131): Homolog of NCBI NO: 18676842 NR Description: unnamed protein product [Homo sapiens]
  misc_feature (1)..(131): Homolog of NCBI NO: 23111007 NR Description: hypothetical protein MGC3048 [Homo sapiens]
  misc_feature (1)..(131): Homolog of NCBI NO: 34328469 NR Description: RIKEN cDNA 4933439F18 [Mus musculus]
  misc_feature (1)..(131): Homolog of NCBI NO: 12848536 NR Description: unnamed protein product [Mus musculus]
  misc_feature (1)..(131): Homolog of NCBI NO: 34870809 NR Description: similar to RIKEN cDNA 4933439F18 [Rattus
  misc_feature (1)..(132): Homolog of NCBI NO: 40747141 NR Description: hypothetical protein AN1179.2 [Aspergillus
  misc_feature (57)..(144): Homolog of NCBI NO: 34895748 NR Description: P0024G09.20 [Oryza sativa (japonica
  misc_feature (1)..(99): Homolog of NCBI NO: 15224341 NR Description: hypothetical protein; protein id: At2g37680.1
  misc_feature (1)..(144): Homolog of NCBI NO: 29150393 NR Description: unknown protein [Oryza sativa (japonica
MEALNVPMADTPVITFWEGEIVDGKNYTFYTGKWEATREDDMRHWSKFPSFSPLQGQVESDGGRQLDLNNYPYIFMRWKEQYFVNVGTDCGLTIAGFYYVCFSCSDGSISGFYYDPNSSPFQKLELKTVNEGRSGFSFSSYELQ

SEQ ID NO: 37251 - DNA, 919 bp, Arabidopsis thaliana
  misc_feature (1)..(919): Ceres Seq. ID no. 12489522
  misc_feature: MA Experiment ID: 20000307 Result: Down-regulated in Transcription
  misc_feature: MA Experiment 20000307 PARAMETER Experiment Name: At_Germinating_Seeds_Sub_P Parameter: Age (hr) Value: 24 vs. 0
  misc_feature: MA Experiment 20000307 PARAMETER Experiment Name: At_Germinating_Seeds_Sub_P Parameter: Organism Value: A. thaliana
  misc_feature: MA Experiment 20000307 PARAMETER Experiment Name: At_Germinating_Seeds_Sub_P Parameter: Plant Line Value: WS
  misc_feature: MA Experiment 20000307 PARAMETER Experiment Name: At_Germinating_Seeds_Sub_P Parameter: Tissue Value: Germinating Seeds
  misc_feature: MA Experiment ID: 20000328 Result: Up-regulated in Transcription
  misc_feature: MA Experiment 20000328 PARAMETER Experiment Name: At_42deg_Heat_Sub_P Parameter: Age (day) Value: 14
  misc_feature: MA Experiment 20000328 PARAMETER Experiment Name: At_42deg_Heat_Sub_P Parameter: Organism Value: A. thaliana
  misc_feature: MA Experiment 20000328 PARAMETER Experiment Name: At_42deg_Heat_Sub_P Parameter: Plant Line Value: WS
  misc_feature: MA Experiment 20000328 PARAMETER Experiment Name: At_42deg_Heat_Sub_P Parameter: Temperature (deg C) Value: 42 vs. 22
  misc_feature: MA Experiment 20000328 PARAMETER Experiment Name: At_42deg_Heat_Sub_P Parameter: Timepoint (hr) Value: 6
  misc_feature: MA Experiment 20000328 PARAMETER Experiment Name: At_42deg_Heat_Sub_P Parameter: Tissue Value: Aerial
acttaaaccctagtctagtcatttctcagactctgacctcactgatctccaatggcgaaaaccctagctcgctccacagcgtcacgcatcaccaagcgcttaatctccacctccggagccaccactccttccccttcttatatcctctcccgtcgatcaaccccggtgttctcccatgccgtcggattcatctcttccttgaatcgtttcacaacgattcgaactcgaatggataggtccggtggatcgtactctcctctaaaatccggttcgaatttcagcgaccgagcacccactgagatggcgccgttgtttcctggctgcgattatgagcattggttgattgtaatggacaaacctggaggcgaaaacgctactaagcagcaaatgattgattgttatgttcaaaccctagctaaaattatcggcagtgaggaagaagctaagaagaagatttataatgtatcgtgtgaaaggtattttggatttggttgtgagattgatgaagagacatcaaacaaacttgaaggacttcctggtgttctcttcattttaccagactcttatgttgatcaagagaacaaagattacggagctgagctgtttgtgaatggagaaatagttcaacgtcctccagagagacagagaaagatcattgagttaacgacccagagaaccaatgataaaccaaagtaccacgacaagaccagatatgtccgaagaagagagaacatgcgttgaatccaaatctgatatcagaccatacagaagttgttgttcaatgttcatgtgtctgcaagcaacagatgttttctgttttgaggtctctctctccttatgtaatggctttgtagtttggattttagaacttggaattggctaaaactattatcattgcatatacataatttggcctttg

SEQ ID NO: 37252 - protein, 229 aa, Arabidopsis thaliana
  peptide (1)..(229): Ceres Seq. ID no. 12489523
  misc_feature (1)..(229): Homolog of NCBI NO: 15230785 NR Description: DAG protein, putative; protein id: At3g06790.1
  misc_feature (1)..(229): Homolog of NCBI NO: 27754695 NR Description: putative DAG protein [Arabidopsis thaliana]
  misc_feature (19)..(227): Homolog of NCBI NO: 38344141 NR Description: OSJNBa0041A02.8 [Oryza sativa (japonica
  misc_feature (8)..(229): Homolog of NCBI NO: 34897972 NR Description: putative plastid protein [Oryza sativa (japonica
  misc_feature (52)..(229): Homolog of NCBI NO: 2440029 NR Description: DAL1 protein [Arabidopsis thaliana]
  misc_feature (52)..(229): Homolog of NCBI NO: 25370552 NR Description: DAG protein homolog [imported] - Arabidopsis
  misc_feature (52)..(229): Homolog of NCBI NO: 21617909 NR Description: plastid protein [Arabidopsis thaliana]
  misc_feature (52)..(229): Homolog of NCBI NO: 15226108 NR Description: plastid protein
  misc_feature (1)..(229): Homolog of NCBI NO: 15226934 NR Description: unknown protein
  misc_feature (1)..(229): Homolog of NCBI NO: 15223247 NR Description: plastid protein, putative
MAKTLARSTASRITKRLISTSGATTPSPSYILSRRSTPVFSHAVGFISSLNRFTTIRTRMDRSGGSYSPLKSGSNFSDRAPTEMAPLFPGCDYEHWLIVMDKPGGENATKQQMIDCYVQTLAKIIGSEEEAKKKIYNVSCERYFGFGCEIDEETSNKLEGLPGVLFILPDSYVDQENKDYGAELFVNGEIVQRPPERQRKIIELTTQRTNDKPKYHDKTRYVRRRENMR

SEQ ID NO: 37253 - protein, 170 aa, Arabidopsis thaliana
  peptide (1)..(170): Ceres Seq. ID no. 12489524
  misc_feature (1)..(170): Homolog of NCBI NO: 15230785 NR Description: DAG protein, putative; protein id: At3g06790.1
  misc_feature (1)..(170): Homolog of NCBI NO: 27754695 NR Description: putative DAG protein [Arabidopsis thaliana]
  misc_feature (1)..(168): Homolog of NCBI NO: 38344141 NR Description: OSJNBa0041A02.8 [Oryza sativa (japonica
  misc_feature (1)..(170): Homolog of NCBI NO: 34897972 NR Description: putative plastid protein [Oryza sativa (japonica
  misc_feature (1)..(170): Homolog of NCBI NO: 2440029 NR Description: DAL1 protein [Arabidopsis thaliana]
  misc_feature (1)..(170): Homolog of NCBI NO: 21617909 NR Description: plastid protein [Arabidopsis thaliana]
  misc_feature (1)..(170): Homolog of NCBI NO: 25370552 NR Description: DAG protein homolog [imported] - Arabidopsis
  misc_feature (1)..(170): Homolog of NCBI NO: 15226108 NR Description: plastid protein
  misc_feature (1)..(170): Homolog of NCBI NO: 15226934 NR Description: unknown protein
  misc_feature (1)..(170): Homolog of NCBI NO: 15223247 NR Description: plastid protein, putative
MDRSGGSYSPLKSGSNFSDRAPTEMAPLFPGCDYEHWLIVMDKPGGENATKQQMIDCYVQTLAKIIGSEEEAKKKIYNVSCERYFGFGCEIDEETSNKLEGLPGVLFILPDSYVDQENKDYGAELFVNGEIVQRPPERQRKIIELTTQRTNDKPKYHDKTRYVRRRENMR

SEQ ID NO: 37254 - protein, 146 aa, Arabidopsis thaliana
  peptide (1)..(146): Ceres Seq. ID no. 12489525
  misc_feature (1)..(146): Homolog of NCBI NO: 15230785 NR Description: DAG protein, putative; protein id: At3g06790.1
  misc_feature (1)..(146): Homolog of NCBI NO: 27754695 NR Description: putative DAG protein [Arabidopsis thaliana]
  misc_feature (1)..(144): Homolog of NCBI NO: 38344141 NR Description: OSJNBa0041A02.8 [Oryza sativa (japonica
  misc_feature (1)..(146): Homolog of NCBI NO: 34897972 NR Description: putative plastid protein [Oryza sativa (japonica
  misc_feature (1)..(146): Homolog of NCBI NO: 2440029 NR Description: DAL1 protein [Arabidopsis thaliana]
  misc_feature (1)..(146): Homolog of NCBI NO: 21617909 NR Description: plastid protein [Arabidopsis thaliana]
  misc_feature (1)..(146): Homolog of NCBI NO: 25370552 NR Description: DAG protein homolog [imported] - Arabidopsis
  misc_feature (1)..(146): Homolog of NCBI NO: 15226108 NR Description: plastid protein
  misc_feature (1)..(146): Homolog of NCBI NO: 15226934 NR Description: unknown protein
  misc_feature (1)..(146): Homolog of NCBI NO: 15223247 NR Description: plastid protein, putative
MAPLFPGCDYEHWLIVMDKPGGENATKQQMIDCYVQTLAKIIGSEEEAKKKIYNVSCERYFGFGCEIDEETSNKLEGLPGVLFILPDSYVDQENKDYGAELFVNGEIVQRPPERQRKIIELTTQRTNDKPKYHDKTRYVRRRENMR

SEQ ID NO: 37255 - DNA, 985 bp, Arabidopsis thaliana
  misc_feature (1)..(985): Ceres Seq. ID no. 12330438
  misc_feature: MA Experiment ID: 108434 Result: Down-regulated in Transcription
  misc_feature: MA Experiment 108434 PARAMETER Experiment Name: At_Root_Tips_cDNA_P Parameter: Tissue Value: Root Tips
  misc_feature: MA Experiment ID: 108435 Result: Down-regulated in Transcription
  misc_feature: MA Experiment 108435 PARAMETER Experiment Name: At_stm_Mutants_cDNA_P Parameter: Plant Line Value: wt Landsburg vs stm
  misc_feature: MA Experiment 108435 PARAMETER Experiment Name: At_stm_Mutants_cDNA_P Parameter: Tissue Value: Shoot Apical Meristem Region
  misc_feature: MA Experiment ID: 108462 Result: Up-regulated in Transcription
  misc_feature: MA Experiment 108462 PARAMETER Experiment Name: At_Germinating_Seeds_cDNA_P Parameter: Age (day) Value: 2 vs. 0
  misc_feature: MA Experiment 108462 PARAMETER Experiment Name: At_Germinating_Seeds_cDNA_P Parameter: Tissue Value: Germinating Seeds
  misc_feature: MA Experiment ID: 108463 Result: Up-regulated in Transcription
  misc_feature: MA Experiment 108463 PARAMETER Experiment Name: At_Germinating_Seeds_cDNA_P Parameter: Age (day) Value: 3 vs. 0
  misc_feature: MA Experiment 108463 PARAMETER Experiment Name: At_Germinating_Seeds_cDNA_P Parameter: Tissue Value: Germinating Seeds
  misc_feature: MA Experiment ID: 108464 Result: Up-regulated in Transcription
  misc_feature: MA Experiment 108464 PARAMETER Experiment Name: At_Germinating_Seeds_cDNA_P Parameter: Age (day) Value: 4 vs. 0
  misc_feature: MA Experiment 108464 PARAMETER Experiment Name: At_Germinating_Seeds_cDNA_P Parameter: Tissue Value: Germinating Seeds
  misc_feature: MA Experiment ID: 108561 Result: Up-regulated in Transcription
  misc_feature: MA Experiment 108561 PARAMETER Experiment Name: At_100uM_ABA_cDNA_P Parameter: Timepoint (hr) Value: 6
  misc_feature: MA Experiment 108561 PARAMETER Experiment Name: At_100uM_ABA_cDNA_P Parameter: Tissue Value: Aerial
  misc_feature: MA Experiment 108561 PARAMETER Experiment Name: At_100uM_ABA_cDNA_P Parameter: Treatment Value: 100uM ABA vs. No Treatment
  misc_feature: MA Experiment ID: 108572 Result: Down-regulated in Transcription
  misc_feature: MA Experiment 108572 PARAMETER Experiment Name: At_Drought_cDNA_P Parameter: Timepoint (hr) Value: 1
  misc_feature: MA Experiment 108572 PARAMETER Experiment Name: At_Drought_cDNA_P Parameter: Tissue Value: Aerial
  misc_feature: MA Experiment 108572 PARAMETER Experiment Name: At_Drought_cDNA_P Parameter: Treatment Value: Drought vs. No Drought
  misc_feature: MA Experiment ID: 108573 Result: Up-regulated in Transcription
  misc_feature: MA Experiment 108573 PARAMETER Experiment Name: At_Drought_cDNA_P Parameter: Timepoint (hr) Value: 6
  misc_feature: MA Experiment 108573 PARAMETER Experiment Name: At_Drought_cDNA_P Parameter: Tissue Value: Aerial
  misc_feature: MA Experiment 108573 PARAMETER Experiment Name: At_Drought_cDNA_P Parameter: Treatment Value: Drought vs. No Drought
  misc_feature: MA Experiment ID: 108607 Result: Up-regulated in Transcription
  misc_feature: MA Experiment 108607 PARAMETER Experiment Name: At_100uM_ABA_cDNA_P Parameter: Timepoint (hr) Value: 4
  misc_feature: MA Experiment 108607 PARAMETER Experiment Name: At_100uM_ABA_cDNA_P Parameter: Tissue Value: Aerial
  misc_feature: MA Experiment 108607 PARAMETER Experiment Name: At_100uM_ABA_cDNA_P Parameter: Treatment Value: 100uM ABA vs. No Treatment
  misc_feature: MA Experiment ID: 108609 Result: Up-regulated in Transcription
  misc_feature: MA Experiment 108609 PARAMETER Experiment Name: At_100uM_ABA_cDNA_P Parameter: Timepoint (hr) Value: 24
  misc_feature: MA Experiment 108609 PARAMETER Experiment Name: At_100uM_ABA_cDNA_P Parameter: Tissue Value: Aerial
  misc_feature: MA Experiment 108609 PARAMETER Experiment Name: At_100uM_ABA_cDNA_P Parameter: Treatment Value: 100uM ABA vs. No Treatment
  misc_feature: MA Experiment ID: 20000069 Result: Up-regulated in Transcription
  misc_feature: MA Experiment 20000069 PARAMETER Experiment Name: At_100uM_ABA_Mutants_cDNA_P Parameter: Plant Line Value: CS23
  misc_feature: MA Experiment 20000069 PARAMETER Experiment Name: At_100uM_ABA_Mutants_cDNA_P Parameter: Timepoint (hr) Value: 6
  misc_feature: MA Experiment 20000069 PARAMETER Experiment Name: At_100uM_ABA_Mutants_cDNA_P Parameter: Tissue Value: Aerial
  misc_feature: MA Experiment 20000069 PARAMETER Experiment Name: At_100uM_ABA_Mutants_cDNA_P Parameter: Treatment Value: 100uM ABA vs. No Treatment
  misc_feature: MA Experiment ID: 20000070 Result: Up-regulated in Transcription
  misc_feature: MA Experiment 20000070 PARAMETER Experiment Name: At_100uM_ABA_Mutants_cDNA_P Parameter: Plant Line Value: CS24
  misc_feature: MA Experiment 20000070 PARAMETER Experiment Name: At_100uM_ABA_Mutants_cDNA_P Parameter: Timepoint (hr) Value: 6
  misc_feature: MA Experiment 20000070 PARAMETER Experiment Name: At_100uM_ABA_Mutants_cDNA_P Parameter: Tissue Value: Aerial
  misc_feature: MA Experiment 20000070 PARAMETER Experiment Name: At_100uM_ABA_Mutants_cDNA_P Parameter: Treatment Value: 100uM ABA vs. No Treatment
  misc_feature: MA Experiment ID: 20000071 Result: Up-regulated in Transcription
  misc_feature: MA Experiment 20000071 PARAMETER Experiment Name: At_100uM_ABA_Mutants_cDNA_P Parameter: Plant Line Value: CS8104
  misc_feature: MA Experiment 20000071 PARAMETER Experiment Name: At_100uM_ABA_Mutants_cDNA_P Parameter: Timepoint (hr) Value: 6
  misc_feature: MA Experiment 20000071 PARAMETER Experiment Name: At_100uM_ABA_Mutants_cDNA_P Parameter: Tissue Value: Aerial
  misc_feature: MA Experiment 20000071 PARAMETER Experiment Name: At_100uM_ABA_Mutants_cDNA_P Parameter: Treatment Value: 100uM ABA vs. No Treatment
  misc_feature: MA Experiment ID: 20000072 Result: Up-regulated in Transcription
  misc_feature: MA Experiment 20000072 PARAMETER Experiment Name: At_100uM_ABA_Mutants_cDNA_P Parameter: Plant Line Value: CS8105
  misc_feature: MA Experiment 20000072 PARAMETER Experiment Name: At_100uM_ABA_Mutants_cDNA_P Parameter: Timepoint (hr) Value: 6
  misc_feature: MA Experiment 20000072 PARAMETER Experiment Name: At_100uM_ABA_Mutants_cDNA_P Parameter: Tissue Value: Aerial
  misc_feature: MA Experiment 20000072 PARAMETER Experiment Name: At_100uM_ABA_Mutants_cDNA_P Parameter: Treatment Value: 100uM ABA vs. No Treatment
  misc_feature: MA Experiment ID: 20000087 Result: Up-regulated in Transcription
  misc_feature: MA Experiment 20000087 PARAMETER Experiment Name: At_100uM_ABA_Mutants_cDNA_P Parameter: Plant Line Value: WS
  misc_feature: MA Experiment 20000087 PARAMETER Experiment Name: At_100uM_ABA_Mutants_cDNA_P Parameter: Timepoint (hr) Value: 6
  misc_feature: MA Experiment 20000087 PARAMETER Experiment Name: At_100uM_ABA_Mutants_cDNA_P Parameter: Tissue Value: Aerial
  misc_feature: MA Experiment 20000087 PARAMETER Experiment Name: At_100uM_ABA_Mutants_cDNA_P Parameter: Treatment Value: 100uM ABA vs. No Treatment
  misc_feature: MA Experiment ID: 20000088 Result: Up-regulated in Transcription
  misc_feature: MA Experiment 20000088 PARAMETER Experiment Name: At_100uM_ABA_Mutants_cDNA_P Parameter: Plant Line Value: Landsberg
  misc_feature: MA Experiment 20000088 PARAMETER Experiment Name: At_100uM_ABA_Mutants_cDNA_P Parameter: Timepoint (hr) Value: 6
  misc_feature: MA Experiment 20000088 PARAMETER Experiment Name: At_100uM_ABA_Mutants_cDNA_P Parameter: Tissue Value: Aerial
  misc_feature: MA Experiment 20000088 PARAMETER Experiment Name: At_100uM_ABA_Mutants_cDNA_P Parameter: Treatment Value: 100uM ABA vs. No Treatment
  misc_feature: MA Experiment ID: 20000112 Result: Up-regulated in Transcription
  misc_feature: MA Experiment 20000112 PARAMETER Experiment Name: At_42deg_Heat_cDNA_P Parameter: Temperature (deg C) Value: 42 vs. 22
  misc_feature: MA Experiment 20000112 PARAMETER Experiment Name: At_42deg_Heat_cDNA_P Parameter: Timepoint (hr) Value: 2
  misc_feature: MA Experiment 20000112 PARAMETER Experiment Name: At_42deg_Heat_cDNA_P Parameter: Tissue Value: Aerial
  misc_feature: MA Experiment ID: 20000117 Result: Up-regulated in Transcription
  misc_feature: MA Experiment 20000117 PARAMETER Experiment Name: At_100uM_ABA_Mutants_cDNA_P Parameter: Plant Line Value: Columbia
  misc_feature: MA Experiment 20000117 PARAMETER Experiment Name: At_100uM_ABA_Mutants_cDNA_P Parameter: Timepoint (hr) Value: 6
  misc_feature: MA Experiment 20000117 PARAMETER Experiment Name: At_100uM_ABA_Mutants_cDNA_P Parameter: Tissue Value: Aerial
  misc_feature: MA Experiment 20000117 PARAMETER Experiment Name: At_100uM_ABA_Mutants_cDNA_P Parameter: Treatment Value: 100uM ABA vs. No Treatment
  misc_feature: MA Experiment ID: 20000179 Result: Up-regulated in Transcription
  misc_feature: MA Experiment 20000179 PARAMETER Experiment Name: At_Germinating_Seeds_P Parameter: Age (hr) Value: 6 vs. 0
  misc_feature: MA Experiment 20000179 PARAMETER Experiment Name: At_Germinating_Seeds_P Parameter: Tissue Value: Germinating Seeds
  misc_feature: MA Experiment ID: 20000185 Result: Up-regulated in Transcription
  misc_feature: MA Experiment 20000185 PARAMETER Experiment Name: At_Roots__P Parameter: Age (day) Value: 7 vs. 21
  misc_feature: MA Experiment 20000185 PARAMETER Experiment Name: At_Roots__P Parameter: Organism Value: A. thaliana
  misc_feature: MA Experiment 20000185 PARAMETER Experiment Name: At_Roots__P Parameter: Tissue Value: Roots vs. Whole Plant
  misc_feature: MA Experiment ID: 20000265 Result: Down-regulated in Transcription
  misc_feature: MA Experiment 20000265 PARAMETER Experiment Name: At_Open_Flower_P Parameter: Age (day) Value: 21
  misc_feature: MA Experiment 20000265 PARAMETER Experiment Name: At_Open_Flower_P Parameter: Plant Line Value: WS
  misc_feature: MA Experiment 20000265 PARAMETER Experiment Name: At_Open_Flower_P Parameter: Tissue Value: Closed Flower vs. Whole Plant
  misc_feature: MA Experiment ID: 20000439 Result: Up-regulated in Transcription
  misc_feature: MA Experiment 20000439 PARAMETER Experiment Name: At_Roots__P Parameter: Age (day) Value: 14 vs. 21
  misc_feature: MA Experiment 20000439 PARAMETER Experiment Name: At_Roots__P Parameter: Organism Value: A. thaliana
  misc_feature: MA Experiment 20000439 PARAMETER Experiment Name: At_Roots__P Parameter: Tissue Value: Roots vs. Whole Plant
  misc_feature: MA Experiment ID: 20000441 Result: Up-regulated in Transcription
  misc_feature: MA Experiment 20000441 PARAMETER Experiment Name: At_1uM_BR-BRZ__P Parameter: Tissue Value: Shoot Apices
  misc_feature: MA Experiment 20000441 PARAMETER Experiment Name: At_1uM_BR-BRZ__P Parameter: Treatment Value: 1uM BR vs. No Treatment
  misc_feature: MA Experiment ID: 20000443 Result: Up-regulated in Transcription
  misc_feature: MA Experiment 20000443 PARAMETER Experiment Name: At_1uM_BR-BRZ__P Parameter: Tissue Value: Shoot Apices
  misc_feature: MA Experiment 20000443 PARAMETER Experiment Name: At_1uM_BR-BRZ__P Parameter: Treatment Value: 1uM BRZ vs. No Treatment
  misc_feature: MA Experiment ID: 20000451 Result: Up-regulated in Transcription
  misc_feature: MA Experiment 20000451 PARAMETER Experiment Name: At_CS6879_Shoots-Roots_P Parameter: Age (day) Value: 14
  misc_feature: MA Experiment 20000451 PARAMETER Experiment Name: At_CS6879_Shoots-Roots_P Parameter: Organism Value: A. thaliana
  misc_feature: MA Experiment 20000451 PARAMETER Experiment Name: At_CS6879_Shoots-Roots_P Parameter: Plant Line Value: CS6879 vs. WS
  misc_feature: MA Experiment 20000451 PARAMETER Experiment Name: At_CS6879_Shoots-Roots_P Parameter: Tissue Value: Roots
  misc_feature: MA Experiment ID: 20001248 Result: Down-regulated in Transcription
  misc_feature: MA Experiment 20001248 PARAMETER Experiment Name: At_Far-red-induction_P Parameter: Age (day) Value: 7
  misc_feature: MA Experiment 20001248 PARAMETER Experiment Name: At_Far-red-induction_P Parameter: Light Value: Far-red vs. White
  misc_feature: MA Experiment 20001248 PARAMETER Experiment Name: At_Far-red-induction_P Parameter: Organism Value: A. thaliana
  misc_feature: MA Experiment 20001248 PARAMETER Experiment Name: At_Far-red-induction_P Parameter: Plant Line Value: Columbia
  misc_feature: MA Experiment 20001248 PARAMETER Experiment Name: At_Far-red-induction_P Parameter: Timepoint (hr) Value: 4
  misc_feature: MA Experiment 20001248 PARAMETER Experiment Name: At_Far-red-induction_P Parameter: Tissue Value: Whole Plant
  misc_feature: MA Experiment ID: 20001450 Result: Down-regulated in Transcription
  misc_feature: MA Experiment 20001450 PARAMETER Experiment Name: At_Far-red-induction_P Parameter: Age (day) Value: 7
  misc_feature: MA Experiment 20001450 PARAMETER Experiment Name: At_Far-red-induction_P Parameter: Light Value: Far-red vs. White
  misc_feature: MA Experiment 20001450 PARAMETER Experiment Name: At_Far-red-induction_P Parameter: Organism Value: A. thaliana
  misc_feature: MA Experiment 20001450 PARAMETER Experiment Name: At_Far-red-induction_P Parameter: Plant Line Value: Columbia
  misc_feature: MA Experiment 20001450 PARAMETER Experiment Name: At_Far-red-induction_P Parameter: Timepoint (hr) Value: 8
  misc_feature: MA Experiment 20001450 PARAMETER Experiment Name: At_Far-red-induction_P Parameter: Tissue Value: Whole Plant
  misc_feature: MA Experiment ID: 20001557 Result: Up-regulated in Transcription
  misc_feature: MA Experiment 20001557 PARAMETER Experiment Name: At_Drought_Soil_Dry_P Parameter: Age (day) Value: 27
  misc_feature: MA Experiment 20001557 PARAMETER Experiment Name: At_Drought_Soil_Dry_P Parameter: Organism Value: A. thaliana
  misc_feature: MA Experiment 20001557 PARAMETER Experiment Name: At_Drought_Soil_Dry_P Parameter: Plant Line Value: WS
  misc_feature: MA Experiment 20001557 PARAMETER Experiment Name: At_Drought_Soil_Dry_P Parameter: Post Timepoint (hr) Value: 3
  misc_feature: MA Experiment 20001557 PARAMETER Experiment Name: At_Drought_Soil_Dry_P Parameter: Post-Treatment Value: Re-Water vs. No Drought
  misc_feature: MA Experiment 20001557 PARAMETER Experiment Name: At_Drought_Soil_Dry_P Parameter: Timepoint (day) Value: 13
  misc_feature: MA Experiment 20001557 PARAMETER Experiment Name: At_Drought_Soil_Dry_P Parameter: Treatment Value: Drought vs. No Drought
  misc_feature: MA Experiment ID: 20001905 Result: Up-regulated in Transcription
  misc_feature: MA Experiment 20001905 PARAMETER Experiment Name: At_Drought_Reproduction_P Parameter: Age (day) Value: 40
  misc_feature: MA Experiment 20001905 PARAMETER Experiment Name: At_Drought_Reproduction_P Parameter: Organism Value: A. thaliana
  misc_feature: MA Experiment 20001905 PARAMETER Experiment Name: At_Drought_Reproduction_P Parameter: Plant Line Value: WS
  misc_feature: MA Experiment 20001905 PARAMETER Experiment Name: At_Drought_Reproduction_P Parameter: Timepoint (day) Value: 10
  misc_feature: MA Experiment 20001905 PARAMETER Experiment Name: At_Drought_Reproduction_P Parameter: Tissue Value: Rosettes
  misc_feature: MA Experiment 20001905 PARAMETER Experiment Name: At_Drought_Reproduction_P Parameter: Treatment Value: Drought vs. No Drought
  misc_feature: MA Experiment ID: 20001906 Result: Up-regulated in Transcription
  misc_feature: MA Experiment 20001906 PARAMETER Experiment Name: At_Drought_Reproduction_P Parameter: Age (day) Value: 35
  misc_feature: MA Experiment 20001906 PARAMETER Experiment Name: At_Drought_Reproduction_P Parameter: Organism Value: A. thaliana
  misc_feature: MA Experiment 20001906 PARAMETER Experiment Name: At_Drought_Reproduction_P Parameter: Plant Line Value: WS
  misc_feature: MA Experiment 20001906 PARAMETER Experiment Name: At_Drought_Reproduction_P Parameter: Timepoint (day) Value: 5
  misc_feature: MA Experiment 20001906 PARAMETER Experiment Name: At_Drought_Reproduction_P Parameter: Tissue Value: Siliques
  misc_feature: MA Experiment 20001906 PARAMETER Experiment Name: At_Drought_Reproduction_P Parameter: Treatment Value: Drought vs. No Drought
  misc_feature: MA Experiment ID: 20001911 Result: Up-regulated in Transcription
  misc_feature: MA Experiment 20001911 PARAMETER Experiment Name: At_Drought_Reproduction_P Parameter: Age (day) Value: 40
  misc_feature: MA Experiment 20001911 PARAMETER Experiment Name: At_Drought_Reproduction_P Parameter: Organism Value: A. thaliana
  misc_feature: MA Experiment 20001911 PARAMETER Experiment Name: At_Drought_Reproduction_P Parameter: Plant Line Value: WS
  misc_feature: MA Experiment 20001911 PARAMETER Experiment Name: At_Drought_Reproduction_P Parameter: Timepoint (day) Value: 10
  misc_feature: MA Experiment 20001911 PARAMETER Experiment Name: At_Drought_Reproduction_P Parameter: Tissue Value: Flowers
  misc_feature: MA Experiment 20001911 PARAMETER Experiment Name: At_Drought_Reproduction_P Parameter: Treatment Value: Drought vs. No Drought
aaagccctaaaaatcagagattccattttctcttatctctctctctctctttctctttttccgattctgattctattttttcttcaccaaccacacaaaacaattctacgtttgatctcttcttctttctccgtccaaattaatctctacgtttaatttctcttgttcaatcatgggacacgaaacaatgacgccggcaacaacaacgctcgtgttcacgtacggaactctaaagagaggattctcaaatcatgtcctgatgcaagatctgatccgatctggtgacgcttctttcaaaggtgtttaccaaactctagacaaatatcctctcgtctgtggaccttaccgagtccctttcctcctcaacaaacctggatcgggctatcacgtcaacggcgagctttacgcggtttctcctcgcggtctctctcgtctcgacgagctcgaaggaatcagtcgcggtcattacatccggcaaccgatacgtctcgcggcggcggaggaagaagaagaagaagaaggagatctggaaacagaggcgccgtcgtcgtgcgtggtggaggcgtattacgctcataagagttatgaggaagagctgtggaggaggaatagaggaagatcattcggcgcgtacacggaaaacgaagcgcgtggatatgtgaaacgcaatgataggcctcagcatcttagcttcttggatcatatccgtattttcgtatcttctccatgtgattgatttttatttctttcgtggtctctcccgctcgtcgcttttctatgtttgtttgtttttttctcgggacaaaagaaacaaaaaaaaaaacacaaacacaaactagttttacaacttgtaagggtcccaccagtccgtccgtccgtcgtctccgtatcgatttgattagagagattgttgggtgtaaaacttatgattcccatcttaaataagttttaggttgtttttgagtttatggttaattttccagtt

SEQ ID NO: 37256 - protein, 187 aa, Arabidopsis thaliana
  peptide (1)..(187): Ceres Seq. ID no. 12330439
  misc_feature (21)..(136): Pfam Name: Uncharacterised protein family (UPF0131) Pfam Description: Uncharacterised protein family (UPF0131)
  misc_feature (14)..(112): Homolog of NCBI NO: 34876150 NR Description: similar to cDNA sequence BC006662 [Rattus
  misc_feature (14)..(112): Homolog of NCBI NO: 28573638 NR Description: CG2811-PA [Drosophila melanogaster]
  misc_feature (14)..(120): Homolog of NCBI NO: 11387365 NR Description: Hypothetical protein CG2811
  misc_feature (13)..(143): Homolog of NCBI NO: 33875960 NR Description: LOC87769 protein [Homo sapiens]
  misc_feature (9)..(143): Homolog of NCBI NO: 13279332 NR Description: Unknown (protein for IMAGE:2822295) [Homo sapiens]
  misc_feature (6)..(187): Homolog of NCBI NO: 15237492 NR Description: unknown protein; protein id: At5g46720.1
  misc_feature (9)..(184): Homolog of NCBI NO: 29126342 NR Description: unknown protein [Oryza sativa (japonica
  misc_feature (6)..(187): Homolog of NCBI NO: 11387354 NR Description: Hypothetical protein At3g02910
  misc_feature (1)..(187): Homolog of NCBI NO: 21555032 NR Description: unknown [Arabidopsis thaliana]
  misc_feature (1)..(187): Homolog of NCBI NO: 18396380 NR Description: expressed protein
MGHETMTPATTTLVFTYGTLKRGFSNHVLMQDLIRSGDASFKGVYQTLDKYPLVCGPYRVPFLLNKPGSGYHVNGELYAVSPRGLSRLDELEGISRGHYIRQPIRLAAAEEEEEEEGDLETEAPSSCVVEAYYAHKSYEEELWRRNRGRSFGAYTENEARGYVKRNDRPQHLSFLDHIRIFVSSPCD

SEQ ID NO: 37257 - protein, 182 aa, Arabidopsis thaliana
  peptide (1)..(182): Ceres Seq. ID no. 12330440
  misc_feature (16)..(131): Pfam Name: Uncharacterised protein family (UPF0131) Pfam Description: Uncharacterised protein family (UPF0131)
  misc_feature (9)..(107): Homolog of NCBI NO: 34876150 NR Description: similar to cDNA sequence BC006662 [Rattus
  misc_feature (9)..(107): Homolog of NCBI NO: 28573638 NR Description: CG2811-PA [Drosophila melanogaster]
  misc_feature (9)..(115): Homolog of NCBI NO: 11387365 NR Description: Hypothetical protein CG2811
  misc_feature (8)..(138): Homolog of NCBI NO: 33875960 NR Description: LOC87769 protein [Homo sapiens]
  misc_feature (4)..(138): Homolog of NCBI NO: 13279332 NR Description: Unknown (protein for IMAGE:2822295) [Homo sapiens]
  misc_feature (1)..(182): Homolog of NCBI NO: 15237492 NR Description: unknown protein; protein id: At5g46720.1
  misc_feature (4)..(179): Homolog of NCBI NO: 29126342 NR Description: unknown protein [Oryza sativa (japonica
  misc_feature (1)..(182): Homolog of NCBI NO: 11387354 NR Description: Hypothetical protein At3g02910
  misc_feature (1)..(182): Homolog of NCBI NO: 21555032 NR Description: unknown [Arabidopsis thaliana]
  misc_feature (1)..(182): Homolog of NCBI NO: 18396380 NR Description: expressed protein
MTPATTTLVFTYGTLKRGFSNHVLMQDLIRSGDASFKGVYQTLDKYPLVCGPYRVPFLLNKPGSGYHVNGELYAVSPRGLSRLDELEGISRGHYIRQPIRLAAAEEEEEEEGDLETEAPSSCVVEAYYAHKSYEEELWRRNRGRSFGAYTENEARGYVKRNDRPQHLSFLDHIRIFVSSPCD

SEQ ID NO: 37258 - protein, 158 aa, Arabidopsis thaliana
  peptide (1)..(158): Ceres Seq. ID no. 12330441
  misc_feature (1)..(107): Pfam Name: Uncharacterised protein family (UPF0131) Pfam Description: Uncharacterised protein family (UPF0131)
  misc_feature (1)..(83): Homolog of NCBI NO: 34876150 NR Description: similar to cDNA sequence BC006662 [Rattus
  misc_feature (1)..(83): Homolog of NCBI NO: 28573638 NR Description: CG2811-PA [Drosophila melanogaster]
  misc_feature (1)..(91): Homolog of NCBI NO: 11387365 NR Description: Hypothetical protein CG2811
  misc_feature (1)..(114): Homolog of NCBI NO: 33875960 NR Description: LOC87769 protein [Homo sapiens]
  misc_feature (1)..(114): Homolog of NCBI NO: 13279332 NR Description: Unknown (protein for IMAGE:2822295) [Homo sapiens]
  misc_feature (1)..(158): Homolog of NCBI NO: 15237492 NR Description: unknown protein; protein id: At5g46720.1
  misc_feature (1)..(155): Homolog of NCBI NO: 29126342 NR Description: unknown protein [Oryza sativa (japonica
  misc_feature (1)..(158): Homolog of NCBI NO: 11387354 NR Description: Hypothetical protein At3g02910
  misc_feature (1)..(158): Homolog of NCBI NO: 21555032 NR Description: unknown [Arabidopsis thaliana]
  misc_feature (1)..(158): Homolog of NCBI NO: 18396380 NR Description: expressed protein
MQDLIRSGDASFKGVYQTLDKYPLVCGPYRVPFLLNKPGSGYHVNGELYAVSPRGLSRLDELEGISRGHYIRQPIRLAAAEEEEEEEGDLETEAPSSCVVEAYYAHKSYEEELWRRNRGRSFGAYTENEARGYVKRNDRPQHLSFLDHIRIFVSSPCD

SEQ ID NO: 37259 - DNA, 2127 bp, Arabidopsis thaliana; identical to SEQ ID NO: 35399
  misc_feature (1)..(2127): Ceres Seq. ID no. 13576329
  misc_feature: MA Experiment ID: 108434 Result: Up-regulated in Transcription
  misc_feature: MA Experiment 108434 PARAMETER Experiment Name: At_Root_Tips_cDNA_P Parameter: Tissue Value: Root Tips

SEQ ID NO: 37260 - protein, 614 aa, Arabidopsis thaliana; identical to SEQ ID NO: 35400
  peptide (1)..(614): Ceres Seq. ID no. 13576330
  misc_feature (69)..(417): Pfam Name: Glycosyl hydrolases family 28 Pfam Description: Glycosyl hydrolases family 28
  misc_feature (69)..(417): Pfam Name: Glycosyl hydrolases family 28 Pfam Description: Glycosyl hydrolases family 28
  misc_feature (35)..(319): Homolog of NCBI NO: 15238207 NR Description: polygalacturonase, putative [Arabidopsis
  misc_feature (45)..(389): Homolog of NCBI NO: 36958630 NR Description: possible polygalacturonase [Rhizobium sp. NGR234]
  misc_feature (501)..(604): Homolog of NCBI NO: 9858777 NR Description: BAC19.9 [Lycopersicon esculentum]
  misc_feature (39)..(406): Homolog of NCBI NO: 17938249 NR Description: polygalacturonase
  misc_feature (39)..(406): Homolog of NCBI NO: 15890426 NR Description: AGR_L_619p [Agrobacterium tumefaciens]
  misc_feature (35)..(319): Homolog of NCBI NO: 15238207 NR Description: polygalacturonase, putative [Arabidopsis
  misc_feature (501)..(604): Homolog of NCBI NO: 9858777 NR Description: BAC19.9 [Lycopersicon esculentum]
  misc_feature (39)..(406): Homolog of NCBI NO: 15890426 NR Description: AGR_L_619p [Agrobacterium tumefaciens]
  misc_feature (1)..(481): Homolog of NCBI NO: 18410809 NR Description: polygalacturonase, putative [Arabidopsis thaliana]
  misc_feature (1)..(309): Homolog of NCBI NO: 17473561 NR Description: putative protein [Arabidopsis thaliana]
  misc_feature (2)..(193): Homolog of NCBI NO: 24417492 NR Description: unknown [Arabidopsis thaliana]
  misc_feature (501)..(614): Homolog of NCBI NO: 18410807 NR Description: expressed protein [Arabidopsis thaliana]
  misc_feature (501)..(613): Homolog of NCBI NO: 15227917 NR Description: expressed protein [Arabidopsis thaliana]
  misc_feature (39)..(406): Homolog of NCBI NO: 17938249 NR Description: polygalacturonase
  misc_feature (45)..(389): Homolog of NCBI NO: 36958630 NR Description: possible polygalacturonase [Rhizobium sp. NGR234]
  misc_feature (501)..(613): Homolog of NCBI NO: 15227917 NR Description: expressed protein [Arabidopsis thaliana]
  misc_feature (501)..(614): Homolog of NCBI NO: 18410807 NR Description: expressed protein [Arabidopsis thaliana]
  misc_feature (2)..(193): Homolog of NCBI NO: 24417492 NR Description: unknown [Arabidopsis thaliana]
  misc_feature (1)..(309): Homolog of NCBI NO: 17473561 NR Description: putative protein [Arabidopsis thaliana]
  misc_feature (1)..(481): Homolog of NCBI NO: 18410809 NR Description: polygalacturonase, putative [Arabidopsis thaliana]

SEQ ID NO: 37261 - protein, 613 aa, Arabidopsis thaliana; identical to SEQ ID NO: 35401
  peptide (1)..(613): Ceres Seq. ID no. 13576331
  misc_feature (68)..(416): Pfam Name: Glycosyl hydrolases family 28 Pfam Description: Glycosyl hydrolases family 28
  misc_feature (68)..(416): Pfam Name: Glycosyl hydrolases family 28 Pfam Description: Glycosyl hydrolases family 28
  misc_feature (34)..(318): Homolog of NCBI NO: 15238207 NR Description: polygalacturonase, putative [Arabidopsis
  misc_feature (44)..(388): Homolog of NCBI NO: 36958630 NR Description: possible polygalacturonase [Rhizobium sp. NGR234]
  misc_feature (500)..(603): Homolog of NCBI NO: 9858777 NR Description: BAC19.9 [Lycopersicon esculentum]
  misc_feature (38)..(405): Homolog of NCBI NO: 17938249 NR Description: polygalacturonase
  misc_feature (38)..(405): Homolog of NCBI NO: 15890426 NR Description: AGR_L_619p [Agrobacterium tumefaciens]
  misc_feature (34)..(318): Homolog of NCBI NO: 15238207 NR Description: polygalacturonase, putative [Arabidopsis
  misc_feature (500)..(603): Homolog of NCBI NO: 9858777 NR Description: BAC19.9 [Lycopersicon esculentum]
  misc_feature (38)..(405): Homolog of NCBI NO: 15890426 NR Description: AGR_L_619p [Agrobacterium tumefaciens]
  misc_feature (1)..(480): Homolog of NCBI NO: 18410809 NR Description: polygalacturonase, putative [Arabidopsis thaliana]
  misc_feature (1)..(308): Homolog of NCBI NO: 17473561 NR Description: putative protein [Arabidopsis thaliana]
  misc_feature (1)..(192): Homolog of NCBI NO: 24417492 NR Description: unknown [Arabidopsis thaliana]
  misc_feature (500)..(613): Homolog of NCBI NO: 18410807 NR Description: expressed protein [Arabidopsis thaliana]
  misc_feature (500)..(612): Homolog of NCBI NO: 15227917 NR Description: expressed protein [Arabidopsis thaliana]
  misc_feature (38)..(405): Homolog of NCBI NO: 17938249 NR Description: polygalacturonase
  misc_feature (44)..(388): Homolog of NCBI NO: 36958630 NR Description: possible polygalacturonase [Rhizobium sp. NGR234]
  misc_feature (500)..(612): Homolog of NCBI NO: 15227917 NR Description: expressed protein [Arabidopsis thaliana]
  misc_feature (500)..(613): Homolog of NCBI NO: 18410807 NR Description: expressed protein [Arabidopsis thaliana]
  misc_feature (1)..(192): Homolog of NCBI NO: 24417492 NR Description: unknown [Arabidopsis thaliana]
  misc_feature (1)..(308): Homolog of NCBI NO: 17473561 NR Description: putative protein [Arabidopsis thaliana]
  misc_feature (1)..(480): Homolog of NCBI NO: 18410809 NR Description: polygalacturonase, putative [Arabidopsis thaliana]

SEQ ID NO: 37262 - protein, 458 aa, Arabidopsis thaliana; identical to SEQ ID NO: 35402
  peptide (1)..(458): Ceres Seq. ID no. 13576332
  misc_feature (1)..(261): Pfam Name: Glycosyl hydrolases family 28 Pfam Description: Glycosyl hydrolases family 28
  misc_feature (1)..(261): Pfam Name: Glycosyl hydrolases family 28 Pfam Description: Glycosyl hydrolases family 28
  misc_feature (1)..(163): Homolog of NCBI NO: 15238207 NR Description: polygalacturonase, putative [Arabidopsis
  misc_feature (1)..(233): Homolog of NCBI NO: 36958630 NR Description: possible polygalacturonase [Rhizobium sp. NGR234]
  misc_feature (345)..(448): Homolog of NCBI NO: 9858777 NR Description: BAC19.9 [Lycopersicon esculentum]
  misc_feature (1)..(250): Homolog of NCBI NO: 17938249 NR Description: polygalacturonase
  misc_feature (1)..(250): Homolog of NCBI NO: 15890426 NR Description: AGR_L_619p [Agrobacterium tumefaciens]
  misc_feature (1)..(163): Homolog of NCBI NO: 15238207 NR Description: polygalacturonase, putative [Arabidopsis
  misc_feature (345)..(448): Homolog of NCBI NO: 9858777 NR Description: BAC19.9 [Lycopersicon esculentum]
  misc_feature (1)..(250): Homolog of NCBI NO: 15890426 NR Description: AGR_L_619p [Agrobacterium tumefaciens]
  misc_feature (1)..(325): Homolog of NCBI NO: 18410809 NR Description: polygalacturonase, putative [Arabidopsis thaliana]
  misc_feature (1)..(153): Homolog of NCBI NO: 17473561 NR Description: putative protein [Arabidopsis thaliana]
  misc_feature (1)..(37): Homolog of NCBI NO: 24417492 NR Description: unknown [Arabidopsis thaliana]
  misc_feature (345)..(458): Homolog of NCBI NO: 18410807 NR Description: expressed protein [Arabidopsis thaliana]
  misc_feature (345)..(457): Homolog of NCBI NO: 15227917 NR Description: expressed protein [Arabidopsis thaliana]
  misc_feature (1)..(250): Homolog of NCBI NO: 17938249 NR Description: polygalacturonase
  misc_feature (1)..(233): Homolog of NCBI NO: 36958630 NR Description: possible polygalacturonase [Rhizobium sp. NGR234]
  misc_feature (345)..(457): Homolog of NCBI NO: 15227917 NR Description: expressed protein [Arabidopsis thaliana]
  misc_feature (345)..(458): Homolog of NCBI NO: 18410807 NR Description: expressed protein [Arabidopsis thaliana]
  misc_feature (1)..(37): Homolog of NCBI NO: 24417492 NR Description: unknown [Arabidopsis thaliana]
  misc_feature (1)..(153): Homolog of NCBI NO: 17473561 NR Description: putative protein [Arabidopsis thaliana]
  misc_feature (1)..(325): Homolog of NCBI NO: 18410809 NR Description: polygalacturonase, putative [Arabidopsis thaliana]

SEQ ID NO: 37263 - DNA, 1198 bp, Arabidopsis thaliana
  misc_feature (1)..(1198): Ceres Seq. ID no. 12422047
  misc_feature: MA Experiment ID: 108435 Result: Down-regulated in Transcription
  misc_feature: MA Experiment 108435 PARAMETER Experiment Name: At_stm_Mutants_cDNA_P Parameter: Plant Line Value: wt Landsburg vs stm
  misc_feature: MA Experiment 108435 PARAMETER Experiment Name: At_stm_Mutants_cDNA_P Parameter: Tissue Value: Shoot Apical Meristem Region
  misc_feature: MA Experiment ID: 108464 Result: Up-regulated in Transcription
  misc_feature: MA Experiment 108464 PARAMETER Experiment Name: At_Germinating_Seeds_cDNA_P Parameter: Age (day) Value: 4 vs. 0
  misc_feature: MA Experiment 108464 PARAMETER Experiment Name: At_Germinating_Seeds_cDNA_P Parameter: Tissue Value: Germinating Seeds
  misc_feature: MA Experiment ID: 108561 Result: Down-regulated in Transcription
  misc_feature: MA Experiment 108561 PARAMETER Experiment Name: At_100uM_ABA_cDNA_P Parameter: Timepoint (hr) Value: 6
  misc_feature: MA Experiment 108561 PARAMETER Experiment Name: At_100uM_ABA_cDNA_P Parameter: Tissue Value: Aerial
  misc_feature: MA Experiment 108561 PARAMETER Experiment Name: At_100uM_ABA_cDNA_P Parameter: Treatment Value: 100uM ABA vs. No Treatment
  misc_feature: MA Experiment ID: 108579 Result: Up-regulated in Transcription
  misc_feature: MA Experiment 108579 PARAMETER Experiment Name: At_4deg_Cold_cDNA_P Parameter: Temperature (deg C) Value: 4 vs. 22
  misc_feature: MA Experiment 108579 PARAMETER Experiment Name: At_4deg_Cold_cDNA_P Parameter: Timepoint (hr) Value: 6
  misc_feature: MA Experiment 108579 PARAMETER Experiment Name: At_4deg_Cold_cDNA_P Parameter: Tissue Value: Aerial
  misc_feature: MA Experiment ID: 108595 Result: Down-regulated in Transcription
  misc_feature: MA Experiment 108595 PARAMETER Experiment Name: At_Ler-pi_Ovule_cDNA_P Parameter: Plant Line Value: null
  misc_feature: MA Experiment ID: 108668 Result: Down-regulated in Transcription
  misc_feature: MA Experiment 108668 PARAMETER Experiment Name: At_2mM_SA_cDNA_P Parameter: Plant Line Value: WS
  misc_feature: MA Experiment 108668 PARAMETER Experiment Name: At_2mM_SA_cDNA_P Parameter: Timepoint (hr) Value: 6
  misc_feature: MA Experiment 108668 PARAMETER Experiment Name: At_2mM_SA_cDNA_P Parameter: Treatment Value: 2mM SA vs. No Treatment
  misc_feature: MA Experiment ID: 20000070 Result: Down-regulated in Transcription
  misc_feature: MA Experiment 20000070 PARAMETER Experiment Name: At_100uM_ABA_Mutants_cDNA_P Parameter: Plant Line Value: CS24
  misc_feature: MA Experiment 20000070 PARAMETER Experiment Name: At_100uM_ABA_Mutants_cDNA_P Parameter: Timepoint (hr) Value: 6
  misc_feature: MA Experiment 20000070 PARAMETER Experiment Name: At_100uM_ABA_Mutants_cDNA_P Parameter: Tissue Value: Aerial
  misc_feature: MA Experiment 20000070 PARAMETER Experiment Name: At_100uM_ABA_Mutants_cDNA_P Parameter: Treatment Value: 100uM ABA vs. No Treatment
  misc_feature: MA Experiment ID: 20000071 Result: Down-regulated in Transcription
  misc_feature: MA Experiment 20000071 PARAMETER Experiment Name: At_100uM_ABA_Mutants_cDNA_P Parameter: Plant Line Value: CS8104
  misc_feature: MA Experiment 20000071 PARAMETER Experiment Name: At_100uM_ABA_Mutants_cDNA_P Parameter: Timepoint (hr) Value: 6
  misc_feature: MA Experiment 20000071 PARAMETER Experiment Name: At_100uM_ABA_Mutants_cDNA_P Parameter: Tissue Value: Aerial
  misc_feature: MA Experiment 20000071 PARAMETER Experiment Name: At_100uM_ABA_Mutants_cDNA_P Parameter: Treatment Value: 100uM ABA vs. No Treatment
  misc_feature: MA Experiment ID: 20000072 Result: Down-regulated in Transcription
  misc_feature: MA Experiment 20000072 PARAMETER Experiment Name: At_100uM_ABA_Mutants_cDNA_P Parameter: Plant Line Value: CS8105
  misc_feature: MA Experiment 20000072 PARAMETER Experiment Name: At_100uM_ABA_Mutants_cDNA_P Parameter: Timepoint (hr) Value: 6
  misc_feature: MA Experiment 20000072 PARAMETER Experiment Name: At_100uM_ABA_Mutants_cDNA_P Parameter: Tissue Value: Aerial
  misc_feature: MA Experiment 20000072 PARAMETER Experiment Name: At_100uM_ABA_Mutants_cDNA_P Parameter: Treatment Value: 100uM ABA vs. No Treatment
  misc_feature: MA Experiment ID: 20000086 Result: Down-regulated in Transcription
  misc_feature: MA Experiment 20000086 PARAMETER Experiment Name: At_100uM_ABA_Mutants_cDNA_P Parameter: Plant Line Value: CS22
  misc_feature: MA Experiment 20000086 PARAMETER Experiment Name: At_100uM_ABA_Mutants_cDNA_P Parameter: Timepoint (hr) Value: 6
  misc_feature: MA Experiment 20000086 PARAMETER Experiment Name: At_100uM_ABA_Mutants_cDNA_P Parameter: Tissue Value: Aerial
  misc_feature: MA Experiment 20000086 PARAMETER Experiment Name: At_100uM_ABA_Mutants_cDNA_P Parameter: Treatment Value: 100uM ABA vs. No Treatment
  misc_feature: MA Experiment ID: 20000088 Result: Down-regulated in Transcription
  misc_feature: MA Experiment 20000088 PARAMETER Experiment Name: At_100uM_ABA_Mutants_cDNA_P Parameter: Plant Line Value: Landsberg
  misc_feature: MA Experiment 20000088 PARAMETER Experiment Name: At_100uM_ABA_Mutants_cDNA_P Parameter: Timepoint (hr) Value: 6
  misc_feature: MA Experiment 20000088 PARAMETER Experiment Name: At_100uM_ABA_Mutants_cDNA_P Parameter: Tissue Value: Aerial
  misc_feature: MA Experiment 20000088 PARAMETER Experiment Name: At_100uM_ABA_Mutants_cDNA_P Parameter: Treatment Value: 100uM ABA vs. No Treatment
  misc_feature: MA Experiment ID: 20000090 Result: Down-regulated in Transcription
  misc_feature: MA Experiment ID: 20000113 Result: Down-regulated in Transcription
  misc_feature: MA Experiment 20000113 PARAMETER Experiment Name: At_42deg_Heat_cDNA_P Parameter: Temperature (deg C) Value: 42 vs. 22
  misc_feature: MA Experiment 20000113 PARAMETER Experiment Name: At_42deg_Heat_cDNA_P Parameter: Timepoint (hr) Value: 8
  misc_feature: MA Experiment 20000113 PARAMETER Experiment Name: At_42deg_Heat_cDNA_P Parameter: Tissue Value: Aerial
  misc_feature: MA Experiment ID: 20000117 Result: Down-regulated in Transcription
  misc_feature: MA Experiment 20000117 PARAMETER Experiment Name: At_100uM_ABA_Mutants_cDNA_P Parameter: Plant Line Value: Columbia
  misc_feature: MA Experiment 20000117 PARAMETER Experiment Name: At_100uM_ABA_Mutants_cDNA_P Parameter: Timepoint (hr) Value: 6
  misc_feature: MA Experiment 20000117 PARAMETER Experiment Name: At_100uM_ABA_Mutants_cDNA_P Parameter: Tissue Value: Aerial
  misc_feature: MA Experiment 20000117 PARAMETER Experiment Name: At_100uM_ABA_Mutants_cDNA_P Parameter: Treatment Value: 100uM ABA vs. No Treatment
  misc_feature: MA Experiment ID: 20000184 Result: Up-regulated in Transcription
  misc_feature: MA Experiment 20000184 PARAMETER Experiment Name: At_Shoots__P Parameter: Age (day) Value: 7
  misc_feature: MA Experiment 20000184 PARAMETER Experiment Name: At_Shoots__P Parameter: Tissue Value: Shoots vs. Whole Plant
acaagtcacaaccccaccatgcatgtcatatctctttcgttatcctcaatattctttttcctcttcctcacatcaaccattttgatttctccggtacaacccacaacctctaagcctccggcaccacggccccacagagagctctccgccgattactactccaagaaatgtcctcagcttgaaactctcgtcggttccgtcacttctcagcggttcaaagaagtccccatctcagctccagccaccattcgcctcttctttcacgactgcttcgttgagggttgtgatgggtcgatattgatagaaacaaagaaaggaagcaagaaattagcagagagagaagcatatgagaataaggaattgagagaggaaggatttgatagtatcatcaaggcgaaggccttggttgagtctcattgcccttctctcgtctcttgctctgatattctcgctattgccgctcgagatttcattcatctggcaggtgggccttactatcaagtgaaaaaaggaaggtgggacggaaaaagatcaacggcaaagaacgtccctccaaacatacctcgatcaaactccaccgttgatcaactcatcaagctcttcgcgtccaaaggactaaccgtagaggaactcgtcgtcctttctggttcccacaccatcggcttcgcccattgtaaaaatttccttggtcgtctctacgactacaaaggcacaaaacgacccgacccgagtcttgaccaaagattactaaaagagctccggatgtcttgtcctttttccggcggaagctctggagtcgtccttccgctcgacgctacaactccgtttgtgtttgataatggatatttcacaggtctaggaaccaacatgggccttctcgggtcggaccaagctttgttccttgacccgaggacgaagcccattgcacttgagatggcaagagataagcagaagtttctcaaggcgtttggagacgctatggataaaatgggttccattggtgtaaagagagggaagagacatggggaaatacgtacggattgtcgagtctttttatagattttctttattgtcttgtctgatggtttttgtcttgatcttgatgtgttctgtgtcatgtgtcctttaatttattagcattttcgtgattgttttgttgatagtataaggtatttttttaaagcaacactaacttatc

SEQ ID NO: 37264 - protein, 352 aa, Arabidopsis thaliana
  peptide (1)..(352): Ceres Seq. ID no. 12422048
  misc_feature (64)..(315): Pfam Name: Peroxidase Pfam Description: Peroxidase
  misc_feature (16)..(350): Homolog of NCBI NO: 34905826 NR Description: putative peroxidase [Oryza sativa (japonica
  misc_feature (42)..(351): Homolog of NCBI NO: 7433082 NR Description: probable peroxidase (EC 1.11.1.7) (clone PC55) -
  misc_feature (47)..(351): Homolog of NCBI NO: 15241315 NR Description: peroxidase, putative
  misc_feature (47)..(351): Homolog of NCBI NO: 15240737 NR Description: peroxidase, putative; protein id: At5g67400.1
  misc_feature (47)..(351): Homolog of NCBI NO: 28629828 NR Description: peroxidase 1 [Artemisia annua]
  misc_feature (47)..(351): Homolog of NCBI NO: 14485511 NR Description: putative peroxidase [Solanum tuberosum]
  misc_feature (43)..(350): Homolog of NCBI NO: 7433086 NR Description: peroxidase (EC 1.11.1.7) pxdD precursor - alfalfa
  misc_feature (47)..(351): Homolog of NCBI NO: 17027271 NR Description: putative peroxidase [Oryza sativa (japonica
  misc_feature (15)..(352): Homolog of NCBI NO: 19347720 NR Description: putative peroxidase [Arabidopsis thaliana]
  misc_feature (7)..(352): Homolog of NCBI NO: 15226205 NR Description: peroxidase, putative; protein id: At2g34060.1
TSHNPTMHVISLSLSSIFFFLFLTSTILISPVQPTTSKPPAPRPHRELSADYYSKKCPQLETLVGSVTSQRFKEVPISAPATIRLFFHDCFVEGCDGSILIETKKGSKKLAEREAYENKELREEGFDSIIKAKALVESHCPSLVSCSDILAIAARDFIHLAGGPYYQVKKGRWDGKRSTAKNVPPNIPRSNSTVDQLIKLFASKGLTVEELVVLSGSHTIGFAHCKNFLGRLYDYKGTKRPDPSLDQRLLKELRMSCPFSGGSSGVVLPLDATTPFVFDNGYFTGLGTNMGLLGSDQALFLDPRTKPIALEMARDKQKFLKAFGDAMDKMGSIGVKRGKRHGEIRTDCRVFL

SEQ ID NO: 37265 - protein, 346 aa, Arabidopsis thaliana
  peptide (1)..(346): Ceres Seq. ID no. 12422049
  misc_feature (58)..(309): Pfam Name: Peroxidase Pfam Description: Peroxidase
  misc_feature (10)..(344): Homolog of NCBI NO: 34905826 NR Description: putative peroxidase [Oryza sativa (japonica
  misc_feature (36)..(345): Homolog of NCBI NO: 7433082 NR Description: probable peroxidase (EC 1.11.1.7) (clone PC55) -
  misc_feature (41)..(345): Homolog of NCBI NO: 15241315 NR Description: peroxidase, putative
  misc_feature (41)..(345): Homolog of NCBI NO: 15240737 NR Description: peroxidase, putative; protein id: At5g67400.1
  misc_feature (41)..(345): Homolog of NCBI NO: 28629828 NR Description: peroxidase 1 [Artemisia annua]
  misc_feature (41)..(345): Homolog of NCBI NO: 14485511 NR Description: putative peroxidase [Solanum tuberosum]
  misc_feature (37)..(344): Homolog of NCBI NO: 7433086 NR Description: peroxidase (EC 1.11.1.7) pxdD precursor - alfalfa
  misc_feature (41)..(345): Homolog of NCBI NO: 17027271 NR Description: putative peroxidase [Oryza sativa (japonica
  misc_feature (9)..(346): Homolog of NCBI NO: 19347720 NR Description: putative peroxidase [Arabidopsis thaliana]
  misc_feature (1)..(346): Homolog of NCBI NO: 15226205 NR Description: peroxidase, putative; protein id: At2g34060.1
MHVISLSLSSIFFFLFLTSTILISPVQPTTSKPPAPRPHRELSADYYSKKCPQLETLVGSVTSQRFKEVPISAPATIRLFFHDCFVEGCDGSILIETKKGSKKLAEREAYENKELREEGFDSIIKAKALVESHCPSLVSCSDILAIAARDFIHLAGGPYYQVKKGRWDGKRSTAKNVPPNIPRSNSTVDQLIKLFASKGLTVEELVVLSGSHTIGFAHCKNFLGRLYDYKGTKRPDPSLDQRLLKELRMSCPFSGGSSGVVLPLDATTPFVFDNGYFTGLGTNMGLLGSDQALFLDPRTKPIALEMARDKQKFLKAFGDAMDKMGSIGVKRGKRHGEIRTDCRVFL

SEQ ID NO: 37266 - DNA, 1830 bp, Arabidopsis thaliana
  misc_feature (1)..(1830): Ceres Seq. ID no. 13592216
  misc_feature: MA Experiment ID: 20000180 Result: Up-regulated in Transcription
  misc_feature: MA Experiment 20000180 PARAMETER Experiment Name: At_Germinating_Seeds_P Parameter: Age (hr) Value: 24 vs. 0
  misc_feature: MA Experiment 20000180 PARAMETER Experiment Name: At_Germinating_Seeds_P Parameter: Tissue Value: Germinating Seeds
  misc_feature: MA Experiment ID: 20000227 Result: Up-regulated in Transcription
  misc_feature: MA Experiment 20000227 PARAMETER Experiment Name: At_Root-Tips-vs-Tops_P Parameter: Tissue Value: Root Tips vs. Root Tops
  misc_feature: MA Experiment ID: 20000234 Result: Down-regulated in Transcription
  misc_feature: MA Experiment 20000234 PARAMETER Experiment Name: At_Siliques_P Parameter: Age (day) Value: 21
  misc_feature: MA Experiment 20000234 PARAMETER Experiment Name: At_Siliques_P Parameter: Organism Value: A. thaliana
  misc_feature: MA Experiment 20000234 PARAMETER Experiment Name: At_Siliques_P Parameter: Plant Line Value: WS
  misc_feature: MA Experiment 20000234 PARAMETER Experiment Name: At_Siliques_P Parameter: Tissue Value: Less Than 5mm Siliques vs. Whole Plant
  misc_feature: MA Experiment ID: 20000264 Result: Up-regulated in Transcription
  misc_feature: MA Experiment 20000264 PARAMETER Experiment Name: At_Open_Flower_P Parameter: Age (day) Value: 21
  misc_feature: MA Experiment 20000264 PARAMETER Experiment Name: At_Open_Flower_P Parameter: Plant Line Value: WS
  misc_feature: MA Experiment 20000264 PARAMETER Experiment Name: At_Open_Flower_P Parameter: Tissue Value: Open Flower vs. Whole Plant
  misc_feature: MA Experiment ID: 20000265 Result: Up-regulated in Transcription
  misc_feature: MA Experiment 20000265 PARAMETER Experiment Name: At_Open_Flower_P Parameter: Age (day) Value: 21
  misc_feature: MA Experiment 20000265 PARAMETER Experiment Name: At_Open_Flower_P Parameter: Plant Line Value: WS
  misc_feature: MA Experiment 20000265 PARAMETER Experiment Name: At_Open_Flower_P Parameter: Tissue Value: Closed Flower vs. Whole Plant
  misc_feature: MA Experiment ID: 20000286 Result: Up-regulated in Transcription
  misc_feature: MA Experiment 20000286 PARAMETER Experiment Name: At_Open_Flower_P Parameter: Age (day) Value: 21
  misc_feature: MA Experiment 20000286 PARAMETER Experiment Name: At_Open_Flower_P Parameter: Plant Line Value: WS
  misc_feature: MA Experiment 20000286 PARAMETER Experiment Name: At_Open_Flower_P Parameter: Tissue Value: Half Open vs. Whole Plant
  misc_feature: MA Experiment ID: 20000438 Result: Down-regulated in Transcription
  misc_feature: MA Experiment 20000438 PARAMETER Experiment Name: At_Shoots__P Parameter: Age (day) Value: 14
  misc_feature: MA Experiment 20000438 PARAMETER Experiment Name: At_Shoots__P Parameter: Tissue Value: Shoots vs. Whole Plant
  misc_feature: MA Experiment ID: 20000794 Result: Up-regulated in Transcription
  misc_feature: MA Experiment 20000794 PARAMETER Experiment Name: At_Petals_P Parameter: Age (day) Value: 23-25 days
  misc_feature: MA Experiment 20000794 PARAMETER Experiment Name: At_Petals_P Parameter: Plant Line Value: WS
  misc_feature: MA Experiment 20000794 PARAMETER Experiment Name: At_Petals_P Parameter: Tissue Value: Petals vs. Whole plant
  misc_feature: MA Experiment ID: 20001555 Result: Up-regulated in Transcription
  misc_feature: MA Experiment 20001555 PARAMETER Experiment Name: At_Drought_Soil_Dry_P Parameter: Age (day) Value: 24
  misc_feature: MA Experiment 20001555 PARAMETER Experiment Name: At_Drought_Soil_Dry_P Parameter: Organism Value: A. thaliana
  misc_feature: MA Experiment 20001555 PARAMETER Experiment Name: At_Drought_Soil_Dry_P Parameter: Plant Line Value: WS
  misc_feature: MA Experiment 20001555 PARAMETER Experiment Name: At_Drought_Soil_Dry_P Parameter: Post Timepoint (hr) Value: None
  misc_feature: MA Experiment 20001555 PARAMETER Experiment Name: At_Drought_Soil_Dry_P Parameter: Post-Treatment Value: None
  misc_feature: MA Experiment 20001555 PARAMETER Experiment Name: At_Drought_Soil_Dry_P Parameter: Timepoint (day) Value: 10
  misc_feature: MA Experiment 20001555 PARAMETER Experiment Name: At_Drought_Soil_Dry_P Parameter: Treatment Value: Drought vs. No Drought
  misc_feature: MA Experiment ID: 20001904 Result: Up-regulated in Transcription
  misc_feature: MA Experiment 20001904 PARAMETER Experiment Name: At_Drought_Reproduction_P Parameter: Age (day) Value: 37
  misc_feature: MA Experiment 20001904 PARAMETER Experiment Name: At_Drought_Reproduction_P Parameter: Organism Value: A. thaliana
  misc_feature: MA Experiment 20001904 PARAMETER Experiment Name: At_Drought_Reproduction_P Parameter: Plant Line Value: WS
  misc_feature: MA Experiment 20001904 PARAMETER Experiment Name: At_Drought_Reproduction_P Parameter: Timepoint (day) Value: 7
  misc_feature: MA Experiment 20001904 PARAMETER Experiment Name: At_Drought_Reproduction_P Parameter: Tissue Value: Rosettes
  misc_feature: MA Experiment 20001904 PARAMETER Experiment Name: At_Drought_Reproduction_P Parameter: Treatment Value: Drought vs. No Drought
  misc_feature: MA Experiment ID: 20001905 Result: Up-regulated in Transcription
  misc_feature: MA Experiment 20001905 PARAMETER Experiment Name: At_Drought_Reproduction_P Parameter: Age (day) Value: 40
  misc_feature: MA Experiment 20001905 PARAMETER Experiment Name: At_Drought_Reproduction_P Parameter: Organism Value: A. thaliana
  misc_feature: MA Experiment 20001905 PARAMETER Experiment Name: At_Drought_Reproduction_P Parameter: Plant Line Value: WS
  misc_feature: MA Experiment 20001905 PARAMETER Experiment Name: At_Drought_Reproduction_P Parameter: Timepoint (day) Value: 10
  misc_feature: MA Experiment 20001905 PARAMETER Experiment Name: At_Drought_Reproduction_P Parameter: Tissue Value: Rosettes
  misc_feature: MA Experiment 20001905 PARAMETER Experiment Name: At_Drought_Reproduction_P Parameter: Treatment Value: Drought vs. No Drought
  misc_feature: MA Experiment ID: 20001911 Result: Down-regulated in Transcription
  misc_feature: MA Experiment 20001911 PARAMETER Experiment Name: At_Drought_Reproduction_P Parameter: Age (day) Value: 40
  misc_feature: MA Experiment 20001911 PARAMETER Experiment Name: At_Drought_Reproduction_P Parameter: Organism Value: A. thaliana
  misc_feature: MA Experiment 20001911 PARAMETER Experiment Name: At_Drought_Reproduction_P Parameter: Plant Line Value: WS
  misc_feature: MA Experiment 20001911 PARAMETER Experiment Name: At_Drought_Reproduction_P Parameter: Timepoint (day) Value: 10
  misc_feature: MA Experiment 20001911 PARAMETER Experiment Name: At_Drought_Reproduction_P Parameter: Tissue Value: Flowers
  misc_feature: MA Experiment 20001911 PARAMETER Experiment Name: At_Drought_Reproduction_P Parameter: Treatment Value: Drought vs. No Drought
gaacaactaaactaattgacatttgacaataaaaagctgaactttattatgcatctctaggctttttccttgagagtttctctctttgaagtcatttacgtatatatatataaacccttgcaccattcttcttcgtcttgttaagcttttaagaatctctactcacattttctctgtaaaaatgggaactaggttccaatcattcttgctcgtgttcttgctttcatgtttaatcctcatatcaactgcctcgtgtgagcgaaatggtgatggaacgattagaattggattgaagaagaggaaactagaccggagcaacaggctagcttctcagctttttttgaaaaaccgagggtctcattggtctcccaaacactattttcgcctgaacgatgaaaatgcggatatggttccgctgaaaaactatttggatgctcaatactatggtgacattaccattggtactcctcctcagaagttcactgtgatctttgatactggtagctccaatctctggataccatctactaaatgttacctatcggttgcttgttatttccactccaagtacaaggctagccagtcatcgtcatatagaaagaacggaaaacccgcgtctatccgctatgggacgggtgctatttctggttactttagcaatgatgatgttaaagttggtgatattgttgtgaaagagcaggaattcatagaggctactagtgagcctggtataacattcttgctagcaaagtttgatggtatcctcggtttgggtttcaaagagatttctgtaggaaactcaactccggtttggtataacatggtagaaaaaggtttagttaaggaaccgattttttcgttctggcttaaccgtaacccgaaagatccagaaggcggtgagattgttttcggtggagtcgacccgaagcacttcaaaggagagcatacttttgttcctgtgacacataaaggttactggcagtttgacatgggtgatctccaaattgctggcaaaccaaccggatattgtgctaaaggttgttctgctattgctgattccggaacttctctgctcaccggtccatcgactgtcatcacgatgatcaatcacgcgataggagcacaaggaattgtaagccgtgaatgcaaggccgtggtggatcaatacggaaaaaccatgttgaattctcttctagctcaggaggatccgaagaaagtatgctcacaaattggagtctgcgcttatgatggtacacagagtgtgagtatggggatccagtcagttgtagacgatggaacatcgggtcttttaaaccaagcgatgtgcagtgcttgcgaaatggcagccgtgtggatggagagcgaattgactcagaatcaaacacaagaacgcatactcgcttatgctgctgagctatgtgaccatataccaacccaaaaccaacaatcagcagtggactgtgggagggtttcgtcgatgcctatagtcacattctcaattggtggcagaagctttgatctaactcctcaagactatatattcaagatcggggaaggagttgagtctcagtgcaccagcggtttcacggcaatggatattgctccgcctcgtggacctctctggatcttgggtgatatcttcatgggaccataccacacagtgttcgattatgggaaaggaagagttggattcgccaaagctgcttaaacaatatctcttctttaataccctcgttttttatatgatgtttgtgaatgtgtttgtaataacttaaaacatattgctatcctagaatggtatcatcttaatacagatttttatttggtttc

SEQ ID NO: 37267 - protein, 508 aa, Arabidopsis thaliana
  peptide (1)..(508): Ceres Seq. ID no. 13592217
  misc_feature (32)..(361): Pfam Name: Eukaryotic aspartyl protease Pfam Description: Eukaryotic aspartyl protease
  misc_feature (32)..(361): Pfam Name: Eukaryotic aspartyl protease Pfam Description: Eukaryotic aspartyl protease
  misc_feature (1)..(508): Homolog of NCBI NO: 7435838 NR Description: probable aspartic proteinase (EC 3.4.23.-) 1 -
  misc_feature (1)..(508): Homolog of NCBI NO: 21616053 NR Description: aspartic proteinase [Theobroma cacao]
  misc_feature (1)..(508): Homolog of NCBI NO: 21616053 NR Description: aspartic proteinase [Theobroma cacao]
  misc_feature (1)..(508): Homolog of NCBI NO: 15233518 NR Description: aspartic protease -related [Arabidopsis thaliana]
  misc_feature (1)..(508): Homolog of NCBI NO: 7435838 NR Description: probable aspartic proteinase (EC 3.4.23.-) 1 -
  misc_feature (1)..(508): Homolog of NCBI NO: 15233518 NR Description: aspartic protease -related [Arabidopsis thaliana]
MGTRFQSFLLVFLLSCLILISTASCERNGDGTIRIGLKKRKLDRSNRLASQLFLKNRGSHWSPKHYFRLNDENADMVPLKNYLDAQYYGDITIGTPPQKFTVIFDTGSSNLWIPSTKCYLSVACYFHSKYKASQSSSYRKNGKPASIRYGTGAISGYFSNDDVKVGDIVVKEQEFIEATSEPGITFLLAKFDGILGLGFKEISVGNSTPVWYNMVEKGLVKEPIFSFWLNRNPKDPEGGEIVFGGVDPKHFKGEHTFVPVTHKGYWQFDMGDLQIAGKPTGYCAKGCSAIADSGTSLLTGPSTVITMINHAIGAQGIVSRECKAVVDQYGKTMLNSLLAQEDPKKVCSQIGVCAYDGTQSVSMGIQSVVDDGTSGLLNQAMCSACEMAAVWMESELTQNQTQERILAYAAELCDHIPTQNQQSAVDCGRVSSMPIVTFSIGGRSFDLTPQDYIFKIGEGVESQCTSGFTAMDIAPPRGPLWILGDIFMGPYHTVFDYGKGRVGFAKAA

SEQ ID NO: 37268 - protein, 433 aa, Arabidopsis thaliana
  peptide (1)..(433): Ceres Seq. ID no. 13592218
  misc_feature (1)..(286): Pfam Name: Eukaryotic aspartyl protease Pfam Description: Eukaryotic aspartyl protease
  misc_feature (1)..(286): Pfam Name: Eukaryotic aspartyl protease Pfam Description: Eukaryotic aspartyl protease
  misc_feature (1)..(433): Homolog of NCBI NO: 7435838 NR Description: probable aspartic proteinase (EC 3.4.23.-) 1 -
  misc_feature (1)..(433): Homolog of NCBI NO: 21616053 NR Description: aspartic proteinase [Theobroma cacao]
  misc_feature (1)..(433): Homolog of NCBI NO: 21616053 NR Description: aspartic proteinase [Theobroma cacao]
  misc_feature (1)..(433): Homolog of NCBI NO: 15233518 NR Description: aspartic protease -related [Arabidopsis thaliana]
  misc_feature (1)..(433): Homolog of NCBI NO: 7435838 NR Description: probable aspartic proteinase (EC 3.4.23.-) 1 -
  misc_feature (1)..(433): Homolog of NCBI NO: 15233518 NR Description: aspartic protease -related [Arabidopsis thaliana]
MVPLKNYLDAQYYGDITIGTPPQKFTVIFDTGSSNLWIPSTKCYLSVACYFHSKYKASQSSSYRKNGKPASIRYGTGAISGYFSNDDVKVGDIVVKEQEFIEATSEPGITFLLAKFDGILGLGFKEISVGNSTPVWYNMVEKGLVKEPIFSFWLNRNPKDPEGGEIVFGGVDPKHFKGEHTFVPVTHKGYWQFDMGDLQIAGKPTGYCAKGCSAIADSGTSLLTGPSTVITMINHAIGAQGIVSRECKAVVDQYGKTMLNSLLAQEDPKKVCSQIGVCAYDGTQSVSMGIQSVVDDGTSGLLNQAMCSACEMAAVWMESELTQNQTQERILAYAAELCDHIPTQNQQSAVDCGRVSSMPIVTFSIGGRSFDLTPQDYIFKIGEGVESQCTSGFTAMDIAPPRGPLWILGDIFMGPYHTVFDYGKGRVGFAKAA

SEQ ID NO: 37269 - protein, 295 aa, Arabidopsis thaliana
  peptide (1)..(295): Ceres Seq. ID no. 13592219
  misc_feature (1)..(148): Pfam Name: Eukaryotic aspartyl protease Pfam Description: Eukaryotic aspartyl protease
  misc_feature (1)..(148): Pfam Name: Eukaryotic aspartyl protease Pfam Description: Eukaryotic aspartyl protease
  misc_feature (1)..(295): Homolog of NCBI NO: 7435838 NR Description: probable aspartic proteinase (EC 3.4.23.-) 1 -
  misc_feature (1)..(295): Homolog of NCBI NO: 21616053 NR Description: aspartic proteinase [Theobroma cacao]
  misc_feature (1)..(295): Homolog of NCBI NO: 21616053 NR Description: aspartic proteinase [Theobroma cacao]
  misc_feature (1)..(295): Homolog of NCBI NO: 15233518 NR Description: aspartic protease -related [Arabidopsis thaliana]
  misc_feature (1)..(295): Homolog of NCBI NO: 7435838 NR Description: probable aspartic proteinase (EC 3.4.23.-) 1 -
  misc_feature (1)..(295): Homolog of NCBI NO: 15233518 NR Description: aspartic protease -related [Arabidopsis thaliana]
MVEKGLVKEPIFSFWLNRNPKDPEGGEIVFGGVDPKHFKGEHTFVPVTHKGYWQFDMGDLQIAGKPTGYCAKGCSAIADSGTSLLTGPSTVITMINHAIGAQGIVSRECKAVVDQYGKTMLNSLLAQEDPKKVCSQIGVCAYDGTQSVSMGIQSVVDDGTSGLLNQAMCSACEMAAVWMESELTQNQTQERILAYAAELCDHIPTQNQQSAVDCGRVSSMPIVTFSIGGRSFDLTPQDYIFKIGEGVESQCTSGFTAMDIAPPRGPLWILGDIFMGPYHTVFDYGKGRVGFAKAA

SEQ ID NO: 37270 - DNA, 1706 bp, Arabidopsis thaliana
  misc_feature (1)..(1706): Ceres Seq. ID no. 12336441
  misc_feature: MA Experiment ID: 108461 Result: Up-regulated in Transcription
  misc_feature: MA Experiment 108461 PARAMETER Experiment Name: At_Germinating_Seeds_cDNA_P Parameter: Age (day) Value: 1 vs. 0
  misc_feature: MA Experiment 108461 PARAMETER Experiment Name: At_Germinating_Seeds_cDNA_P Parameter: Tissue Value: Germinating Seeds
  misc_feature: MA Experiment ID: 108573 Result: Up-regulated in Transcription
  misc_feature: MA Experiment 108573 PARAMETER Experiment Name: At_Drought_cDNA_P Parameter: Timepoint (hr) Value: 6
  misc_feature: MA Experiment 108573 PARAMETER Experiment Name: At_Drought_cDNA_P Parameter: Tissue Value: Aerial
  misc_feature: MA Experiment 108573 PARAMETER Experiment Name: At_Drought_cDNA_P Parameter: Treatment Value: Drought vs. No Drought
  misc_feature: MA Experiment ID: 108585 Result: Up-regulated in Transcription
  misc_feature: MA Experiment 108585 PARAMETER Experiment Name: At_5mM_NaNP_cDNA_P Parameter: Timepoint (hr) Value: 6
  misc_feature: MA Experiment 108585 PARAMETER Experiment Name: At_5mM_NaNP_cDNA_P Parameter: Tissue Value: Aerial
  misc_feature: MA Experiment 108585 PARAMETER Experiment Name: At_5mM_NaNP_cDNA_P Parameter: Treatment Value: null
  misc_feature: MA Experiment ID: 20000113 Result: Down-regulated in Transcription
  misc_feature: MA Experiment 20000113 PARAMETER Experiment Name: At_42deg_Heat_cDNA_P Parameter: Temperature (deg C) Value: 42 vs. 22
  misc_feature: MA Experiment 20000113 PARAMETER Experiment Name: At_42deg_Heat_cDNA_P Parameter: Timepoint (hr) Value: 8
  misc_feature: MA Experiment 20000113 PARAMETER Experiment Name: At_42deg_Heat_cDNA_P Parameter: Tissue Value: Aerial
  misc_feature: MA Experiment ID: 20000224 Result: Up-regulated in Transcription
acacacacctctctttcctcaaaaaccctagatctctccctctctctctctctctctctccatctcttgtctttgccttttacgaagcttcccttcccttagtttatacattactctcagctctctttatttcactcagcttcacgttgaagacgagtttctctatttgccagatctgttatctttcacatttctggtgattgcttctctaatttcgttctgggttttactgtttccatctgaaatttacctcatttcttcgtgggttttatctgaattccgttaattcccaagttctagtgtatgatctcgttgaaatcgagttaaaaatctgatctttactcttgattctgcagatctgtttgaagaaagctatgacttgtgtttgataaagagagaagcaaaaaaaggaacagtttttatataaagatatttgctttatttgtttgttcttaattgttgccacgaaaatggcaatgccaccacctggaaatgttactactccgtctgagaaattgcagtttcctcctccggcaaattggatcccagacgagcgagatgggtttatctcctggcttcgtgcggagttcgctgcggctaacgcgatcatcgattcgctttgtcagcatctacaagcggttggggatcacaacgagtacgaatccgtgatcggaagcattcatcatcgtcgcttagcctggtctcaagtgcttactatgcagcagtttttcccagttgcagatgtttcttacaatcttcagcagattgcttggaaaaggcaacagcaaatgccacctcaaaggcattacaattctgatcaagttgggaaatttggagcaaggagatcagggcctgggtttaacaagcatcatggtggtggtgggggttacagaggagctgattcgatggcgagaaatgggcataatttcaatggcgttaacagtgatcgtgttgagcatcgggaggaagctaagttggcaagtgatgttaaggcattgtctgttgcagaagagaagagagatggtagcgagaaaccgaggagtgatagtaaagttgagaaaaaattggaagaatctgaaactcaagaggagatagtgaagaaccataagtgtaactcgggttctaaagataacagtctcatttctgagcaaaagcaggaggagaacgataaagagtgtcctgcaagcatggcaaagacttttgtggttcaagagatgtatgatgcaaaaatggttaatgttgtcgaaggattgaagctatacgacaaaatgcttgacgcaaacgaagtttctcaactcgtttctcttgtaaccaatctgagacttgctggaagaagaggtcaacttcaaagtgaggcatatgtgggttataaacggccaaatagaggacatggacgtgagatgatccaactcggtcttcctatagctgatacgccgcctgatgatgatagtatcaaagatcgaagaatagagccaatcccatcagctctttcagacatcattgaacgtttggtctcaaagcaaatcatacctgtgaaaccagacgcatgcatcattgatttcttcagcgagggagatcactcgcagcctcatatgtttgttccctggtttggacgacccatcagtgtcttgtccttgtctgaatctgattatacatttggaagagtcattgtctctgaaaatcccggcgactacaaaggctctctc

SEQ ID NO: 37271 - protein, 412 aa, Arabidopsis thaliana
  peptide (1)..(412): Ceres Seq. ID no. 12336442
  misc_feature (356)..(411): Pfam Name: 2OG-Fe(II) oxygenase superfamily Pfam Description: 2OG-Fe(II) oxygenase superfamily
  misc_feature (215)..(411): Homolog of NCBI NO: 30690892 NR Description: oxidoreductase, 2OG-Fe(II) oxygenase family
  misc_feature (20)..(98): Homolog of NCBI NO: 25409091 NR Description: hypothetical protein At2g48080 [imported] -
  misc_feature (215)..(411): Homolog of NCBI NO: 25409091 NR Description: hypothetical protein At2g48080 [imported] -
  misc_feature (6)..(111): Homolog of NCBI NO: 15236223 NR Description: hypothetical protein
  misc_feature (178)..(411): Homolog of NCBI NO: 15236223 NR Description: hypothetical protein
  misc_feature (244)..(411): Homolog of NCBI NO: 37530586 NR Description: unknown protein [Oryza sativa (japonica
  misc_feature (1)..(177): Homolog of NCBI NO: 37530586 NR Description: unknown protein [Oryza sativa (japonica
  misc_feature (330)..(411): Homolog of NCBI NO: 8778238 NR Description: F10B6.11 [Arabidopsis thaliana]
  misc_feature (1)..(331): Homolog of NCBI NO: 8778238 NR Description: F10B6.11 [Arabidopsis thaliana]
  misc_feature (1)..(411): Homolog of NCBI NO: 18394153 NR Description: expressed protein; protein id: At1g14710.1
MAMPPPGNVTTPSEKLQFPPPANWIPDERDGFISWLRAEFAAANAIIDSLCQHLQAVGDHNEYESVIGSIHHRRLAWSQVLTMQQFFPVADVSYNLQQIAWKRQQQMPPQRHYNSDQVGKFGARRSGPGFNKHHGGGGGYRGADSMARNGHNFNGVNSDRVEHREEAKLASDVKALSVAEEKRDGSEKPRSDSKVEKKLEESETQEEIVKNHKCNSGSKDNSLISEQKQEENDKECPASMAKTFVVQEMYDAKMVNVVEGLKLYDKMLDANEVSQLVSLVTNLRLAGRRGQLQSEAYVGYKRPNRGHGREMIQLGLPIADTPPDDDSIKDRRIEPIPSALSDIIERLVSKQIIPVKPDACIIDFFSEGDHSQPHMFVPWFGRPISVLSLSESDYTFGRVIVSENPGDYKGSL

SEQ ID NO: 37272 - protein, 410 aa, Arabidopsis thaliana
  peptide (1)..(410): Ceres Seq. ID no. 12336443
  misc_feature (354)..(409): Pfam Name: 2OG-Fe(II) oxygenase superfamily Pfam Description: 2OG-Fe(II) oxygenase superfamily
  misc_feature (213)..(409): Homolog of NCBI NO: 30690892 NR Description: oxidoreductase, 2OG-Fe(II) oxygenase family
  misc_feature (18)..(96): Homolog of NCBI NO: 25409091 NR Description: hypothetical protein At2g48080 [imported] -
  misc_feature (213)..(409): Homolog of NCBI NO: 25409091 NR Description: hypothetical protein At2g48080 [imported] -
  misc_feature (4)..(109): Homolog of NCBI NO: 15236223 NR Description: hypothetical protein
  misc_feature (176)..(409): Homolog of NCBI NO: 15236223 NR Description: hypothetical protein
  misc_feature (242)..(409): Homolog of NCBI NO: 37530586 NR Description: unknown protein [Oryza sativa (japonica
  misc_feature (1)..(175): Homolog of NCBI NO: 37530586 NR Description: unknown protein [Oryza sativa (japonica
  misc_feature (328)..(409): Homolog of NCBI NO: 8778238 NR Description: F10B6.11 [Arabidopsis thaliana]
  misc_feature (1)..(329): Homolog of NCBI NO: 8778238 NR Description: F10B6.11 [Arabidopsis thaliana]
  misc_feature (1)..(409): Homolog of NCBI NO: 18394153 NR Description: expressed protein; protein id: At1g14710.1
MPPPGNVTTPSEKLQFPPPANWIPDERDGFISWLRAEFAAANAIIDSLCQHLQAVGDHNEYESVIGSIHHRRLAWSQVLTMQQFFPVADVSYNLQQIAWKRQQQMPPQRHYNSDQVGKFGARRSGPGFNKHHGGGGGYRGADSMARNGHNFNGVNSDRVEHREEAKLASDVKALSVAEEKRDGSEKPRSDSKVEKKLEESETQEEIVKNHKCNSGSKDNSLISEQKQEENDKECPASMAKTFVVQEMYDAKMVNVVEGLKLYDKMLDANEVSQLVSLVTNLRLAGRRGQLQSEAYVGYKRPNRGHGREMIQLGLPIADTPPDDDSIKDRRIEPIPSALSDIIERLVSKQIIPVKPDACIIDFFSEGDHSQPHMFVPWFGRPISVLSLSESDYTFGRVIVSENPGDYKGSL

SEQ ID NO: 37273 - protein, 330 aa, Arabidopsis thaliana
  peptide (1)..(330): Ceres Seq. ID no. 12336444
  misc_feature (274)..(329): Pfam Name: 2OG-Fe(II) oxygenase superfamily Pfam Description: 2OG-Fe(II) oxygenase superfamily
  misc_feature (133)..(329): Homolog of NCBI NO: 30690892 NR Description: oxidoreductase, 2OG-Fe(II) oxygenase family
  misc_feature (1)..(16): Homolog of NCBI NO: 25409091 NR Description: hypothetical protein At2g48080 [imported] -
  misc_feature (133)..(329): Homolog of NCBI NO: 25409091 NR Description: hypothetical protein At2g48080 [imported] -
  misc_feature (1)..(29): Homolog of NCBI NO: 15236223 NR Description: hypothetical protein
  misc_feature (96)..(329): Homolog of NCBI NO: 15236223 NR Description: hypothetical protein
  misc_feature (162)..(329): Homolog of NCBI NO: 37530586 NR Description: unknown protein [Oryza sativa (japonica
  misc_feature (1)..(95): Homolog of NCBI NO: 37530586 NR Description: unknown protein [Oryza sativa (japonica
  misc_feature (248)..(329): Homolog of NCBI NO: 8778238 NR Description: F10B6.11 [Arabidopsis thaliana]
  misc_feature (1)..(249): Homolog of NCBI NO: 8778238 NR Description: F10B6.11 [Arabidopsis thaliana]
  misc_feature (1)..(329): Homolog of NCBI NO: 18394153 NR Description: expressed protein; protein id: At1g14710.1
MQQFFPVADVSYNLQQIAWKRQQQMPPQRHYNSDQVGKFGARRSGPGFNKHHGGGGGYRGADSMARNGHNFNGVNSDRVEHREEAKLASDVKALSVAEEKRDGSEKPRSDSKVEKKLEESETQEEIVKNHKCNSGSKDNSLISEQKQEENDKECPASMAKTFVVQEMYDAKMVNVVEGLKLYDKMLDANEVSQLVSLVTNLRLAGRRGQLQSEAYVGYKRPNRGHGREMIQLGLPIADTPPDDDSIKDRRIEPIPSALSDIIERLVSKQIIPVKPDACIIDFFSEGDHSQPHMFVPWFGRPISVLSLSESDYTFGRVIVSENPGDYKGSL

SEQ ID NO: 37274 - DNA, 1235 bp, Arabidopsis thaliana
  misc_feature (1)..(1235): Ceres Seq. ID no. 12329563
  misc_feature: MA Experiment ID: 108434 Result: Up-regulated in Transcription
  misc_feature: MA Experiment 108434 PARAMETER Experiment Name: At_Root_Tips_cDNA_P Parameter: Tissue Value: Root Tips
  misc_feature: MA Experiment ID: 108461 Result: Up-regulated in Transcription
  misc_feature: MA Experiment 108461 PARAMETER Experiment Name: At_Germinating_Seeds_cDNA_P Parameter: Age (day) Value: 1 vs. 0
  misc_feature: MA Experiment 108461 PARAMETER Experiment Name: At_Germinating_Seeds_cDNA_P Parameter: Tissue Value: Germinating Seeds
  misc_feature: MA Experiment ID: 108462 Result: Up-regulated in Transcription
  misc_feature: MA Experiment 108462 PARAMETER Experiment Name: At_Germinating_Seeds_cDNA_P Parameter: Age (day) Value: 2 vs. 0
  misc_feature: MA Experiment 108462 PARAMETER Experiment Name: At_Germinating_Seeds_cDNA_P Parameter: Tissue Value: Germinating Seeds
  misc_feature: MA Experiment ID: 108463 Result: Up-regulated in Transcription
  misc_feature: MA Experiment 108463 PARAMETER Experiment Name: At_Germinating_Seeds_cDNA_P Parameter: Age (day) Value: 3 vs. 0
  misc_feature: MA Experiment 108463 PARAMETER Experiment Name: At_Germinating_Seeds_cDNA_P Parameter: Tissue Value: Germinating Seeds
  misc_feature: MA Experiment ID: 108464 Result: Up-regulated in Transcription
  misc_feature: MA Experiment 108464 PARAMETER Experiment Name: At_Germinating_Seeds_cDNA_P Parameter: Age (day) Value: 4 vs. 0
  misc_feature: MA Experiment 108464 PARAMETER Experiment Name: At_Germinating_Seeds_cDNA_P Parameter: Tissue Value: Germinating Seeds
  misc_feature: MA Experiment ID: 108576 Result: Up-regulated in Transcription
  misc_feature: MA Experiment 108576 PARAMETER Experiment Name: At_42deg_Heat_cDNA_P Parameter: Temperature (deg C) Value: 42 vs. 22
  misc_feature: MA Experiment 108576 PARAMETER Experiment Name: At_42deg_Heat_cDNA_P Parameter: Timepoint (hr) Value: 1
  misc_feature: MA Experiment 108576 PARAMETER Experiment Name: At_42deg_Heat_cDNA_P Parameter: Tissue Value: Aerial
  misc_feature: MA Experiment ID: 20000030 Result: Down-regulated in Transcription
  misc_feature: MA Experiment 20000030 PARAMETER Experiment Name: At_CS6630_Roots_cDNA_P Parameter: Plant Line Value: CS6630 vs. WS
  misc_feature: MA Experiment 20000030 PARAMETER Experiment Name: At_CS6630_Roots_cDNA_P Parameter: Tissue Value: Roots
  misc_feature: MA Experiment ID: 20000179 Result: Up-regulated in Transcription
  misc_feature: MA Experiment 20000179 PARAMETER Experiment Name: At_Germinating_Seeds_P Parameter: Age (hr) Value: 6 vs. 0
  misc_feature: MA Experiment 20000179 PARAMETER Experiment Name: At_Germinating_Seeds_P Parameter: Tissue Value: Germinating Seeds
  misc_feature: MA Experiment ID: 20000180 Result: Up-regulated in Transcription
  misc_feature: MA Experiment 20000180 PARAMETER Experiment Name: At_Germinating_Seeds_P Parameter: Age (hr) Value: 24 vs. 0
  misc_feature: MA Experiment 20000180 PARAMETER Experiment Name: At_Germinating_Seeds_P Parameter: Tissue Value: Germinating Seeds
  misc_feature: MA Experiment ID: 20000185 Result: Up-regulated in Transcription
  misc_feature: MA Experiment 20000185 PARAMETER Experiment Name: At_Roots__P Parameter: Age (day) Value: 7 vs. 21
  misc_feature: MA Experiment 20000185 PARAMETER Experiment Name: At_Roots__P Parameter: Organism Value: A. thaliana
  misc_feature: MA Experiment 20000185 PARAMETER Experiment Name: At_Roots__P Parameter: Tissue Value: Roots vs. Whole Plant
  misc_feature: MA Experiment ID: 20000224 Result: Down-regulated in Transcription
  misc_feature: MA Experiment ID: 20000227 Result: Up-regulated in Transcription
  misc_feature: MA Experiment 20000227 PARAMETER Experiment Name: At_Root-Tips-vs-Tops_P Parameter: Tissue Value: Root Tips vs. Root Tops
  misc_feature: MA Experiment ID: 20000264 Result: Down-regulated in Transcription
  misc_feature: MA Experiment 20000264 PARAMETER Experiment Name: At_Open_Flower_P Parameter: Age (day) Value: 21
  misc_feature: MA Experiment 20000264 PARAMETER Experiment Name: At_Open_Flower_P Parameter: Plant Line Value: WS
  misc_feature: MA Experiment 20000264 PARAMETER Experiment Name: At_Open_Flower_P Parameter: Tissue Value: Open Flower vs. Whole Plant
  misc_feature: MA Experiment ID: 20000265 Result: Down-regulated in Transcription
  misc_feature: MA Experiment 20000265 PARAMETER Experiment Name: At_Open_Flower_P Parameter: Age (day) Value: 21
  misc_feature: MA Experiment 20000265 PARAMETER Experiment Name: At_Open_Flower_P Parameter: Plant Line Value: WS
  misc_feature: MA Experiment 20000265 PARAMETER Experiment Name: At_Open_Flower_P Parameter: Tissue Value: Closed Flower vs. Whole Plant
  misc_feature: MA Experiment ID: 20000267 Result: Down-regulated in Transcription
  misc_feature: MA Experiment 20000267 PARAMETER Experiment Name: At_Drought_P Parameter: Age (day) Value: 7
  misc_feature: MA Experiment 20000267 PARAMETER Experiment Name: At_Drought_P Parameter: Organism Value: A. thaliana
  misc_feature: MA Experiment 20000267 PARAMETER Experiment Name: At_Drought_P Parameter: Plant Line Value: WS
  misc_feature: MA Experiment 20000267 PARAMETER Experiment Name: At_Drought_P Parameter: Timepoint (hr) Value: 6
  misc_feature: MA Experiment 20000267 PARAMETER Experiment Name: At_Drought_P Parameter: Tissue Value: Whole Plant
  misc_feature: MA Experiment 20000267 PARAMETER Experiment Name: At_Drought_P Parameter: Treatment Value: Drought vs. No Drought
  misc_feature: MA Experiment ID: 20000436 Result: Down-regulated in Transcription
  misc_feature: MA Experiment 20000436 PARAMETER Experiment Name: At_Drought_P Parameter: Age (day) Value: 7
  misc_feature: MA Experiment 20000436 PARAMETER Experiment Name: At_Drought_P Parameter: Organism Value: A. thaliana
  misc_feature: MA Experiment 20000436 PARAMETER Experiment Name: At_Drought_P Parameter: Plant Line Value: WS
  misc_feature: MA Experiment 20000436 PARAMETER Experiment Name: At_Drought_P Parameter: Timepoint (hr) Value: 12
  misc_feature: MA Experiment 20000436 PARAMETER Experiment Name: At_Drought_P Parameter: Tissue Value: Whole Plant
  misc_feature: MA Experiment 20000436 PARAMETER Experiment Name: At_Drought_P Parameter: Treatment Value: Drought vs. No Drought
  misc_feature: MA Experiment ID: 20000437 Result: Down-regulated in Transcription
  misc_feature: MA Experiment 20000437 PARAMETER Experiment Name: At_Drought_P Parameter: Age (day) Value: 8
  misc_feature: MA Experiment 20000437 PARAMETER Experiment Name: At_Drought_P Parameter: Organism Value: A. thaliana
  misc_feature: MA Experiment 20000437 PARAMETER Experiment Name: At_Drought_P Parameter: Plant Line Value: WS
  misc_feature: MA Experiment 20000437 PARAMETER Experiment Name: At_Drought_P Parameter: Timepoint (hr) Value: 24
  misc_feature: MA Experiment 20000437 PARAMETER Experiment Name: At_Drought_P Parameter: Tissue Value: Whole Plant
  misc_feature: MA Experiment 20000437 PARAMETER Experiment Name: At_Drought_P Parameter: Treatment Value: Drought vs. No Drought
  misc_feature: MA Experiment ID: 20000439 Result: Up-regulated in Transcription
  misc_feature: MA Experiment 20000439 PARAMETER Experiment Name: At_Roots__P Parameter: Age (day) Value: 14 vs. 21
  misc_feature: MA Experiment 20000439 PARAMETER Experiment Name: At_Roots__P Parameter: Organism Value: A. thaliana
  misc_feature: MA Experiment 20000439 PARAMETER Experiment Name: At_Roots__P Parameter: Tissue Value: Roots vs. Whole Plant
  misc_feature: MA Experiment ID: 20000451 Result: Down-regulated in Transcription
  misc_feature: MA Experiment 20000451 PARAMETER Experiment Name: At_CS6879_Shoots-Roots_P Parameter: Age (day) Value: 14
  misc_feature: MA Experiment 20000451 PARAMETER Experiment Name: At_CS6879_Shoots-Roots_P Parameter: Organism Value: A. thaliana
  misc_feature: MA Experiment 20000451 PARAMETER Experiment Name: At_CS6879_Shoots-Roots_P Parameter: Plant Line Value: CS6879 vs. WS
  misc_feature: MA Experiment 20000451 PARAMETER Experiment Name: At_CS6879_Shoots-Roots_P Parameter: Tissue Value: Roots
  misc_feature: MA Experiment ID: 20000573 Result: Down-regulated in Transcription
  misc_feature: MA Experiment 20000573 PARAMETER Experiment Name: At_100uM_ABA_Mutants__P Parameter: Organism Value: A. thaliana
  misc_feature: MA Experiment 20000573 PARAMETER Experiment Name: At_100uM_ABA_Mutants__P Parameter: Plant Line Value: CS22 vs. Ler wt
  misc_feature: MA Experiment 20000573 PARAMETER Experiment Name: At_100uM_ABA_Mutants__P Parameter: Timepoint (hr) Value: N/A
  misc_feature: MA Experiment 20000573 PARAMETER Experiment Name: At_100uM_ABA_Mutants__P Parameter: Tissue Value: Whole Plant
  misc_feature: MA Experiment 20000573 PARAMETER Experiment Name: At_100uM_ABA_Mutants__P Parameter: Treatment Value: None
  misc_feature: MA Experiment ID: 20000794 Result: Down-regulated in Transcription
  misc_feature: MA Experiment 20000794 PARAMETER Experiment Name: At_Petals_P Parameter: Age (day) Value: 23-25 days
  misc_feature: MA Experiment 20000794 PARAMETER Experiment Name: At_Petals_P Parameter: Plant Line Value: WS
  misc_feature: MA Experiment 20000794 PARAMETER Experiment Name: At_Petals_P Parameter: Tissue Value: Petals vs. Whole plant
  misc_feature: MA Experiment ID: 20001247 Result: Down-regulated in Transcription
  misc_feature: MA Experiment 20001247 PARAMETER Experiment Name: At_Far-red-induction_P Parameter: Age (day) Value: 7
  misc_feature: MA Experiment 20001247 PARAMETER Experiment Name: At_Far-red-induction_P Parameter: Light Value: Far-red vs. White
  misc_feature: MA Experiment 20001247 PARAMETER Experiment Name: At_Far-red-induction_P Parameter: Organism Value: A. thaliana
  misc_feature: MA Experiment 20001247 PARAMETER Experiment Name: At_Far-red-induction_P Parameter: Plant Line Value: Columbia
  misc_feature: MA Experiment 20001247 PARAMETER Experiment Name: At_Far-red-induction_P Parameter: Timepoint (hr) Value: 1
  misc_feature: MA Experiment 20001247 PARAMETER Experiment Name: At_Far-red-induction_P Parameter: Tissue Value: Whole Plant
  misc_feature: MA Experiment ID: 20001450 Result: Down-regulated in Transcription
  misc_feature: MA Experiment 20001450 PARAMETER Experiment Name: At_Far-red-induction_P Parameter: Age (day) Value: 7
  misc_feature: MA Experiment 20001450 PARAMETER Experiment Name: At_Far-red-induction_P Parameter: Light Value: Far-red vs. White
  misc_feature: MA Experiment 20001450 PARAMETER Experiment Name: At_Far-red-induction_P Parameter: Organism Value: A. thaliana
  misc_feature: MA Experiment 20001450 PARAMETER Experiment Name: At_Far-red-induction_P Parameter: Plant Line Value: Columbia
  misc_feature: MA Experiment 20001450 PARAMETER Experiment Name: At_Far-red-induction_P Parameter: Timepoint (hr) Value: 8
  misc_feature: MA Experiment 20001450 PARAMETER Experiment Name: At_Far-red-induction_P Parameter: Tissue Value: Whole Plant
aactaaatcagaagattactactaaacagagtcttttttgacttgccaaaaacacatctgtctctctctctctttgcggatctgaaatggcgattcctgttatcgatttctccaaactcaatggtgaagaaagagagaagacactgtctgaaatcgctagagcttgcgaagagtggggattttttcagctggtgaaccatggtattccattggagcttctaaataaggtgaagaagctgagctcagattgctacaaaacagagagagaagaagcattcaagacttctaatcccgtgaagttgctcaacgaattggttcaaaagaactctggcgagaagctagaaaacgtggactgggaagatgtcttcactctcttggaccataaccaaaacgaatggccatccaaaattaaagagactatgggagaatacagagaagaagtgaggaagctagcgagcaagatgatggaagtgatggatgagaatttgggtttgcctaaaggttacataaagaaagctttcaatgaaggaatggaagatggagaagagacagctttctttgggactaaagtcagccattaccctccttgtcctcatcctgagctagtcaatggccttcgagctcatactgatgcaggaggtgtcgttttgcttttccaagacgatgaatatgatggccttcaggtcttgaaagacggcgagtggatcgatgttcagcctctacctaatgccattgttatcaacactggtgatcagattgaagttcttagcaacggaaggtacaagagtgcgtggcacagggtggtggcgagggaggaaggaaacagaaggtctatagcttccttctacaatccgtcgtacaaggcggcgatagggccagccacggtggcggaagaggaaggaagtgagaagaagtatccaaagtttgtgtttggagattacatggatgtttatgcaaaccagaagttcatgcctaaagagcctcgttttctagctgtaaagtctctctaaatgtactattttatttatttttacagtactatcactgttttatctacacccattatgtattttctcttaagctataaatgccaaattatatagttaaaaatttggcatctgctctccaggctttatatttttttgtttttttttgttttgccatgtgatgtatgaatctttcttgtgtgacctatgttcttagtttttgaatataaatgtgtgtgcctttttctt

SEQ ID NO: 37275 - protein, 307 aa, Arabidopsis thaliana
  peptide (1)..(307): Ceres Seq. ID no. 12329564
  misc_feature (156)..(256): Pfam Name: 2OG-Fe(II) oxygenase superfamily Pfam Description: 2OG-Fe(II) oxygenase superfamily
  misc_feature (1)..(306): Homolog of NCBI NO: 25285704 NR Description: 1-aminocyclopropane-1-carboxylate oxidase (EC
  misc_feature (1)..(306): Homolog of NCBI NO: 15220770 NR Description: ACC oxidase, putative
  misc_feature (1)..(306): Homolog of NCBI NO: 7433217 NR Description: 1-aminocyclopropane-1-carboxylate oxidase (EC
  misc_feature (1)..(307): Homolog of NCBI NO: 25452792 NR Description: 1-aminocyclopropane-1-carboxylate oxidase (ACC
  misc_feature (1)..(307): Homolog of NCBI NO: 12001828 NR Description: 1-aminocyclopropane-1-carboxylate oxidase; ACC
  misc_feature (1)..(307): Homolog of NCBI NO: 27371996 NR Description: 1-aminocyclopropane-1-carboxylic acid oxidase
  misc_feature (1)..(307): Homolog of NCBI NO: 28949891 NR Description: 1-aminocyclopropane-1-carboxylic acid oxidase
  misc_feature (1)..(307): Homolog of NCBI NO: 25285689 NR Description: hypothetical protein F2P24.4 [imported] -
  misc_feature (1)..(307): Homolog of NCBI NO: 18411485 NR Description: 1-aminocyclopropane-1-carboxylate oxidase,
  misc_feature (1)..(307): Homolog of NCBI NO: 21555054 NR Description: 1-aminocyclopropane-1-carboxylate oxidase,
MAIPVIDFSKLNGEEREKTLSEIARACEEWGFFQLVNHGIPLELLNKVKKLSSDCYKTEREEAFKTSNPVKLLNELVQKNSGEKLENVDWEDVFTLLDHNQNEWPSKIKETMGEYREEVRKLASKMMEVMDENLGLPKGYIKKAFNEGMEDGEETAFFGTKVSHYPPCPHPELVNGLRAHTDAGGVVLLFQDDEYDGLQVLKDGEWIDVQPLPNAIVINTGDQIEVLSNGRYKSAWHRVVAREEGNRRSIASFYNPSYKAAIGPATVAEEEGSEKKYPKFVFGDYMDVYANQKFMPKEPRFLAVKSL

SEQ ID NO: 37276 - protein, 196 aa, Arabidopsis thaliana
  peptide (1)..(196): Ceres Seq. ID no. 12329565
  misc_feature (45)..(145): Pfam Name: 2OG-Fe(II) oxygenase superfamily Pfam Description: 2OG-Fe(II) oxygenase superfamily
  misc_feature (1)..(195): Homolog of NCBI NO: 25285704 NR Description: 1-aminocyclopropane-1-carboxylate oxidase (EC
  misc_feature (1)..(195): Homolog of NCBI NO: 15220770 NR Description: ACC oxidase, putative
  misc_feature (1)..(195): Homolog of NCBI NO: 7433217 NR Description: 1-aminocyclopropane-1-carboxylate oxidase (EC
  misc_feature (1)..(196): Homolog of NCBI NO: 25452792 NR Description: 1-aminocyclopropane-1-carboxylate oxidase (ACC
  misc_feature (1)..(196): Homolog of NCBI NO: 12001828 NR Description: 1-aminocyclopropane-1-carboxylate oxidase; ACC
  misc_feature (1)..(196): Homolog of NCBI NO: 27371996 NR Description: 1-aminocyclopropane-1-carboxylic acid oxidase
  misc_feature (1)..(196): Homolog of NCBI NO: 28949891 NR Description: 1-aminocyclopropane-1-carboxylic acid oxidase
  misc_feature (1)..(196): Homolog of NCBI NO: 25285689 NR Description: hypothetical protein F2P24.4 [imported] -
  misc_feature (1)..(196): Homolog of NCBI NO: 18411485 NR Description: 1-aminocyclopropane-1-carboxylate oxidase,
  misc_feature (1)..(196): Homolog of NCBI NO: 21555054 NR Description: 1-aminocyclopropane-1-carboxylate oxidase,
MGEYREEVRKLASKMMEVMDENLGLPKGYIKKAFNEGMEDGEETAFFGTKVSHYPPCPHPELVNGLRAHTDAGGVVLLFQDDEYDGLQVLKDGEWIDVQPLPNAIVINTGDQIEVLSNGRYKSAWHRVVAREEGNRRSIASFYNPSYKAAIGPATVAEEEGSEKKYPKFVFGDYMDVYANQKFMPKEPRFLAVKSL

SEQ ID NO: 37277 - protein, 182 aa, Arabidopsis thaliana
  peptide (1)..(182): Ceres Seq. ID no. 12329566
  misc_feature (31)..(131): Pfam Name: 2OG-Fe(II) oxygenase superfamily Pfam Description: 2OG-Fe(II) oxygenase superfamily
  misc_feature (1)..(181): Homolog of NCBI NO: 25285704 NR Description: 1-aminocyclopropane-1-carboxylate oxidase (EC
  misc_feature (1)..(181): Homolog of NCBI NO: 15220770 NR Description: ACC oxidase, putative
  misc_feature (1)..(181): Homolog of NCBI NO: 7433217 NR Description: 1-aminocyclopropane-1-carboxylate oxidase (EC
  misc_feature (1)..(182): Homolog of NCBI NO: 25452792 NR Description: 1-aminocyclopropane-1-carboxylate oxidase (ACC
  misc_feature (1)..(182): Homolog of NCBI NO: 12001828 NR Description: 1-aminocyclopropane-1-carboxylate oxidase; ACC
  misc_feature (1)..(182): Homolog of NCBI NO: 27371996 NR Description: 1-aminocyclopropane-1-carboxylic acid oxidase
  misc_feature (1)..(182): Homolog of NCBI NO: 28949891 NR Description: 1-aminocyclopropane-1-carboxylic acid oxidase
  misc_feature (1)..(182): Homolog of NCBI NO: 25285689 NR Description: hypothetical protein F2P24.4 [imported] -
  misc_feature (1)..(182): Homolog of NCBI NO: 18411485 NR Description: 1-aminocyclopropane-1-carboxylate oxidase,
  misc_feature (1)..(182): Homolog of NCBI NO: 21555054 NR Description: 1-aminocyclopropane-1-carboxylate oxidase,
MMEVMDENLGLPKGYIKKAFNEGMEDGEETAFFGTKVSHYPPCPHPELVNGLRAHTDAGGVVLLFQDDEYDGLQVLKDGEWIDVQPLPNAIVINTGDQIEVLSNGRYKSAWHRVVAREEGNRRSIASFYNPSYKAAIGPATVAEEEGSEKKYPKFVFGDYMDVYANQKFMPKEPRFLAVKSL

SEQ ID NO: 37278 - DNA, 1810 bp, Arabidopsis thaliana
  misc_feature (1)..(1810): Ceres Seq. ID no. 12329567
  misc_feature: MA Experiment ID: 20000184 Result: Down-regulated in Transcription
  misc_feature: MA Experiment 20000184 PARAMETER Experiment Name: At_Shoots__P Parameter: Age (day) Value: 7
  misc_feature: MA Experiment 20000184 PARAMETER Experiment Name: At_Shoots__P Parameter: Tissue Value: Shoots vs. Whole Plant
accggaggcaaaaatcgtctctcgcttgagctgcgaagatgcaagcagtaaaaagatccaggagacatgttgaagaagagccaacaatggtagaacctaaaaccaagtacgatcgtcagctcaggatttggggggaggtaggtcaagcggccttggaagaagcgagtatctgtttactcaattgtggccctactggttccgaggctttgaagaatctcgtacttggtggtgttggtagcatcaccgttgttgatggatctaaggttcaatttggtgaccttgggaacaatttcatggtcgatgcgaagagtgttggccaatcaaaagccaaatctgtttgtgcgtttctccaagagcttaatgattctgttaacgccaagtttattgaggagaatccagacacgttgattactactaacccatctttcttctctcagttcactctcgttatagccactcagctggtggaagattcaatgttgaaacttgatagaatctgtcgagatgcaaacgttaagttggttttggttcgctcttatggccttgctgggtttgttcgcatctctgtaaaggagcaccccataattgactcaaaacctgatcattttcttgacgacctccgcctgaataatccatggcctgaactcaagagttttgtggagaccattgatctgaatgtatcagagccggccgctgcacataagcacataccttacgtcgtcattcttgtaaagatggctgaggagtgggctcaatcccatagtggtaatcttccctcaaccagggaagagaaaaaagagtttaaggatttggttaagtccaagatggtatctacggatgaagataactacaaagaagccattgaagccgctttcaaagtttttgctcctcgaggaatcagctcagaggttcaaaaattaattaatgatagttgtgctgaagtgaattcaaactcctcagctttttgggtgatggtagcggctctgaaggagtttgttttaaatgaaggtggtggagaggcaccccttgaaggttctataccagatatgacctcttcaacagaacactatatcaatttgcagaaaatctatttagccaaagccgaggctgattttcttgtcattgaggaacgagttaaaaacattttaaagaaaatcggtcgagatccgagcagcatcccaaaaccaacaatcaagagcttctgcaagaatgcaaggaaacttaaattgtgcagatatcgtatggtagaggacgagttcagaaatccttctgtaactgaaattcaaaagtatttagcggacgaggattacagtggtgcaatgggattttatattcttcttagagctgcggacagatttgctgccaactataacaagtttcctgggcagtttgatggaggaatggatgaggacatttctcgattaaaaactactgccttgagtcttcttaccgacttgggctgtaacggctcagtactcccagatgaccttatccatgagatgtgtcgctttggtgcctcagagattcatgtggtttctgcctttgttggaggaatcgcatctcaagaagtcatcaagcttgtcacaaagcagtttgttccgatgttggggacttacatcttcaatggcattgatcacaagtctcagttattgaaattgtagaagatctttccttaacacattggcttgaaacagagagaaagagctctatcatatattattcttctgattaaaagataatctttttgctactactgagaaacaaaattttcaatgacagttcagctgagaccatccgactcagaatcttc

SEQ ID NO: 37279 - protein, 540 aa, Arabidopsis thaliana
  peptide (1)..(540): Ceres Seq. ID no. 12329568
  misc_feature (40)..(176): Pfam Name: ThiF family Pfam Description: ThiF family
  misc_feature (23)..(540): Homolog of NCBI NO: 14091760 NR Description: APP-binding protein 1 [Rattus norvegicus]
  misc_feature (17)..(540): Homolog of NCBI NO: 33416343 NR Description: Unknown (protein for MGC:66148) [Danio rerio]
  misc_feature (23)..(540): Homolog of NCBI NO: 4502169 NR Description: amyloid beta precursor protein-binding protein 1
  misc_feature (14)..(540): Homolog of NCBI NO: 23274055 NR Description: amyloid beta precursor protein binding protein 1,
  misc_feature (23)..(540): Homolog of NCBI NO: 40889581 NR Description: Chain A, Appbp1-Uba3-Nedd8, An E1-Ubiquitin-Like
  misc_feature (14)..(540): Homolog of NCBI NO: 21450341 NR Description: amyloid beta precursor protein binding protein 1
  misc_feature (19)..(540): Homolog of NCBI NO: 29124136 NR Description: putative ubiquitin-activating enzyme (alternative
  misc_feature (19)..(540): Homolog of NCBI NO: 29124137 NR Description: putative ubiquitin-activating enzyme (alternative
  misc_feature (17)..(540): Homolog of NCBI NO: 15225241 NR Description: putative ubiquitin activating enzyme; protein id:
  misc_feature (1)..(540): Homolog of NCBI NO: 15220442 NR Description: RUB-activating enzyme AXR1
MQAVKRSRRHVEEEPTMVEPKTKYDRQLRIWGEVGQAALEEASICLLNCGPTGSEALKNLVLGGVGSITVVDGSKVQFGDLGNNFMVDAKSVGQSKAKSVCAFLQELNDSVNAKFIEENPDTLITTNPSFFSQFTLVIATQLVEDSMLKLDRICRDANVKLVLVRSYGLAGFVRISVKEHPIIDSKPDHFLDDLRLNNPWPELKSFVETIDLNVSEPAAAHKHIPYVVILVKMAEEWAQSHSGNLPSTREEKKEFKDLVKSKMVSTDEDNYKEAIEAAFKVFAPRGISSEVQKLINDSCAEVNSNSSAFWVMVAALKEFVLNEGGGEAPLEGSIPDMTSSTEHYINLQKIYLAKAEADFLVIEERVKNILKKIGRDPSSIPKPTIKSFCKNARKLKLCRYRMVEDEFRNPSVTEIQKYLADEDYSGAMGFYILLRAADRFAANYNKFPGQFDGGMDEDISRLKTTALSLLTDLGCNGSVLPDDLIHEMCRFGASEIHVVSAFVGGIASQEVIKLVTKQFVPMLGTYIFNGIDHKSQLLKL

SEQ ID NO: 37280 - protein, 524 aa, Arabidopsis thaliana
  peptide (1)..(524): Ceres Seq. ID no. 12329569
  misc_feature (24)..(160): Pfam Name: ThiF family Pfam Description: ThiF family
  misc_feature (7)..(524): Homolog of NCBI NO: 14091760 NR Description: APP-binding protein 1 [Rattus norvegicus]
  misc_feature (1)..(524): Homolog of NCBI NO: 33416343 NR Description: Unknown (protein for MGC:66148) [Danio rerio]
  misc_feature (7)..(524): Homolog of NCBI NO: 4502169 NR Description: amyloid beta precursor protein-binding protein 1
  misc_feature (1)..(524): Homolog of NCBI NO: 23274055 NR Description: amyloid beta precursor protein binding protein 1,
  misc_feature (7)..(524): Homolog of NCBI NO: 40889581 NR Description: Chain A, Appbp1-Uba3-Nedd8, An E1-Ubiquitin-Like
  misc_feature (1)..(524): Homolog of NCBI NO: 21450341 NR Description: amyloid beta precursor protein binding protein 1
  misc_feature (3)..(524): Homolog of NCBI NO: 29124136 NR Description: putative ubiquitin-activating enzyme (alternative
  misc_feature (3)..(524): Homolog of NCBI NO: 29124137 NR Description: putative ubiquitin-activating enzyme (alternative
  misc_feature (1)..(524): Homolog of NCBI NO: 15225241 NR Description: putative ubiquitin activating enzyme; protein id:
  misc_feature (1)..(524): Homolog of NCBI NO: 15220442 NR Description: RUB-activating enzyme AXR1
MVEPKTKYDRQLRIWGEVGQAALEEASICLLNCGPTGSEALKNLVLGGVGSITVVDGSKVQFGDLGNNFMVDAKSVGQSKAKSVCAFLQELNDSVNAKFIEENPDTLITTNPSFFSQFTLVIATQLVEDSMLKLDRICRDANVKLVLVRSYGLAGFVRISVKEHPIIDSKPDHFLDDLRLNNPWPELKSFVETIDLNVSEPAAAHKHIPYVVILVKMAEEWAQSHSGNLPSTREEKKEFKDLVKSKMVSTDEDNYKEAIEAAFKVFAPRGISSEVQKLINDSCAEVNSNSSAFWVMVAALKEFVLNEGGGEAPLEGSIPDMTSSTEHYINLQKIYLAKAEADFLVIEERVKNILKKIGRDPSSIPKPTIKSFCKNARKLKLCRYRMVEDEFRNPSVTEIQKYLADEDYSGAMGFYILLRAADRFAANYNKFPGQFDGGMDEDISRLKTTALSLLTDLGCNGSVLPDDLIHEMCRFGASEIHVVSAFVGGIASQEVIKLVTKQFVPMLGTYIFNGIDHKSQLLKL

SEQ ID NO: 37281 - protein, 455 aa, Arabidopsis thaliana
  peptide (1)..(455): Ceres Seq. ID no. 12329570
  misc_feature (1)..(91): Pfam Name: ThiF family Pfam Description: ThiF family
  misc_feature (1)..(455): Homolog of NCBI NO: 14091760 NR Description: APP-binding protein 1 [Rattus norvegicus]
  misc_feature (1)..(455): Homolog of NCBI NO: 33416343 NR Description: Unknown (protein for MGC:66148) [Danio rerio]
  misc_feature (1)..(455): Homolog of NCBI NO: 4502169 NR Description: amyloid beta precursor protein-binding protein 1
  misc_feature (1)..(455): Homolog of NCBI NO: 23274055 NR Description: amyloid beta precursor protein binding protein 1,
  misc_feature (1)..(455): Homolog of NCBI NO: 40889581 NR Description: Chain A, Appbp1-Uba3-Nedd8, An E1-Ubiquitin-Like
  misc_feature (1)..(455): Homolog of NCBI NO: 21450341 NR Description: amyloid beta precursor protein binding protein 1
  misc_feature (1)..(455): Homolog of NCBI NO: 29124136 NR Description: putative ubiquitin-activating enzyme (alternative
  misc_feature (1)..(455): Homolog of NCBI NO: 29124137 NR Description: putative ubiquitin-activating enzyme (alternative
  misc_feature (1)..(455): Homolog of NCBI NO: 15225241 NR Description: putative ubiquitin activating enzyme; protein id:
  misc_feature (1)..(455): Homolog of NCBI NO: 15220442 NR Description: RUB-activating enzyme AXR1
MVDAKSVGQSKAKSVCAFLQELNDSVNAKFIEENPDTLITTNPSFFSQFTLVIATQLVEDSMLKLDRICRDANVKLVLVRSYGLAGFVRISVKEHPIIDSKPDHFLDDLRLNNPWPELKSFVETIDLNVSEPAAAHKHIPYVVILVKMAEEWAQSHSGNLPSTREEKKEFKDLVKSKMVSTDEDNYKEAIEAAFKVFAPRGISSEVQKLINDSCAEVNSNSSAFWVMVAALKEFVLNEGGGEAPLEGSIPDMTSSTEHYINLQKIYLAKAEADFLVIEERVKNILKKIGRDPSSIPKPTIKSFCKNARKLKLCRYRMVEDEFRNPSVTEIQKYLADEDYSGAMGFYILLRAADRFAANYNKFPGQFDGGMDEDISRLKTTALSLLTDLGCNGSVLPDDLIHEMCRFGASEIHVVSAFVGGIASQEVIKLVTKQFVPMLGTYIFNGIDHKSQLLKL

SEQ ID NO: 37282 - DNA, 1264 bp, Arabidopsis thaliana
  misc_feature (1)..(1264): Ceres Seq. ID no. 12562497
  misc_feature: MA Experiment ID: 108463 Result: Up-regulated in Transcription
  misc_feature: MA Experiment 108463 PARAMETER Experiment Name: At_Germinating_Seeds_cDNA_P Parameter: Age (day) Value: 3 vs. 0
  misc_feature: MA Experiment 108463 PARAMETER Experiment Name: At_Germinating_Seeds_cDNA_P Parameter: Tissue Value: Germinating Seeds
  misc_feature: MA Experiment ID: 108464 Result: Up-regulated in Transcription
  misc_feature: MA Experiment 108464 PARAMETER Experiment Name: At_Germinating_Seeds_cDNA_P Parameter: Age (day) Value: 4 vs. 0
  misc_feature: MA Experiment 108464 PARAMETER Experiment Name: At_Germinating_Seeds_cDNA_P Parameter: Tissue Value: Germinating Seeds
  misc_feature: MA Experiment ID: 108572 Result: Down-regulated in Transcription
  misc_feature: MA Experiment 108572 PARAMETER Experiment Name: At_Drought_cDNA_P Parameter: Timepoint (hr) Value: 1
  misc_feature: MA Experiment 108572 PARAMETER Experiment Name: At_Drought_cDNA_P Parameter: Tissue Value: Aerial
  misc_feature: MA Experiment 108572 PARAMETER Experiment Name: At_Drought_cDNA_P Parameter: Treatment Value: Drought vs. No Drought
  misc_feature: MA Experiment ID: 108577 Result: Up-regulated in Transcription
  misc_feature: MA Experiment 108577 PARAMETER Experiment Name: At_42deg_Heat_cDNA_P Parameter: Temperature (deg C) Value: 42 vs. 22
  misc_feature: MA Experiment 108577 PARAMETER Experiment Name: At_42deg_Heat_cDNA_P Parameter: Timepoint (hr) Value: 6
  misc_feature: MA Experiment 108577 PARAMETER Experiment Name: At_42deg_Heat_cDNA_P Parameter: Tissue Value: Aerial
  misc_feature: MA Experiment ID: 108579 Result: Up-regulated in Transcription
  misc_feature: MA Experiment 108579 PARAMETER Experiment Name: At_4deg_Cold_cDNA_P Parameter: Temperature (deg C) Value: 4 vs. 22
  misc_feature: MA Experiment 108579 PARAMETER Experiment Name: At_4deg_Cold_cDNA_P Parameter: Timepoint (hr) Value: 6
  misc_feature: MA Experiment 108579 PARAMETER Experiment Name: At_4deg_Cold_cDNA_P Parameter: Tissue Value: Aerial
  misc_feature: MA Experiment ID: 108595 Result: Down-regulated in Transcription
  misc_feature: MA Experiment 108595 PARAMETER Experiment Name: At_Ler-pi_Ovule_cDNA_P Parameter: Plant Line Value: null
  misc_feature: MA Experiment ID: 20000072 Result: Down-regulated in Transcription
  misc_feature: MA Experiment 20000072 PARAMETER Experiment Name: At_100uM_ABA_Mutants_cDNA_P Parameter: Plant Line Value: CS8105
  misc_feature: MA Experiment 20000072 PARAMETER Experiment Name: At_100uM_ABA_Mutants_cDNA_P Parameter: Timepoint (hr) Value: 6
  misc_feature: MA Experiment 20000072 PARAMETER Experiment Name: At_100uM_ABA_Mutants_cDNA_P Parameter: Tissue Value: Aerial
  misc_feature: MA Experiment 20000072 PARAMETER Experiment Name: At_100uM_ABA_Mutants_cDNA_P Parameter: Treatment Value: 100uM ABA vs. No Treatment
  misc_feature: MA Experiment ID: 20000086 Result: Down-regulated in Transcription
  misc_feature: MA Experiment 20000086 PARAMETER Experiment Name: At_100uM_ABA_Mutants_cDNA_P Parameter: Plant Line Value: CS22
  misc_feature: MA Experiment 20000086 PARAMETER Experiment Name: At_100uM_ABA_Mutants_cDNA_P Parameter: Timepoint (hr) Value: 6
  misc_feature: MA Experiment 20000086 PARAMETER Experiment Name: At_100uM_ABA_Mutants_cDNA_P Parameter: Tissue Value: Aerial
  misc_feature: MA Experiment 20000086 PARAMETER Experiment Name: At_100uM_ABA_Mutants_cDNA_P Parameter: Treatment Value: 100uM ABA vs. No Treatment
  misc_feature: MA Experiment ID: 20000087 Result: Down-regulated in Transcription
  misc_feature: MA Experiment 20000087 PARAMETER Experiment Name: At_100uM_ABA_Mutants_cDNA_P Parameter: Plant Line Value: WS
  misc_feature: MA Experiment 20000087 PARAMETER Experiment Name: At_100uM_ABA_Mutants_cDNA_P Parameter: Timepoint (hr) Value: 6
  misc_feature: MA Experiment 20000087 PARAMETER Experiment Name: At_100uM_ABA_Mutants_cDNA_P Parameter: Tissue Value: Aerial
  misc_feature: MA Experiment 20000087 PARAMETER Experiment Name: At_100uM_ABA_Mutants_cDNA_P Parameter: Treatment Value: 100uM ABA vs. No Treatment
  misc_feature: MA Experiment ID: 20000088 Result: Down-regulated in Transcription
  misc_feature: MA Experiment 20000088 PARAMETER Experiment Name: At_100uM_ABA_Mutants_cDNA_P Parameter: Plant Line Value: Landsberg
  misc_feature: MA Experiment 20000088 PARAMETER Experiment Name: At_100uM_ABA_Mutants_cDNA_P Parameter: Timepoint (hr) Value: 6
  misc_feature: MA Experiment 20000088 PARAMETER Experiment Name: At_100uM_ABA_Mutants_cDNA_P Parameter: Tissue Value: Aerial
  misc_feature: MA Experiment 20000088 PARAMETER Experiment Name: At_100uM_ABA_Mutants_cDNA_P Parameter: Treatment Value: 100uM ABA vs. No Treatment
  misc_feature: MA Experiment ID: 20000089 Result: Down-regulated in Transcription
  misc_feature: MA Experiment ID: 20000090 Result: Down-regulated in Transcription
  misc_feature: MA Experiment ID: 20000111 Result: Up-regulated in Transcription
  misc_feature: MA Experiment 20000111 PARAMETER Experiment Name: At_42deg_Heat_cDNA_P Parameter: Temperature (deg C) Value: 42 vs. 22
  misc_feature: MA Experiment 20000111 PARAMETER Experiment Name: At_42deg_Heat_cDNA_P Parameter: Timepoint (hr) Value: 6
  misc_feature: MA Experiment 20000111 PARAMETER Experiment Name: At_42deg_Heat_cDNA_P Parameter: Tissue Value: Aerial
  misc_feature: MA Experiment ID: 20000173 Result: Up-regulated in Transcription
  misc_feature: MA Experiment 20000173 PARAMETER Experiment Name: At_42deg_Heat_P Parameter: Age (day) Value: 14
  misc_feature: MA Experiment 20000173 PARAMETER Experiment Name: At_42deg_Heat_P Parameter: Organism Value: A. thaliana
  misc_feature: MA Experiment 20000173 PARAMETER Experiment Name: At_42deg_Heat_P Parameter: Plant Line Value: WS
  misc_feature: MA Experiment 20000173 PARAMETER Experiment Name: At_42deg_Heat_P Parameter: Temperature (deg C) Value: 42 vs. 22
  misc_feature: MA Experiment 20000173 PARAMETER Experiment Name: At_42deg_Heat_P Parameter: Timepoint (hr) Value: 6
  misc_feature: MA Experiment 20000173 PARAMETER Experiment Name: At_42deg_Heat_P Parameter: Tissue Value: Aerial
  misc_feature: MA Experiment ID: 20000224 Result: Up-regulated in Transcription
  misc_feature: MA Experiment ID: 20000438 Result: Up-regulated in Transcription
  misc_feature: MA Experiment 20000438 PARAMETER Experiment Name: At_Shoots__P Parameter: Age (day) Value: 14
  misc_feature: MA Experiment 20000438 PARAMETER Experiment Name: At_Shoots__P Parameter: Tissue Value: Shoots vs. Whole Plant
  misc_feature: MA Experiment ID: 20001248 Result: Down-regulated in Transcription
  misc_feature: MA Experiment 20001248 PARAMETER Experiment Name: At_Far-red-induction_P Parameter: Age (day) Value: 7
  misc_feature: MA Experiment 20001248 PARAMETER Experiment Name: At_Far-red-induction_P Parameter: Light Value: Far-red vs. White
  misc_feature: MA Experiment 20001248 PARAMETER Experiment Name: At_Far-red-induction_P Parameter: Organism Value: A. thaliana
  misc_feature: MA Experiment 20001248 PARAMETER Experiment Name: At_Far-red-induction_P Parameter: Plant Line Value: Columbia
  misc_feature: MA Experiment 20001248 PARAMETER Experiment Name: At_Far-red-induction_P Parameter: Timepoint (hr) Value: 4
  misc_feature: MA Experiment 20001248 PARAMETER Experiment Name: At_Far-red-induction_P Parameter: Tissue Value: Whole Plant
  misc_feature: MA Experiment ID: 20001911 Result: Up-regulated in Transcription
  misc_feature: MA Experiment 20001911 PARAMETER Experiment Name: At_Drought_Reproduction_P Parameter: Age (day) Value: 40
  misc_feature: MA Experiment 20001911 PARAMETER Experiment Name: At_Drought_Reproduction_P Parameter: Organism Value: A. thaliana
  misc_feature: MA Experiment 20001911 PARAMETER Experiment Name: At_Drought_Reproduction_P Parameter: Plant Line Value: WS
  misc_feature: MA Experiment 20001911 PARAMETER Experiment Name: At_Drought_Reproduction_P Parameter: Timepoint (day) Value: 10
  misc_feature: MA Experiment 20001911 PARAMETER Experiment Name: At_Drought_Reproduction_P Parameter: Tissue Value: Flowers
  misc_feature: MA Experiment 20001911 PARAMETER Experiment Name: At_Drought_Reproduction_P Parameter: Treatment Value: Drought vs. No Drought
tagagcttcataatccctagttgcccaaaaggattctgggttttgtgagaatgatgacgtcatgtcggaatatagatttaggtacgatgatgatggcatgtggttgtggccgtcgtcagtttccttcattagcgaagactgtttgtaagtttggtagcagcaatagaagctatggcggtctggtgactctgtttgagctagtagctgttgatctgcagactttgaatgacaatcttttatcgattgttggtgcggaaaatccggttttgatatctgcggctgagcagatttncggagctggtggtanaagaatgagaccgggtttggtattccttcacatgccacggcggaattagcaggcctaaatgaactaacaacagaacaccggcgtttggctgagatcatcgagatgatacacactgcaagcttgatacacgacgatgtgttagacgagagtgacatgcgaagaggaaaggaaacagttcatgagcttttcggcacaagagtagcggtgctagctggagatttcatgtttgctcaagcgtcatggtacttagcaaatctcgagaatcttgaagttattaagctcatcagtcaggtgatcaaagactttgcaagcggagagataaagcaggcgtccagcttatttgactgcgacaccaagctcgacgagtacttactcaaaagtttctacaagacagcctctttagtggctgcgagcaccaaaggagctgccattttcagcagagttgagcctgatgtgacagaacaaatgtacgagtttgggaagaatctcggtctctctttccagatagttgatgatattttggatttcactcagtcgacagagcagctcgggaagccagcagggagtgatttggctaaaggtaacttaacagcacctgtgattttcgctctggagagggagccaaggctaagagagatcattgagtcagagttttgtgaggcgggttctctggaagaagcgattgaagcggtgacaaaaggtggggggattaagagagcacaagaattggctagggagaaagctgatgacgctataaagaatctacagtgtctacctcgaagtggcttcaggtcggctctagaagatatggtgttgtataacctcgaaagaattgattagctttccaaaagaagttggaaacactgagacatgcttatagacttatagtacagtaaaacacacacaaaagaggaatgattgtaactcctatttcaaaagtaacaacacatgatttcg

SEQ ID NO: 37283 - protein, 245 aa, Arabidopsis thaliana
  peptide (1)..(245): Ceres Seq. ID no. 12562498
  misc_feature (1)..(199): Pfam Name: Polyprenyl synthetase Pfam Description: Polyprenyl synthetase
  misc_feature (1)..(241): Homolog of NCBI NO: 11465411 NR Description: prenyl transferase [Cyanidium caldarium]
  misc_feature (1)..(244): Homolog of NCBI NO: 17227592 NR Description: solanesyl diphosphate synthase [Nostoc sp. PCC
  misc_feature (1)..(244): Homolog of NCBI NO: 23125555 NR Description: hypothetical protein [Nostoc punctiforme]
  misc_feature (1)..(244): Homolog of NCBI NO: 22299300 NR Description: solanesyl diphosphate synthase
  misc_feature (1)..(244): Homolog of NCBI NO: 16329171 NR Description: solanesyl diphosphate synthase [Synechocystis sp.
  misc_feature (1)..(245): Homolog of NCBI NO: 28393675 NR Description: putative geranyl diphosphate synthase (GPPS)
  misc_feature (1)..(245): Homolog of NCBI NO: 25314280 NR Description: prenyl transferase homolog [imported] -
  misc_feature (1)..(245): Homolog of NCBI NO: 22329620 NR Description: geranyl diphosphate synthase
  misc_feature (1)..(245): Homolog of NCBI NO: 30699332 NR Description: geranyl diphosphate synthase
  misc_feature (1)..(245): Homolog of NCBI NO: 25314331 NR Description: hypothetical protein T30F21.15 [imported] -
MIHTASLIHDDVLDESDMRRGKETVHELFGTRVAVLAGDFMFAQASWYLANLENLEVIKLISQVIKDFASGEIKQASSLFDCDTKLDEYLLKSFYKTASLVAASTKGAAIFSRVEPDVTEQMYEFGKNLGLSFQIVDDILDFTQSTEQLGKPAGSDLAKGNLTAPVIFALEREPRLREIIESEFCEAGSLEEAIEAVTKGGGIKRAQELAREKADDAIKNLQCLPRSGFRSALEDMVLYNLERID

SEQ ID NO: 37284 - protein, 228 aa, Arabidopsis thaliana
  peptide (1)..(228): Ceres Seq. ID no. 12562499
  misc_feature (1)..(182): Pfam Name: Polyprenyl synthetase Pfam Description: Polyprenyl synthetase
  misc_feature (1)..(224): Homolog of NCBI NO: 11465411 NR Description: prenyl transferase [Cyanidium caldarium]
  misc_feature (1)..(227): Homolog of NCBI NO: 17227592 NR Description: solanesyl diphosphate synthase [Nostoc sp. PCC
  misc_feature (1)..(227): Homolog of NCBI NO: 23125555 NR Description: hypothetical protein [Nostoc punctiforme]
  misc_feature (1)..(227): Homolog of NCBI NO: 22299300 NR Description: solanesyl diphosphate synthase
  misc_feature (1)..(227): Homolog of NCBI NO: 16329171 NR Description: solanesyl diphosphate synthase [Synechocystis sp.
  misc_feature (1)..(228): Homolog of NCBI NO: 28393675 NR Description: putative geranyl diphosphate synthase (GPPS)
  misc_feature (1)..(228): Homolog of NCBI NO: 25314280 NR Description: prenyl transferase homolog [imported] -
  misc_feature (1)..(228): Homolog of NCBI NO: 22329620 NR Description: geranyl diphosphate synthase
  misc_feature (1)..(228): Homolog of NCBI NO: 30699332 NR Description: geranyl diphosphate synthase
  misc_feature (1)..(228): Homolog of NCBI NO: 25314331 NR Description: hypothetical protein T30F21.15 [imported] -
MRRGKETVHELFGTRVAVLAGDFMFAQASWYLANLENLEVIKLISQVIKDFASGEIKQASSLFDCDTKLDEYLLKSFYKTASLVAASTKGAAIFSRVEPDVTEQMYEFGKNLGLSFQIVDDILDFTQSTEQLGKPAGSDLAKGNLTAPVIFALEREPRLREIIESEFCEAGSLEEAIEAVTKGGGIKRAQELAREKADDAIKNLQCLPRSGFRSALEDMVLYNLERID

SEQ ID NO: 37285 - protein, 205 aa, Arabidopsis thaliana
  peptide (1)..(205): Ceres Seq. ID no. 12562500
  misc_feature (1)..(159): Pfam Name: Polyprenyl synthetase Pfam Description: Polyprenyl synthetase
  misc_feature (1)..(201): Homolog of NCBI NO: 11465411 NR Description: prenyl transferase [Cyanidium caldarium]
  misc_feature (1)..(204): Homolog of NCBI NO: 17227592 NR Description: solanesyl diphosphate synthase [Nostoc sp. PCC
  misc_feature (1)..(204): Homolog of NCBI NO: 23125555 NR Description: hypothetical protein [Nostoc punctiforme]
  misc_feature (1)..(204): Homolog of NCBI NO: 22299300 NR Description: solanesyl diphosphate synthase
  misc_feature (1)..(204): Homolog of NCBI NO: 16329171 NR Description: solanesyl diphosphate synthase [Synechocystis sp.
  misc_feature (1)..(205): Homolog of NCBI NO: 28393675 NR Description: putative geranyl diphosphate synthase (GPPS)
  misc_feature (1)..(205): Homolog of NCBI NO: 25314280 NR Description: prenyl transferase homolog [imported] -
  misc_feature (1)..(205): Homolog of NCBI NO: 22329620 NR Description: geranyl diphosphate synthase
  misc_feature (1)..(205): Homolog of NCBI NO: 30699332 NR Description: geranyl diphosphate synthase
  misc_feature (1)..(205): Homolog of NCBI NO: 25314331 NR Description: hypothetical protein T30F21.15 [imported] -
MFAQASWYLANLENLEVIKLISQVIKDFASGEIKQASSLFDCDTKLDEYLLKSFYKTASLVAASTKGAAIFSRVEPDVTEQMYEFGKNLGLSFQIVDDILDFTQSTEQLGKPAGSDLAKGNLTAPVIFALEREPRLREIIESEFCEAGSLEEAIEAVTKGGGIKRAQELAREKADDAIKNLQCLPRSGFRSALEDMVLYNLERID

SEQ ID NO: 37286 - DNA, 1776 bp, Arabidopsis thaliana
  misc_feature (1)..(1776): Ceres Seq. ID no. 12562519
  misc_feature: MA Experiment ID: 108585 Result: Down-regulated in Transcription
  misc_feature: MA Experiment 108585 PARAMETER Experiment Name: At_5mM_NaNP_cDNA_P Parameter: Timepoint (hr) Value: 6
  misc_feature: MA Experiment 108585 PARAMETER Experiment Name: At_5mM_NaNP_cDNA_P Parameter: Tissue Value: Aerial
  misc_feature: MA Experiment 108585 PARAMETER Experiment Name: At_5mM_NaNP_cDNA_P Parameter: Treatment Value: null
  misc_feature: MA Experiment ID: 108595 Result: Up-regulated in Transcription
  misc_feature: MA Experiment 108595 PARAMETER Experiment Name: At_Ler-pi_Ovule_cDNA_P Parameter: Plant Line Value: null
  misc_feature: MA Experiment ID: 20000069 Result: Up-regulated in Transcription
  misc_feature: MA Experiment 20000069 PARAMETER Experiment Name: At_100uM_ABA_Mutants_cDNA_P Parameter: Plant Line Value: CS23
  misc_feature: MA Experiment 20000069 PARAMETER Experiment Name: At_100uM_ABA_Mutants_cDNA_P Parameter: Timepoint (hr) Value: 6
  misc_feature: MA Experiment 20000069 PARAMETER Experiment Name: At_100uM_ABA_Mutants_cDNA_P Parameter: Tissue Value: Aerial
  misc_feature: MA Experiment 20000069 PARAMETER Experiment Name: At_100uM_ABA_Mutants_cDNA_P Parameter: Treatment Value: 100uM ABA vs. No Treatment
  misc_feature: MA Experiment ID: 20000070 Result: Up-regulated in Transcription
  misc_feature: MA Experiment 20000070 PARAMETER Experiment Name: At_100uM_ABA_Mutants_cDNA_P Parameter: Plant Line Value: CS24
  misc_feature: MA Experiment 20000070 PARAMETER Experiment Name: At_100uM_ABA_Mutants_cDNA_P Parameter: Timepoint (hr) Value: 6
  misc_feature: MA Experiment 20000070 PARAMETER Experiment Name: At_100uM_ABA_Mutants_cDNA_P Parameter: Tissue Value: Aerial
  misc_feature: MA Experiment 20000070 PARAMETER Experiment Name: At_100uM_ABA_Mutants_cDNA_P Parameter: Treatment Value: 100uM ABA vs. No Treatment
  misc_feature: MA Experiment ID: 20000071 Result: Up-regulated in Transcription
  misc_feature: MA Experiment 20000071 PARAMETER Experiment Name: At_100uM_ABA_Mutants_cDNA_P Parameter: Plant Line Value: CS8104
  misc_feature: MA Experiment 20000071 PARAMETER Experiment Name: At_100uM_ABA_Mutants_cDNA_P Parameter: Timepoint (hr) Value: 6
  misc_feature: MA Experiment 20000071 PARAMETER Experiment Name: At_100uM_ABA_Mutants_cDNA_P Parameter: Tissue Value: Aerial
  misc_feature: MA Experiment 20000071 PARAMETER Experiment Name: At_100uM_ABA_Mutants_cDNA_P Parameter: Treatment Value: 100uM ABA vs. No Treatment
  misc_feature: MA Experiment ID: 20000072 Result: Up-regulated in Transcription
  misc_feature: MA Experiment 20000072 PARAMETER Experiment Name: At_100uM_ABA_Mutants_cDNA_P Parameter: Plant Line Value: CS8105
  misc_feature: MA Experiment 20000072 PARAMETER Experiment Name: At_100uM_ABA_Mutants_cDNA_P Parameter: Timepoint (hr) Value: 6
  misc_feature: MA Experiment 20000072 PARAMETER Experiment Name: At_100uM_ABA_Mutants_cDNA_P Parameter: Tissue Value: Aerial
  misc_feature: MA Experiment 20000072 PARAMETER Experiment Name: At_100uM_ABA_Mutants_cDNA_P Parameter: Treatment Value: 100uM ABA vs. No Treatment
  misc_feature: MA Experiment ID: 20000437 Result: Up-regulated in Transcription
  misc_feature: MA Experiment 20000437 PARAMETER Experiment Name: At_Drought_P Parameter: Age (day) Value: 8
  misc_feature: MA Experiment 20000437 PARAMETER Experiment Name: At_Drought_P Parameter: Organism Value: A. thaliana
  misc_feature: MA Experiment 20000437 PARAMETER Experiment Name: At_Drought_P Parameter: Plant Line Value: WS
  misc_feature: MA Experiment 20000437 PARAMETER Experiment Name: At_Drought_P Parameter: Timepoint (hr) Value: 24
  misc_feature: MA Experiment 20000437 PARAMETER Experiment Name: At_Drought_P Parameter: Tissue Value: Whole Plant
  misc_feature: MA Experiment 20000437 PARAMETER Experiment Name: At_Drought_P Parameter: Treatment Value: Drought vs. No Drought
  misc_feature: MA Experiment ID: 20001557 Result: Down-regulated in Transcription
  misc_feature: MA Experiment 20001557 PARAMETER Experiment Name: At_Drought_Soil_Dry_P Parameter: Age (day) Value: 27
  misc_feature: MA Experiment 20001557 PARAMETER Experiment Name: At_Drought_Soil_Dry_P Parameter: Organism Value: A. thaliana
  misc_feature: MA Experiment 20001557 PARAMETER Experiment Name: At_Drought_Soil_Dry_P Parameter: Plant Line Value: WS
  misc_feature: MA Experiment 20001557 PARAMETER Experiment Name: At_Drought_Soil_Dry_P Parameter: Post Timepoint (hr) Value: 3
  misc_feature: MA Experiment 20001557 PARAMETER Experiment Name: At_Drought_Soil_Dry_P Parameter: Post-Treatment Value: Re-Water vs. No Drought
  misc_feature: MA Experiment 20001557 PARAMETER Experiment Name: At_Drought_Soil_Dry_P Parameter: Timepoint (day) Value: 13
  misc_feature: MA Experiment 20001557 PARAMETER Experiment Name: At_Drought_Soil_Dry_P Parameter: Treatment Value: Drought vs. No Drought
  misc_feature: MA Experiment ID: 20001558 Result: Down-regulated in Transcription
  misc_feature: MA Experiment 20001558 PARAMETER Experiment Name: At_Drought_Soil_Dry_P Parameter: Age (day) Value: 27
  misc_feature: MA Experiment 20001558 PARAMETER Experiment Name: At_Drought_Soil_Dry_P Parameter: Organism Value: A. thaliana
  misc_feature: MA Experiment 20001558 PARAMETER Experiment Name: At_Drought_Soil_Dry_P Parameter: Plant Line Value: WS
  misc_feature: MA Experiment 20001558 PARAMETER Experiment Name: At_Drought_Soil_Dry_P Parameter: Post Timepoint (hr) Value: 6
  misc_feature: MA Experiment 20001558 PARAMETER Experiment Name: At_Drought_Soil_Dry_P Parameter: Post-Treatment Value: Re-Water vs. No Drought
  misc_feature: MA Experiment 20001558 PARAMETER Experiment Name: At_Drought_Soil_Dry_P Parameter: Timepoint (day) Value: 13
  misc_feature: MA Experiment 20001558 PARAMETER Experiment Name: At_Drought_Soil_Dry_P Parameter: Treatment Value: Drought vs. No Drought
gtctcatcacttcccactttcctctctgcatttgttgtctctctctcctgaaaacccttgaattttgctacacgatctctgaaacgtgtctctttgactgacttcaatcttctttatcacttaccgtttctgggttttatgaagcaactgagctaataaaaagcttcttcttagactcggaagaagaaaaaaaacagaatctttattgtttaaagcttccaaattcgagaagagaatttgaaacgaccaagttcaggatattcgtttcttcgtctactttggtctcttcctcttctctttcgaaaagggtttattctgtcttaaaagaaacctttttgagagggtaaaaaaagcttcaattttcagagaaacacaaaaggcagaaacagagaaaaacaaatcatctaattcatgaaacagggttcaatgaatagatcgtgtctctgtagtgtcttaatcaccactgctctgatttgtggtgcttacttcatttgcaatgcttatcttgctaaagactttaaagagaagttgctgaagtgggaaatcactgataagatgcataacagtactgataagatgcagaatgcaacaacaaccagtacatgcaagaatttcaataagccagtgggtactgaagcactaccgcaaggaattatcgagaaaacatcgaacctggaaacacaacatctatggaactacgatgacacaaaaaagagaaggcctaaccattcgatgagtttgttagccatggcggtcggtatcaagcaaaaggagctagttaacaaagttatccaaaagtttcctcctcgagatttcgcggtcatgctttttcattatgatggtgttgtcgatgactggaagcagtatccatggaataatcatgcgattcatgtttccgtgatgaatcaaacaaaatggtggttcgccaagcgattcttgcatcccgatatagttgcagagtacgagtatatatttctttgggacgaagatcttggtgttggtcatttcaatcctcaacgatatctatctattgtcaaagaagaggggcttgagatatcgcaacctgctcttgacacttcaaaatcagaagtgcatcatcctataaccgctcgtcaaaaaaaatcaaaagttcatagaagaatgtataaatacaaaggtagcgggcgatgtgatgaccatagcaccaatcctccttgcatcgggtgggtggaaatgatggcacctgttttctctagagctgcatggagatgttcttggtatatgattcagaatgatttgatccatgcttggggtctggatacgcagcttggttattgtgctcaaggtgaccgaaagaaaaatgtcggtgttgttgatgcggagtacataattcattatggtcttccaacactcggtgtggttgaaaccgcttcaagcgctttgcggaatgagacagactcgaaatcaacggaatcattagagtctcgtgaagtggataatagaccagaagtgaggatgaaatcatttgtggagatgaagagattcaaggaacgttggaagaaagctgtgagggatgatacatgttgggttgatccgtattgaaatccgagcggtttaagtaaaccgaatcgaaccggattcttttccttgttgagtgtgctttgtggtccattgtataccattattttggtacatagattttgttttacttcgagaaaaattagtgtatttatgtgttttatggaccacagtgtagatttaacattttggagcattatacaaaagtgtttttgtgcc

SEQ ID NO: 37287 - protein, 389 aa, Arabidopsis thaliana
  peptide (1)..(389): Ceres Seq. ID no. 12562520
  misc_feature (14)..(84): Pfam Name: Protein of unknown function (DUF707) Pfam Description: Protein of unknown function (DUF707)
  misc_feature (357)..(389): Homolog of NCBI NO: 34903420 NR Description: hypothetical protein~similar to Oryza sativa
  misc_feature (98)..(328): Homolog of NCBI NO: 34903420 NR Description: hypothetical protein~similar to Oryza sativa
  misc_feature (69)..(387): Homolog of NCBI NO: 24636978 NR Description: lysine ketoglutarate reductase trans-splicing
  misc_feature (31)..(389): Homolog of NCBI NO: 33146749 NR Description: putative lysine ketoglutarate reductase
  misc_feature (40)..(387): Homolog of NCBI NO: 15219892 NR Description: hypothetical protein; protein id: At1g61240.1
  misc_feature (27)..(389): Homolog of NCBI NO: 22329488 NR Description: hypothetical protein
  misc_feature (62)..(389): Homolog of NCBI NO: 19386727 NR Description: P0678F11.16 [Oryza sativa (japonica
  misc_feature (81)..(129): Homolog of NCBI NO: 15233917 NR Description: putative protein; protein id: At4g18530.1
  misc_feature (1)..(84): Homolog of NCBI NO: 15233917 NR Description: putative protein; protein id: At4g18530.1
  misc_feature (198)..(389): Homolog of NCBI NO: 15233917 NR Description: putative protein; protein id: At4g18530.1
MKQGSMNRSCLCSVLITTALICGAYFICNAYLAKDFKEKLLKWEITDKMHNSTDKMQNATTTSTCKNFNKPVGTEALPQGIIEKTSNLETQHLWNYDDTKKRRPNHSMSLLAMAVGIKQKELVNKVIQKFPPRDFAVMLFHYDGVVDDWKQYPWNNHAIHVSVMNQTKWWFAKRFLHPDIVAEYEYIFLWDEDLGVGHFNPQRYLSIVKEEGLEISQPALDTSKSEVHHPITARQKKSKVHRRMYKYKGSGRCDDHSTNPPCIGWVEMMAPVFSRAAWRCSWYMIQNDLIHAWGLDTQLGYCAQGDRKKNVGVVDAEYIIHYGLPTLGVVETASSALRNETDSKSTESLESREVDNRPEVRMKSFVEMKRFKERWKKAVRDDTCWVDPY

SEQ ID NO: 37288 - protein, 384 aa, Arabidopsis thaliana
  peptide (1)..(384): Ceres Seq. ID no. 12562521
  misc_feature (9)..(79): Pfam Name: Protein of unknown function (DUF707) Pfam Description: Protein of unknown function (DUF707)
  misc_feature (352)..(384): Homolog of NCBI NO: 34903420 NR Description: hypothetical protein~similar to Oryza sativa
  misc_feature (93)..(323): Homolog of NCBI NO: 34903420 NR Description: hypothetical protein~similar to Oryza sativa
  misc_feature (64)..(382): Homolog of NCBI NO: 24636978 NR Description: lysine ketoglutarate reductase trans-splicing
  misc_feature (26)..(384): Homolog of NCBI NO: 33146749 NR Description: putative lysine ketoglutarate reductase
  misc_feature (35)..(382): Homolog of NCBI NO: 15219892 NR Description: hypothetical protein; protein id: At1g61240.1
  misc_feature (22)..(384): Homolog of NCBI NO: 22329488 NR Description: hypothetical protein
  misc_feature (57)..(384): Homolog of NCBI NO: 19386727 NR Description: P0678F11.16 [Oryza sativa (japonica
  misc_feature (76)..(124): Homolog of NCBI NO: 15233917 NR Description: putative protein; protein id: At4g18530.1
  misc_feature (1)..(79): Homolog of NCBI NO: 15233917 NR Description: putative protein; protein id: At4g18530.1
  misc_feature (193)..(384): Homolog of NCBI NO: 15233917 NR Description: putative protein; protein id: At4g18530.1
MNRSCLCSVLITTALICGAYFICNAYLAKDFKEKLLKWEITDKMHNSTDKMQNATTTSTCKNFNKPVGTEALPQGIIEKTSNLETQHLWNYDDTKKRRPNHSMSLLAMAVGIKQKELVNKVIQKFPPRDFAVMLFHYDGVVDDWKQYPWNNHAIHVSVMNQTKWWFAKRFLHPDIVAEYEYIFLWDEDLGVGHFNPQRYLSIVKEEGLEISQPALDTSKSEVHHPITARQKKSKVHRRMYKYKGSGRCDDHSTNPPCIGWVEMMAPVFSRAAWRCSWYMIQNDLIHAWGLDTQLGYCAQGDRKKNVGVVDAEYIIHYGLPTLGVVETASSALRNETDSKSTESLESREVDNRPEVRMKSFVEMKRFKERWKKAVRDDTCWVDPY

SEQ ID NO: 37289 - protein, 341 aa, Arabidopsis thaliana
  peptide (1)..(341): Ceres Seq. ID no. 12562522
  misc_feature (150)..(341): Pfam Name: Protein of unknown function (DUF707) Pfam Description: Protein of unknown function (DUF707)
  misc_feature (309)..(341): Homolog of NCBI NO: 34903420 NR Description: hypothetical protein~similar to Oryza sativa
  misc_feature (50)..(280): Homolog of NCBI NO: 34903420 NR Description: hypothetical protein~similar to Oryza sativa
  misc_feature (21)..(339): Homolog of NCBI NO: 24636978 NR Description: lysine ketoglutarate reductase trans-splicing
  misc_feature (1)..(341): Homolog of NCBI NO: 33146749 NR Description: putative lysine ketoglutarate reductase
  misc_feature (1)..(339): Homolog of NCBI NO: 15219892 NR Description: hypothetical protein; protein id: At1g61240.1
  misc_feature (1)..(341): Homolog of NCBI NO: 22329488 NR Description: hypothetical protein
  misc_feature (14)..(341): Homolog of NCBI NO: 19386727 NR Description: P0678F11.16 [Oryza sativa (japonica
  misc_feature (33)..(81): Homolog of NCBI NO: 15233917 NR Description: putative protein; protein id: At4g18530.1
  misc_feature (1)..(36): Homolog of NCBI NO: 15233917 NR Description: putative protein; protein id: At4g18530.1
  misc_feature (150)..(341): Homolog of NCBI NO: 15233917 NR Description: putative protein; protein id: At4g18530.1
MHNSTDKMQNATTTSTCKNFNKPVGTEALPQGIIEKTSNLETQHLWNYDDTKKRRPNHSMSLLAMAVGIKQKELVNKVIQKFPPRDFAVMLFHYDGVVDDWKQYPWNNHAIHVSVMNQTKWWFAKRFLHPDIVAEYEYIFLWDEDLGVGHFNPQRYLSIVKEEGLEISQPALDTSKSEVHHPITARQKKSKVHRRMYKYKGSGRCDDHSTNPPCIGWVEMMAPVFSRAAWRCSWYMIQNDLIHAWGLDTQLGYCAQGDRKKNVGVVDAEYIIHYGLPTLGVVETASSALRNETDSKSTESLESREVDNRPEVRMKSFVEMKRFKERWKKAVRDDTCWVDPY

SEQ ID NO: 37290 - DNA, 1351 bp, Arabidopsis thaliana
  misc_feature (1)..(1351): Ceres Seq. ID no. 13509099
  misc_feature: MA Experiment ID: 20000173 Result: Up-regulated in Transcription
  misc_feature: MA Experiment 20000173 PARAMETER Experiment Name: At_42deg_Heat_P Parameter: Age (day) Value: 14
  misc_feature: MA Experiment 20000173 PARAMETER Experiment Name: At_42deg_Heat_P Parameter: Organism Value: A. thaliana
  misc_feature: MA Experiment 20000173 PARAMETER Experiment Name: At_42deg_Heat_P Parameter: Plant Line Value: WS
  misc_feature: MA Experiment 20000173 PARAMETER Experiment Name: At_42deg_Heat_P Parameter: Temperature (deg C) Value: 42 vs. 22
  misc_feature: MA Experiment 20000173 PARAMETER Experiment Name: At_42deg_Heat_P Parameter: Timepoint (hr) Value: 6
  misc_feature: MA Experiment 20000173 PARAMETER Experiment Name: At_42deg_Heat_P Parameter: Tissue Value: Aerial
  misc_feature: MA Experiment ID: 20000265 Result: Up-regulated in Transcription
  misc_feature: MA Experiment 20000265 PARAMETER Experiment Name: At_Open_Flower_P Parameter: Age (day) Value: 21
  misc_feature: MA Experiment 20000265 PARAMETER Experiment Name: At_Open_Flower_P Parameter: Plant Line Value: WS
  misc_feature: MA Experiment 20000265 PARAMETER Experiment Name: At_Open_Flower_P Parameter: Tissue Value: Closed Flower vs. Whole Plant
  misc_feature: MA Experiment ID: 20000267 Result: Up-regulated in Transcription
  misc_feature: MA Experiment 20000267 PARAMETER Experiment Name: At_Drought_P Parameter: Age (day) Value: 7
  misc_feature: MA Experiment 20000267 PARAMETER Experiment Name: At_Drought_P Parameter: Organism Value: A. thaliana
  misc_feature: MA Experiment 20000267 PARAMETER Experiment Name: At_Drought_P Parameter: Plant Line Value: WS
  misc_feature: MA Experiment 20000267 PARAMETER Experiment Name: At_Drought_P Parameter: Timepoint (hr) Value: 6
  misc_feature: MA Experiment 20000267 PARAMETER Experiment Name: At_Drought_P Parameter: Tissue Value: Whole Plant
  misc_feature: MA Experiment 20000267 PARAMETER Experiment Name: At_Drought_P Parameter: Treatment Value: Drought vs. No Drought
  misc_feature: MA Experiment ID: 20000268 Result: Up-regulated in Transcription
  misc_feature: MA Experiment 20000268 PARAMETER Experiment Name: At_100mM_NaCl__P Parameter: Age (day) Value: 14
  misc_feature: MA Experiment 20000268 PARAMETER Experiment Name: At_100mM_NaCl__P Parameter: Organism Value: A. thaliana
  misc_feature: MA Experiment 20000268 PARAMETER Experiment Name: At_100mM_NaCl__P Parameter: Plant Line Value: WS
  misc_feature: MA Experiment 20000268 PARAMETER Experiment Name: At_100mM_NaCl__P Parameter: Timepoint (hr) Value: 6
  misc_feature: MA Experiment 20000268 PARAMETER Experiment Name: At_100mM_NaCl__P Parameter: Tissue Value: Whole Plant
  misc_feature: MA Experiment 20000268 PARAMETER Experiment Name: At_100mM_NaCl__P Parameter: Treatment Value: 100mM NaCl vs. No Treatment
  misc_feature: MA Experiment ID: 20000436 Result: Up-regulated in Transcription
  misc_feature: MA Experiment 20000436 PARAMETER Experiment Name: At_Drought_P Parameter: Age (day) Value: 7
  misc_feature: MA Experiment 20000436 PARAMETER Experiment Name: At_Drought_P Parameter: Organism Value: A. thaliana
  misc_feature: MA Experiment 20000436 PARAMETER Experiment Name: At_Drought_P Parameter: Plant Line Value: WS
  misc_feature: MA Experiment 20000436 PARAMETER Experiment Name: At_Drought_P Parameter: Timepoint (hr) Value: 12
  misc_feature: MA Experiment 20000436 PARAMETER Experiment Name: At_Drought_P Parameter: Tissue Value: Whole Plant
  misc_feature: MA Experiment 20000436 PARAMETER Experiment Name: At_Drought_P Parameter: Treatment Value: Drought vs. No Drought
  misc_feature: MA Experiment ID: 20000495 Result: Up-regulated in Transcription
  misc_feature: MA Experiment 20000495 PARAMETER Experiment Name: At_Guard_Cells_P Parameter: Harvest Date Value: 8/2/2002
  misc_feature: MA Experiment 20000495 PARAMETER Experiment Name: At_Guard_Cells_P Parameter: Organism Value: A. thaliana
  misc_feature: MA Experiment 20000495 PARAMETER Experiment Name: At_Guard_Cells_P Parameter: Tissue Value: Guard Cells vs. Leaves
  misc_feature: MA Experiment ID: 20001557 Result: Up-regulated in Transcription
  misc_feature: MA Experiment 20001557 PARAMETER Experiment Name: At_Drought_Soil_Dry_P Parameter: Age (day) Value: 27
  misc_feature: MA Experiment 20001557 PARAMETER Experiment Name: At_Drought_Soil_Dry_P Parameter: Organism Value: A. thaliana
  misc_feature: MA Experiment 20001557 PARAMETER Experiment Name: At_Drought_Soil_Dry_P Parameter: Plant Line Value: WS
  misc_feature: MA Experiment 20001557 PARAMETER Experiment Name: At_Drought_Soil_Dry_P Parameter: Post Timepoint (hr) Value: 3
  misc_feature: MA Experiment 20001557 PARAMETER Experiment Name: At_Drought_Soil_Dry_P Parameter: Post-Treatment Value: Re-Water vs. No Drought
  misc_feature: MA Experiment 20001557 PARAMETER Experiment Name: At_Drought_Soil_Dry_P Parameter: Timepoint (day) Value: 13
  misc_feature: MA Experiment 20001557 PARAMETER Experiment Name: At_Drought_Soil_Dry_P Parameter: Treatment Value: Drought vs. No Drought
  misc_feature: MA Experiment ID: 20001911 Result: Up-regulated in Transcription
  misc_feature: MA Experiment 20001911 PARAMETER Experiment Name: At_Drought_Reproduction_P Parameter: Age (day) Value: 40
  misc_feature: MA Experiment 20001911 PARAMETER Experiment Name: At_Drought_Reproduction_P Parameter: Organism Value: A. thaliana
  misc_feature: MA Experiment 20001911 PARAMETER Experiment Name: At_Drought_Reproduction_P Parameter: Plant Line Value: WS
  misc_feature: MA Experiment 20001911 PARAMETER Experiment Name: At_Drought_Reproduction_P Parameter: Timepoint (day) Value: 10
  misc_feature: MA Experiment 20001911 PARAMETER Experiment Name: At_Drought_Reproduction_P Parameter: Tissue Value: Flowers
  misc_feature: MA Experiment 20001911 PARAMETER Experiment Name: At_Drought_Reproduction_P Parameter: Treatment Value: Drought vs. No Drought
aacctccactgttaataaactcaaacctctgcaattgtcttcttctcttcaactccatcatctccaccaccggcattctcgccggaatccaatggagcttaccagcttccatcgctcttctctcttattcctcatctcactaacattgatcattctcccgacgacaacaacttcaatcggagtaaactacggtcaaatcggagacaacctcccctccccaaccgacgtaatcccactaataaaatcaatcggagcaacaaaagtaaaactctacgacgcaaatccacaaatcctcaaagctttctccaacaccggaatcgaattcatcatcggactcggcaacgaatacctctccaaaatgaaagatccttcaaaagccttaacatggatcaaacaaaacgttactccatttttacctgcgactaacatcacatgcataactatcggtaacgaaatcctcgctctcaacgactcttcactcactaccaatctcctcccagcgatgcaaggagttcactctgctttaatcaccgccggtctctccgatcaaatctccgtcaccaccgcgcattctctctcgatcctcaaatcctcattcccaccttccgccggcgagtttcaaccggatctactcgattcgctaactccgatcttagaatttcaccggaaaactgattctccgttcttaatcaacgcgtatcctttcttcgcttacaaaggaaaccctaaagaagttcctttagatttcgttctgtttcaacctaatcaaggaatcgtagatccggccaccggttttcactacgataacatgttgttcgctcagatcgacgctgtctactctgctttagcggcggcggggtttaaatcgttgagagttgagatatcggagactgggtggccatcgaaaggtgacgacgatgaggtcggagctacgccggagaatgcgaagaggtataacggaaacttgattaagatgatgatgagtggtaaaaagactaaaacgcccttgaagcctaataatgatctaagtatttacgtttttgccctttttaatgagaatttgaaacctggtccgacgtcggagaggaattatggcttgtttaaacctgatgggactcaggcttattcacttgggtttgctttaaacgatgtcgtgagaggtgctagtggtggtggtaccggtggtgggaatagtagtagcggtggaggaagggataagtcaccggtgtttccggtttctccggtggccccggatagtgcgtccactggttatttagcaatttcggcttctccggtaacggtaagattcttcgaattttctttttcgttaaagttgatatcttttttttaa

SEQ ID NO: 37291 - protein, 449 aa, Arabidopsis thaliana
  peptide (1)..(449): Ceres Seq. ID no. 13509100
  misc_feature (59)..(379): Pfam Name: Glycosyl hydrolases family 17 Pfam Description: Glycosyl hydrolases family 17
  misc_feature (44)..(407): Homolog of NCBI NO: 25316444 NR Description: probable beta-1,3-glucanase [imported] -
  misc_feature (31)..(390): Homolog of NCBI NO: 34908492 NR Description: putative beta-1,3-glucanase
  misc_feature (58)..(430): Homolog of NCBI NO: 6006371 NR Description: Similar to hypothetical protein - potato (S31196)
  misc_feature (39)..(397): Homolog of NCBI NO: 38346337 NR Description: OSJNBa0073L04.8 [Oryza sativa (japonica
  misc_feature (33)..(385): Homolog of NCBI NO: 25316425 NR Description: probable beta-1,3-glucanase [imported] -
  misc_feature (33)..(385): Homolog of NCBI NO: 18401444 NR Description: glycosyl hydrolase family 17 [Arabidopsis
  misc_feature (33)..(446): Homolog of NCBI NO: 15238298 NR Description: glycosyl hydrolase family 17 [Arabidopsis
  misc_feature (29)..(443): Homolog of NCBI NO: 419789 NR Description: hypothetical protein - potato
  misc_feature (31)..(433): Homolog of NCBI NO: 30692765 NR Description: glycosyl hydrolase family 17 [Arabidopsis
  misc_feature (31)..(449): Homolog of NCBI NO: 25316443 NR Description: CDS protein F9L11.6 [imported] - Arabidopsis
TSTVNKLKPLQLSSSLQLHHLHHRHSRRNPMELTSFHRSSLLFLISLTLIILPTTTTSIGVNYGQIGDNLPSPTDVIPLIKSIGATKVKLYDANPQILKAFSNTGIEFIIGLGNEYLSKMKDPSKALTWIKQNVTPFLPATNITCITIGNEILALNDSSLTTNLLPAMQGVHSALITAGLSDQISVTTAHSLSILKSSFPPSAGEFQPDLLDSLTPILEFHRKTDSPFLINAYPFFAYKGNPKEVPLDFVLFQPNQGIVDPATGFHYDNMLFAQIDAVYSALAAAGFKSLRVEISETGWPSKGDDDEVGATPENAKRYNGNLIKMMMSGKKTKTPLKPNNDLSIYVFALFNENLKPGPTSERNYGLFKPDGTQAYSLGFALNDVVRGASGGGTGGGNSSSGGGRDKSPVFPVSPVAPDSASTGYLAISASPVTVRFFEFSFSLKLISFF

SEQ ID NO: 37292 - protein, 419 aa, Arabidopsis thaliana
  peptide (1)..(419): Ceres Seq. ID no. 13509101
  misc_feature (29)..(349): Pfam Name: Glycosyl hydrolases family 17 Pfam Description: Glycosyl hydrolases family 17
  misc_feature (14)..(377): Homolog of NCBI NO: 25316444 NR Description: probable beta-1,3-glucanase [imported] -
  misc_feature (1)..(360): Homolog of NCBI NO: 34908492 NR Description: putative beta-1,3-glucanase
  misc_feature (28)..(400): Homolog of NCBI NO: 6006371 NR Description: Similar to hypothetical protein - potato (S31196)
  misc_feature (9)..(367): Homolog of NCBI NO: 38346337 NR Description: OSJNBa0073L04.8 [Oryza sativa (japonica
  misc_feature (3)..(355): Homolog of NCBI NO: 25316425 NR Description: probable beta-1,3-glucanase [imported] -
  misc_feature (3)..(355): Homolog of NCBI NO: 18401444 NR Description: glycosyl hydrolase family 17 [Arabidopsis
  misc_feature (3)..(416): Homolog of NCBI NO: 15238298 NR Description: glycosyl hydrolase family 17 [Arabidopsis
  misc_feature (1)..(413): Homolog of NCBI NO: 419789 NR Description: hypothetical protein - potato
  misc_feature (1)..(403): Homolog of NCBI NO: 30692765 NR Description: glycosyl hydrolase family 17 [Arabidopsis
  misc_feature (1)..(419): Homolog of NCBI NO: 25316443 NR Description: CDS protein F9L11.6 [imported] - Arabidopsis
MELTSFHRSSLLFLISLTLIILPTTTTSIGVNYGQIGDNLPSPTDVIPLIKSIGATKVKLYDANPQILKAFSNTGIEFIIGLGNEYLSKMKDPSKALTWIKQNVTPFLPATNITCITIGNEILALNDSSLTTNLLPAMQGVHSALITAGLSDQISVTTAHSLSILKSSFPPSAGEFQPDLLDSLTPILEFHRKTDSPFLINAYPFFAYKGNPKEVPLDFVLFQPNQGIVDPATGFHYDNMLFAQIDAVYSALAAAGFKSLRVEISETGWPSKGDDDEVGATPENAKRYNGNLIKMMMSGKKTKTPLKPNNDLSIYVFALFNENLKPGPTSERNYGLFKPDGTQAYSLGFALNDVVRGASGGGTGGGNSSSGGGRDKSPVFPVSPVAPDSASTGYLAISASPVTVRFFEFSFSLKLISFF

SEQ ID NO: 37293 - protein, 330 aa, Arabidopsis thaliana
  peptide (1)..(330): Ceres Seq. ID no. 13509102
  misc_feature (1)..(260): Pfam Name: Glycosyl hydrolases family 17 Pfam Description: Glycosyl hydrolases family 17
  misc_feature (1)..(288): Homolog of NCBI NO: 25316444 NR Description: probable beta-1,3-glucanase [imported] -
  misc_feature (1)..(271): Homolog of NCBI NO: 34908492 NR Description: putative beta-1,3-glucanase
  misc_feature (1)..(311): Homolog of NCBI NO: 6006371 NR Description: Similar to hypothetical protein - potato (S31196)
  misc_feature (1)..(278): Homolog of NCBI NO: 38346337 NR Description: OSJNBa0073L04.8 [Oryza sativa (japonica
  misc_feature (1)..(266): Homolog of NCBI NO: 25316425 NR Description: probable beta-1,3-glucanase [imported] -
  misc_feature (1)..(266): Homolog of NCBI NO: 18401444 NR Description: glycosyl hydrolase family 17 [Arabidopsis
  misc_feature (1)..(327): Homolog of NCBI NO: 15238298 NR Description: glycosyl hydrolase family 17 [Arabidopsis
  misc_feature (1)..(324): Homolog of NCBI NO: 419789 NR Description: hypothetical protein - potato
  misc_feature (1)..(314): Homolog of NCBI NO: 30692765 NR Description: glycosyl hydrolase family 17 [Arabidopsis
  misc_feature (1)..(330): Homolog of NCBI NO: 25316443 NR Description: CDS protein F9L11.6 [imported] - Arabidopsis
MKDPSKALTWIKQNVTPFLPATNITCITIGNEILALNDSSLTTNLLPAMQGVHSALITAGLSDQISVTTAHSLSILKSSFPPSAGEFQPDLLDSLTPILEFHRKTDSPFLINAYPFFAYKGNPKEVPLDFVLFQPNQGIVDPATGFHYDNMLFAQIDAVYSALAAAGFKSLRVEISETGWPSKGDDDEVGATPENAKRYNGNLIKMMMSGKKTKTPLKPNNDLSIYVFALFNENLKPGPTSERNYGLFKPDGTQAYSLGFALNDVVRGASGGGTGGGNSSSGGGRDKSPVFPVSPVAPDSASTGYLAISASPVTVRFFEFSFSLKLISFF

SEQ ID NO: 37294 - DNA, 730 bp, Arabidopsis thaliana
  misc_feature (1)..(730): Ceres Seq. ID no. 13509103
  misc_feature: MA Experiment ID: 20000328 Result: Up-regulated in Transcription
  misc_feature: MA Experiment 20000328 PARAMETER Experiment Name: At_42deg_Heat_Sub_P Parameter: Age (day) Value: 14
  misc_feature: MA Experiment 20000328 PARAMETER Experiment Name: At_42deg_Heat_Sub_P Parameter: Organism Value: A. thaliana
  misc_feature: MA Experiment 20000328 PARAMETER Experiment Name: At_42deg_Heat_Sub_P Parameter: Plant Line Value: WS
  misc_feature: MA Experiment 20000328 PARAMETER Experiment Name: At_42deg_Heat_Sub_P Parameter: Temperature (deg C) Value: 42 vs. 22
  misc_feature: MA Experiment 20000328 PARAMETER Experiment Name: At_42deg_Heat_Sub_P Parameter: Timepoint (hr) Value: 6
  misc_feature: MA Experiment 20000328 PARAMETER Experiment Name: At_42deg_Heat_Sub_P Parameter: Tissue Value: Aerial
accatcacaacaatcaatcgcagcgccgattctccttcaaaaacttttcctaagtcgtcactttttacgatggcagaaacgaagaagatgatcatccttaagagctccgacggtgaatccttcgagatcgaggaagccgtcgctgttaagtcccagacgattaagcacatgattgaggacgactgtgccgataacggaattccacttcccaatgtcaccggagccatcctcgccaaggttattgagtattgcaagaagcacgttgaagccgctgctgaagctggtggagacaaggatttctatggttccgctgagaacgacgagcttaagaattgggacagcgaattcgtcaaagtcgatcagcctactctcttcgatctcatcttggctgcgaactatttgaacatcggtggacttcttgaccttacgtgcaaggccgtggctgatcagatgagaggcaaaactccagagcagatgcgtgcacacttcaacatcaagaacgattacacacctgaggaagaggcggaggttcgcaatgagaacaagtgggcgttcgagtgattggatcggatctgaagggtgtttaggaatctctagtctttctatttagatgtgtttagctttcaagatttcggattgttttttttttctttctttttctcttcgattggagttgtccttgtcgatgaaaacctaatgctttgttctactaacaacatctattggtttt

SEQ ID NO: 37295 - protein, 186 aa, Arabidopsis thaliana
  peptide (1)..(186): Ceres Seq. ID no. 13509104
  misc_feature (109)..(186): Pfam Name: Skp1 family, dimerisation domain Pfam Description: Skp1 family, dimerisation domain
  misc_feature (27)..(186): Homolog of NCBI NO: 3719211 NR Description: UIP2 [Arabidopsis thaliana]
  misc_feature (29)..(186): Homolog of NCBI NO: 18410982 NR Description: E3 ubiquitin ligase SCF complex subunit,
  misc_feature (27)..(186): Homolog of NCBI NO: 18958253 NR Description: kinetochore protein [Brassica juncea]
  misc_feature (27)..(186): Homolog of NCBI NO: 4959710 NR Description: Skp1 [Medicago sativa]
  misc_feature (27)..(186): Homolog of NCBI NO: 18958259 NR Description: kinetochore protein [Brassica juncea]
  misc_feature (27)..(186): Homolog of NCBI NO: 18958257 NR Description: kinetochore protein [Brassica juncea]
  misc_feature (25)..(186): Homolog of NCBI NO: 40644754 NR Description: putative SKP1 protein [Triticum aestivum]
  misc_feature (25)..(186): Homolog of NCBI NO: 7378764 NR Description: putative kinetochore protein [Hordeum vulgare
  misc_feature (24)..(186): Homolog of NCBI NO: 18400912 NR Description: E3 ubiquitin ligase SCF complex subunit SKP1/ASK1
  misc_feature (24)..(186): Homolog of NCBI NO: 18394828 NR Description: SKP1, putative [Arabidopsis thaliana]
TITTINRSADSPSKTFPKSSLFTMAETKKMIILKSSDGESFEIEEAVAVKSQTIKHMIEDDCADNGIPLPNVTGAILAKVIEYCKKHVEAAAEAGGDKDFYGSAENDELKNWDSEFVKVDQPTLFDLILAANYLNIGGLLDLTCKAVADQMRGKTPEQMRAHFNIKNDYTPEEEAEVRNENKWAFE

SEQ ID NO: 37296 - protein, 163 aa, Arabidopsis thaliana
  peptide (1)..(163): Ceres Seq. ID no. 13509105
  misc_feature (86)..(163): Pfam Name: Skp1 family, dimerisation domain Pfam Description: Skp1 family, dimerisation domain
  misc_feature (4)..(163): Homolog of NCBI NO: 3719211 NR Description: UIP2 [Arabidopsis thaliana]
  misc_feature (6)..(163): Homolog of NCBI NO: 18410982 NR Description: E3 ubiquitin ligase SCF complex subunit,
  misc_feature (4)..(163): Homolog of NCBI NO: 18958253 NR Description: kinetochore protein [Brassica juncea]
  misc_feature (4)..(163): Homolog of NCBI NO: 4959710 NR Description: Skp1 [Medicago sativa]
  misc_feature (4)..(163): Homolog of NCBI NO: 18958259 NR Description: kinetochore protein [Brassica juncea]
  misc_feature (4)..(163): Homolog of NCBI NO: 18958257 NR Description: kinetochore protein [Brassica juncea]
  misc_feature (2)..(163): Homolog of NCBI NO: 40644754 NR Description: putative SKP1 protein [Triticum aestivum]
  misc_feature (2)..(163): Homolog of NCBI NO: 7378764 NR Description: putative kinetochore protein [Hordeum vulgare
  misc_feature (1)..(163): Homolog of NCBI NO: 18400912 NR Description: E3 ubiquitin ligase SCF complex subunit SKP1/ASK1
  misc_feature (1)..(163): Homolog of NCBI NO: 18394828 NR Description: SKP1, putative [Arabidopsis thaliana]
MAETKKMIILKSSDGESFEIEEAVAVKSQTIKHMIEDDCADNGIPLPNVTGAILAKVIEYCKKHVEAAAEAGGDKDFYGSAENDELKNWDSEFVKVDQPTLFDLILAANYLNIGGLLDLTCKAVADQMRGKTPEQMRAHFNIKNDYTPEEEAEVRNENKWAFE

SEQ ID NO: 37297 - protein, 157 aa, Arabidopsis thaliana
  peptide (1)..(157): Ceres Seq. ID no. 13509106
  misc_feature (80)..(157): Pfam Name: Skp1 family, dimerisation domain Pfam Description: Skp1 family, dimerisation domain
  misc_feature (1)..(157): Homolog of NCBI NO: 3719211 NR Description: UIP2 [Arabidopsis thaliana]
  misc_feature (1)..(157): Homolog of NCBI NO: 18410982 NR Description: E3 ubiquitin ligase SCF complex subunit,
  misc_feature (1)..(157): Homolog of NCBI NO: 18958253 NR Description: kinetochore protein [Brassica juncea]
  misc_feature (1)..(157): Homolog of NCBI NO: 4959710 NR Description: Skp1 [Medicago sativa]
  misc_feature (1)..(157): Homolog of NCBI NO: 18958259 NR Description: kinetochore protein [Brassica juncea]
  misc_feature (1)..(157): Homolog of NCBI NO: 18958257 NR Description: kinetochore protein [Brassica juncea]
  misc_feature (1)..(157): Homolog of NCBI NO: 40644754 NR Description: putative SKP1 protein [Triticum aestivum]
  misc_feature (1)..(157): Homolog of NCBI NO: 7378764 NR Description: putative kinetochore protein [Hordeum vulgare
  misc_feature (1)..(157): Homolog of NCBI NO: 18400912 NR Description: E3 ubiquitin ligase SCF complex subunit SKP1/ASK1
  misc_feature (1)..(157): Homolog of NCBI NO: 18394828 NR Description: SKP1, putative [Arabidopsis thaliana]
MIILKSSDGESFEIEEAVAVKSQTIKHMIEDDCADNGIPLPNVTGAILAKVIEYCKKHVEAAAEAGGDKDFYGSAENDELKNWDSEFVKVDQPTLFDLILAANYLNIGGLLDLTCKAVADQMRGKTPEQMRAHFNIKNDYTPEEEAEVRNENKWAFE

SEQ ID NO: 37298 - DNA, 1661 bp, Arabidopsis thaliana
  misc_feature (1)..(1661): Ceres Seq. ID no. 12394544
  misc_feature: MA Experiment ID: 108434 Result: Up-regulated in Transcription
  misc_feature: MA Experiment 108434 PARAMETER Experiment Name: At_Root_Tips_cDNA_P Parameter: Tissue Value: Root Tips
  misc_feature: MA Experiment ID: 108461 Result: Up-regulated in Transcription
  misc_feature: MA Experiment 108461 PARAMETER Experiment Name: At_Germinating_Seeds_cDNA_P Parameter: Age (day) Value: 1 vs. 0
  misc_feature: MA Experiment 108461 PARAMETER Experiment Name: At_Germinating_Seeds_cDNA_P Parameter: Tissue Value: Germinating Seeds
  misc_feature: MA Experiment ID: 108462 Result: Up-regulated in Transcription
  misc_feature: MA Experiment 108462 PARAMETER Experiment Name: At_Germinating_Seeds_cDNA_P Parameter: Age (day) Value: 2 vs. 0
  misc_feature: MA Experiment 108462 PARAMETER Experiment Name: At_Germinating_Seeds_cDNA_P Parameter: Tissue Value: Germinating Seeds
  misc_feature: MA Experiment ID: 108464 Result: Up-regulated in Transcription
  misc_feature: MA Experiment 108464 PARAMETER Experiment Name: At_Germinating_Seeds_cDNA_P Parameter: Age (day) Value: 4 vs. 0
  misc_feature: MA Experiment 108464 PARAMETER Experiment Name: At_Germinating_Seeds_cDNA_P Parameter: Tissue Value: Germinating Seeds
  misc_feature: MA Experiment ID: 108595 Result: Down-regulated in Transcription
  misc_feature: MA Experiment 108595 PARAMETER Experiment Name: At_Ler-pi_Ovule_cDNA_P Parameter: Plant Line Value: null
  misc_feature: MA Experiment ID: 20000111 Result: Down-regulated in Transcription
  misc_feature: MA Experiment 20000111 PARAMETER Experiment Name: At_42deg_Heat_cDNA_P Parameter: Temperature (deg C) Value: 42 vs. 22
  misc_feature: MA Experiment 20000111 PARAMETER Experiment Name: At_42deg_Heat_cDNA_P Parameter: Timepoint (hr) Value: 6
  misc_feature: MA Experiment 20000111 PARAMETER Experiment Name: At_42deg_Heat_cDNA_P Parameter: Tissue Value: Aerial
  misc_feature: MA Experiment ID: 20000112 Result: Down-regulated in Transcription
  misc_feature: MA Experiment 20000112 PARAMETER Experiment Name: At_42deg_Heat_cDNA_P Parameter: Temperature (deg C) Value: 42 vs. 22
  misc_feature: MA Experiment 20000112 PARAMETER Experiment Name: At_42deg_Heat_cDNA_P Parameter: Timepoint (hr) Value: 2
  misc_feature: MA Experiment 20000112 PARAMETER Experiment Name: At_42deg_Heat_cDNA_P Parameter: Tissue Value: Aerial
  misc_feature: MA Experiment ID: 20000113 Result: Down-regulated in Transcription
  misc_feature: MA Experiment 20000113 PARAMETER Experiment Name: At_42deg_Heat_cDNA_P Parameter: Temperature (deg C) Value: 42 vs. 22
  misc_feature: MA Experiment 20000113 PARAMETER Experiment Name: At_42deg_Heat_cDNA_P Parameter: Timepoint (hr) Value: 8
  misc_feature: MA Experiment 20000113 PARAMETER Experiment Name: At_42deg_Heat_cDNA_P Parameter: Tissue Value: Aerial
  misc_feature: MA Experiment ID: 20000144 Result: Down-regulated in Transcription
  misc_feature: MA Experiment 20000144 PARAMETER Experiment Name: At_42deg_Heat_cDNA_P Parameter: Temperature (deg C) Value: 42 vs. 22
  misc_feature: MA Experiment 20000144 PARAMETER Experiment Name: At_42deg_Heat_cDNA_P Parameter: Timepoint (hr) Value: 1
  misc_feature: MA Experiment 20000144 PARAMETER Experiment Name: At_42deg_Heat_cDNA_P Parameter: Tissue Value: Aerial
  misc_feature: MA Experiment ID: 20000171 Result: Down-regulated in Transcription
  misc_feature: MA Experiment 20000171 PARAMETER Experiment Name: At_42deg_Heat_P Parameter: Age (day) Value: 14
  misc_feature: MA Experiment 20000171 PARAMETER Experiment Name: At_42deg_Heat_P Parameter: Organism Value: A. thaliana
  misc_feature: MA Experiment 20000171 PARAMETER Experiment Name: At_42deg_Heat_P Parameter: Plant Line Value: WS
  misc_feature: MA Experiment 20000171 PARAMETER Experiment Name: At_42deg_Heat_P Parameter: Temperature (deg C) Value: 42 vs. 22
  misc_feature: MA Experiment 20000171 PARAMETER Experiment Name: At_42deg_Heat_P Parameter: Timepoint (hr) Value: 1
  misc_feature: MA Experiment 20000171 PARAMETER Experiment Name: At_42deg_Heat_P Parameter: Tissue Value: Aerial
  misc_feature: MA Experiment ID: 20000173 Result: Down-regulated in Transcription
  misc_feature: MA Experiment 20000173 PARAMETER Experiment Name: At_42deg_Heat_P Parameter: Age (day) Value: 14
  misc_feature: MA Experiment 20000173 PARAMETER Experiment Name: At_42deg_Heat_P Parameter: Organism Value: A. thaliana
  misc_feature: MA Experiment 20000173 PARAMETER Experiment Name: At_42deg_Heat_P Parameter: Plant Line Value: WS
  misc_feature: MA Experiment 20000173 PARAMETER Experiment Name: At_42deg_Heat_P Parameter: Temperature (deg C) Value: 42 vs. 22
  misc_feature: MA Experiment 20000173 PARAMETER Experiment Name: At_42deg_Heat_P Parameter: Timepoint (hr) Value: 6
  misc_feature: MA Experiment 20000173 PARAMETER Experiment Name: At_42deg_Heat_P Parameter: Tissue Value: Aerial
  misc_feature: MA Experiment ID: 20000180 Result: Up-regulated in Transcription
  misc_feature: MA Experiment 20000180 PARAMETER Experiment Name: At_Germinating_Seeds_P Parameter: Age (hr) Value: 24 vs. 0
  misc_feature: MA Experiment 20000180 PARAMETER Experiment Name: At_Germinating_Seeds_P Parameter: Tissue Value: Germinating Seeds
  misc_feature: MA Experiment ID: 20000184 Result: Down-regulated in Transcription
  misc_feature: MA Experiment 20000184 PARAMETER Experiment Name: At_Shoots__P Parameter: Age (day) Value: 7
  misc_feature: MA Experiment 20000184 PARAMETER Experiment Name: At_Shoots__P Parameter: Tissue Value: Shoots vs. Whole Plant
  misc_feature: MA Experiment ID: 20000185 Result: Up-regulated in Transcription
  misc_feature: MA Experiment 20000185 PARAMETER Experiment Name: At_Roots__P Parameter: Age (day) Value: 7 vs. 21
  misc_feature: MA Experiment 20000185 PARAMETER Experiment Name: At_Roots__P Parameter: Organism Value: A. thaliana
  misc_feature: MA Experiment 20000185 PARAMETER Experiment Name: At_Roots__P Parameter: Tissue Value: Roots vs. Whole Plant
  misc_feature: MA Experiment ID: 20000224 Result: Up-regulated in Transcription
  misc_feature: MA Experiment ID: 20000234 Result: Up-regulated in Transcription
  misc_feature: MA Experiment 20000234 PARAMETER Experiment Name: At_Siliques_P Parameter: Age (day) Value: 21
  misc_feature: MA Experiment 20000234 PARAMETER Experiment Name: At_Siliques_P Parameter: Organism Value: A. thaliana
  misc_feature: MA Experiment 20000234 PARAMETER Experiment Name: At_Siliques_P Parameter: Plant Line Value: WS
  misc_feature: MA Experiment 20000234 PARAMETER Experiment Name: At_Siliques_P Parameter: Tissue Value: Less Than 5mm Siliques vs. Whole Plant
  misc_feature: MA Experiment ID: 20000265 Result: Up-regulated in Transcription
  misc_feature: MA Experiment 20000265 PARAMETER Experiment Name: At_Open_Flower_P Parameter: Age (day) Value: 21
  misc_feature: MA Experiment 20000265 PARAMETER Experiment Name: At_Open_Flower_P Parameter: Plant Line Value: WS
  misc_feature: MA Experiment 20000265 PARAMETER Experiment Name: At_Open_Flower_P Parameter: Tissue Value: Closed Flower vs. Whole Plant
  misc_feature: MA Experiment ID: 20000286 Result: Up-regulated in Transcription
  misc_feature: MA Experiment 20000286 PARAMETER Experiment Name: At_Open_Flower_P Parameter: Age (day) Value: 21
  misc_feature: MA Experiment 20000286 PARAMETER Experiment Name: At_Open_Flower_P Parameter: Plant Line Value: WS
  misc_feature: MA Experiment 20000286 PARAMETER Experiment Name: At_Open_Flower_P Parameter: Tissue Value: Half Open vs. Whole Plant
  misc_feature: MA Experiment ID: 20000439 Result: Up-regulated in Transcription
  misc_feature: MA Experiment 20000439 PARAMETER Experiment Name: At_Roots__P Parameter: Age (day) Value: 14 vs. 21
  misc_feature: MA Experiment 20000439 PARAMETER Experiment Name: At_Roots__P Parameter: Organism Value: A. thaliana
  misc_feature: MA Experiment 20000439 PARAMETER Experiment Name: At_Roots__P Parameter: Tissue Value: Roots vs. Whole Plant
  misc_feature: MA Experiment ID: 20001451 Result: Down-regulated in Transcription
  misc_feature: MA Experiment 20001451 PARAMETER Experiment Name: At_Far-red-induction_P Parameter: Age (day) Value: 7
  misc_feature: MA Experiment 20001451 PARAMETER Experiment Name: At_Far-red-induction_P Parameter: Light Value: Far-red vs. White
  misc_feature: MA Experiment 20001451 PARAMETER Experiment Name: At_Far-red-induction_P Parameter: Organism Value: A. thaliana
  misc_feature: MA Experiment 20001451 PARAMETER Experiment Name: At_Far-red-induction_P Parameter: Plant Line Value: Columbia
  misc_feature: MA Experiment 20001451 PARAMETER Experiment Name: At_Far-red-induction_P Parameter: Timepoint (hr) Value: 24
  misc_feature: MA Experiment 20001451 PARAMETER Experiment Name: At_Far-red-induction_P Parameter: Tissue Value: Whole Plant
atcaagaagaagtctctgctagttccaaaacagaacaagtgaatccctcaagtttcttattacaaaacccaaaaaccaaagtgaaccagtgttgttgtttgtactcacagatccatcctccactgattcatttcttgctctgcttcttctctcttagttttgttaagaatcttctcttatccattgtgttttttctattttataaatacatatataattttagttgggggagagcttgcctggtgtcgccttcttctctctctaagacttgtgcttaatttacggacatgtgaagatacttcgcttttgcctcatcgaagggcatgttagctatttacttatctcttctcttctcttctttgtcttgtgagctctcaaatcttcatagatacaaatcaagaaagtgatcaaacaaaaaaagaacaagtctttttggtatttcagatcgagaaaaaatgtggttgcaaggtttgaagtaatcttgcaatggattctttgactggatttagaatggaacccaaatggcaaattgatcctcagcttctctttgttggtccaaagattggtgaaggagctcatgctaaagtctatgagggaaaatacaagaatcagacagttgctataaagatagttcacagaggagaaacaccagaagagattgctaaaagagattcaagattccttagagaagtagaaatgctctcacgtgttcaacacaagaatttggtcaagttcattggtgcttgcaaggagcctgtaatggtgatagttacagaacttcttcaaggcggtacattgcgtaaatatctattaaacttgagacccgcatgtttggagactcgtgtggctatcggttttgcgcttgatattgctcgtggtatggaatgcttgcattcccatgggatcattcaccgtgatctcaaacccgagaacttgcttttaactgcagaccataaaacagtaaaactagcagattttggattagcaagagaagagtcactgactgagatgatgacggctgagacaggaacataccgatggatggcacctgagttgtacagcacggtaactcttcgattgggagagaagaagcactacaatcataaagtcgacgcctatagctttgcaatagttctttgggagcttttacacaataaattgccttttgagggaatgtcaaatctccaagcagcatatgcagcagccttcaaaaatgtgagaccaagcgcggagagcttaccggaggagttgggcgacattgtaacatcatgttggaatgaggatccgaatgctcggcccaacttcacgcatatcattgagttacttcttaactatctctctaaagttggatctccgatatccgctattccacaacggattcttgcttcgaagaacacgctattgccaccggattctcctggaactagctctttgatggctaagcttgatgaatgtggggaaactccaaaggccaaaagtgaagacaaacgaaaaggtttgtttttctgcttcaatcaatgttattaaccttgaaatcacagagtggttttaggaccagagatttggtagacatcactcaaattattcatgtaataatatcctccctaccatatgaatttagcaagaagttcatttatataaataaatagttatgtaactgt

SEQ ID NO: 37299 - protein, 346 aa, Arabidopsis thaliana
  peptide (1)..(346): Ceres Seq. ID no. 12394545
  misc_feature (7)..(336): Homolog of NCBI NO: 15240070 NR Description: protein kinase ATN1-like protein; protein id:
  misc_feature (9)..(319): Homolog of NCBI NO: 28876011 NR Description: putative protein kinase [Oryza sativa (japonica
  misc_feature (9)..(82): Homolog of NCBI NO: 11259780 NR Description: protein kinase ATN1-like protein - Arabidopsis
  misc_feature (82)..(290): Homolog of NCBI NO: 11259780 NR Description: protein kinase ATN1-like protein - Arabidopsis
  misc_feature (9)..(290): Homolog of NCBI NO: 30679428 NR Description: protein kinase, putative [Arabidopsis thaliana]
  misc_feature (7)..(340): Homolog of NCBI NO: 15232197 NR Description: putative protein kinase, ATN1
  misc_feature (7)..(340): Homolog of NCBI NO: 2129698 NR Description: protein kinase ATN1 (EC 2.7.1.-) - Arabidopsis
  misc_feature (3)..(346): Homolog of NCBI NO: 32815816 NR Description: protein kinase [Cucumis sativus]
  misc_feature (1)..(342): Homolog of NCBI NO: 15237443 NR Description: protein kinase - like protein; protein id:
  misc_feature (1)..(346): Homolog of NCBI NO: 15240630 NR Description: protein kinase ATN1-like protein; protein id:
MDSLTGFRMEPKWQIDPQLLFVGPKIGEGAHAKVYEGKYKNQTVAIKIVHRGETPEEIAKRDSRFLREVEMLSRVQHKNLVKFIGACKEPVMVIVTELLQGGTLRKYLLNLRPACLETRVAIGFALDIARGMECLHSHGIIHRDLKPENLLLTADHKTVKLADFGLAREESLTEMMTAETGTYRWMAPELYSTVTLRLGEKKHYNHKVDAYSFAIVLWELLHNKLPFEGMSNLQAAYAAAFKNVRPSAESLPEELGDIVTSCWNEDPNARPNFTHIIELLLNYLSKVGSPISAIPQRILASKNTLLPPDSPGTSSLMAKLDECGETPKAKSEDKRKGLFFCFNQCY

SEQ ID NO: 37300 - protein, 338 aa, Arabidopsis thaliana
  peptide (1)..(338): Ceres Seq. ID no. 12394546
  misc_feature (1)..(328): Homolog of NCBI NO: 15240070 NR Description: protein kinase ATN1-like protein; protein id:
  misc_feature (1)..(311): Homolog of NCBI NO: 28876011 NR Description: putative protein kinase [Oryza sativa (japonica
  misc_feature (1)..(74): Homolog of NCBI NO: 11259780 NR Description: protein kinase ATN1-like protein - Arabidopsis
  misc_feature (74)..(282): Homolog of NCBI NO: 11259780 NR Description: protein kinase ATN1-like protein - Arabidopsis
  misc_feature (1)..(282): Homolog of NCBI NO: 30679428 NR Description: protein kinase, putative [Arabidopsis thaliana]
  misc_feature (1)..(332): Homolog of NCBI NO: 15232197 NR Description: putative protein kinase, ATN1
  misc_feature (1)..(332): Homolog of NCBI NO: 2129698 NR Description: protein kinase ATN1 (EC 2.7.1.-) - Arabidopsis
  misc_feature (1)..(338): Homolog of NCBI NO: 32815816 NR Description: protein kinase [Cucumis sativus]
  misc_feature (1)..(334): Homolog of NCBI NO: 15237443 NR Description: protein kinase - like protein; protein id:
  misc_feature (1)..(338): Homolog of NCBI NO: 15240630 NR Description: protein kinase ATN1-like protein; protein id:
MEPKWQIDPQLLFVGPKIGEGAHAKVYEGKYKNQTVAIKIVHRGETPEEIAKRDSRFLREVEMLSRVQHKNLVKFIGACKEPVMVIVTELLQGGTLRKYLLNLRPACLETRVAIGFALDIARGMECLHSHGIIHRDLKPENLLLTADHKTVKLADFGLAREESLTEMMTAETGTYRWMAPELYSTVTLRLGEKKHYNHKVDAYSFAIVLWELLHNKLPFEGMSNLQAAYAAAFKNVRPSAESLPEELGDIVTSCWNEDPNARPNFTHIIELLLNYLSKVGSPISAIPQRILASKNTLLPPDSPGTSSLMAKLDECGETPKAKSEDKRKGLFFCFNQCY

SEQ ID NO: 37301 - protein, 276 aa, Arabidopsis thaliana
  peptide (1)..(276): Ceres Seq. ID no. 12394547
  misc_feature (1)..(266): Homolog of NCBI NO: 15240070 NR Description: protein kinase ATN1-like protein; protein id:
  misc_feature (1)..(249): Homolog of NCBI NO: 28876011 NR Description: putative protein kinase [Oryza sativa (japonica
  misc_feature (1)..(12): Homolog of NCBI NO: 11259780 NR Description: protein kinase ATN1-like protein - Arabidopsis
  misc_feature (12)..(220): Homolog of NCBI NO: 11259780 NR Description: protein kinase ATN1-like protein - Arabidopsis
  misc_feature (1)..(220): Homolog of NCBI NO: 30679428 NR Description: protein kinase, putative [Arabidopsis thaliana]
  misc_feature (1)..(270): Homolog of NCBI NO: 15232197 NR Description: putative protein kinase, ATN1
  misc_feature (1)..(270): Homolog of NCBI NO: 2129698 NR Description: protein kinase ATN1 (EC 2.7.1.-) - Arabidopsis
  misc_feature (1)..(276): Homolog of NCBI NO: 32815816 NR Description: protein kinase [Cucumis sativus]
  misc_feature (1)..(272): Homolog of NCBI NO: 15237443 NR Description: protein kinase - like protein; protein id:
  misc_feature (1)..(276): Homolog of NCBI NO: 15240630 NR Description: protein kinase ATN1-like protein; protein id:
MLSRVQHKNLVKFIGACKEPVMVIVTELLQGGTLRKYLLNLRPACLETRVAIGFALDIARGMECLHSHGIIHRDLKPENLLLTADHKTVKLADFGLAREESLTEMMTAETGTYRWMAPELYSTVTLRLGEKKHYNHKVDAYSFAIVLWELLHNKLPFEGMSNLQAAYAAAFKNVRPSAESLPEELGDIVTSCWNEDPNARPNFTHIIELLLNYLSKVGSPISAIPQRILASKNTLLPPDSPGTSSLMAKLDECGETPKAKSEDKRKGLFFCFNQCY

SEQ ID NO: 37302 - DNA, 889 bp, Arabidopsis thaliana
  misc_feature (1)..(889): Ceres Seq. ID no. 13575783
gtttcacgaacaaagaggcctgagtataaaaaaacaaatcggacgcttcgagtttttcttgaggaagaatccacacacacacagaagaagaatctcatcacgaattttagctatgggttggatctggattgacgattcatccgcctctaaagccggtgctgatctcaccgataaaccgctcggagattctgccgccgccgccgaaaattgctccacgaccacggtggtaagatctcagtgcaagacggaggaggtcgagcctggaaagttcgtcaggaaatgcgacaaaacagaagaaatcctccgccactgttttgggaagccctctgaagtcgttcaatccaacacagagcacacagaagaggatgtgacagaccagatggtgggaagatccgctcttccgaatcagtttgaggataaaaacccgctaaacttcccgggactccgcagagatgtagacgcgatcgaacgccatttcttgagcggaatgaagagtttctttgatgcggctgaagagatgacaagcagcttatttgatatcatgggagaccatcacccaagcaccaggagaggagggatacccattgaaaaccatcccaaggtagaggagcaccgcaatgacgaaactgcccctacacgaccacactcctctggcgagattgatctctcgggcttggccaaggacgtttgagaaaggtcgtctgcttcttcttcttcttctttttttttttcacaaaggtcgtcttgttctagcttttggcatatataatcttaaaaatgtaatgtgactttctaagaagcgtggggattgtagtctaatgttagcggcttgcacgtttttccgagtgggtgctactactatctatcaatatcatcatactactatatt

SEQ ID NO: 37303 - protein, 229 aa, Arabidopsis thaliana
  peptide (1)..(229): Ceres Seq. ID no. 13575784
  misc_feature (38)..(113): Homolog of NCBI NO: 34909928 NR Description: P0665A11.24 [Oryza sativa (japonica
  misc_feature (38)..(229): Homolog of NCBI NO: 15227527 NR Description: expressed protein [Arabidopsis thaliana]
FHEQRGLSIKKQIGRFEFFLRKNPHTHRRRISSRILAMGWIWIDDSSASKAGADLTDKPLGDSAAAAENCSTTTVVRSQCKTEEVEPGKFVRKCDKTEEILRHCFGKPSEVVQSNTEHTEEDVTDQMVGRSALPNQFEDKNPLNFPGLRRDVDAIERHFLSGMKSFFDAAEEMTSSLFDIMGDHHPSTRRGGIPIENHPKVEEHRNDETAPTRPHSSGEIDLSGLAKDV

SEQ ID NO: 37304 - protein, 192 aa, Arabidopsis thaliana
  peptide (1)..(192): Ceres Seq. ID no. 13575785
  misc_feature (1)..(76): Homolog of NCBI NO: 34909928 NR Description: P0665A11.24 [Oryza sativa (japonica
  misc_feature (1)..(192): Homolog of NCBI NO: 15227527 NR Description: expressed protein [Arabidopsis thaliana]
MGWIWIDDSSASKAGADLTDKPLGDSAAAAENCSTTTVVRSQCKTEEVEPGKFVRKCDKTEEILRHCFGKPSEVVQSNTEHTEEDVTDQMVGRSALPNQFEDKNPLNFPGLRRDVDAIERHFLSGMKSFFDAAEEMTSSLFDIMGDHHPSTRRGGIPIENHPKVEEHRNDETAPTRPHSSGEIDLSGLAKDV

SEQ ID NO: 37305 - DNA, 845 bp, Arabidopsis thaliana
  misc_feature (1)..(845): Ceres Seq. ID no. 12560096
  misc_feature: MA Experiment ID: 20000180 Result: Up-regulated in Transcription
  misc_feature: MA Experiment 20000180 PARAMETER Experiment Name: At_Germinating_Seeds_P Parameter: Age (hr) Value: 24 vs. 0
  misc_feature: MA Experiment 20000180 PARAMETER Experiment Name: At_Germinating_Seeds_P Parameter: Tissue Value: Germinating Seeds
  misc_feature: MA Experiment ID: 20000184 Result: Down-regulated in Transcription
  misc_feature: MA Experiment 20000184 PARAMETER Experiment Name: At_Shoots__P Parameter: Age (day) Value: 7
  misc_feature: MA Experiment 20000184 PARAMETER Experiment Name: At_Shoots__P Parameter: Tissue Value: Shoots vs. Whole Plant
aaatggcgatcatgcgataatcgtgtagccgaagaagaagaagaagaagaagaaagaagatggtgttttgggagataactctaggaacagcttacttcttgggactgagacggacttataggctcgctctgaagatccagcgtcggcttgttactccgaaacatcccaaaatccgtcaatttcttcatcggaggactcgtaaaatcttcgatgtggcgatttcggttcacaagaacatacaagaaagagacatagaagttggtaggaatctcggaaattggattcttcgttggctcgataagatgaaaccagcagctcagatccgtactcggccagaactaccacacaacagcaattccaacatggacaaggcaaagagactaacggaattgtcccgtcccaaatcgcacacgaacacgacgcagactccacaaaaccgtgaatccgataggcatttgtttacctcgttgaaagacttccggcacaagccattcccgtctgtctctatgatgatccaaccgccgagacccaatggaactacgactcagtacagacattactacagtggcggtctagcagcaagtctgattcaacccgagctatgttacaggtggcgggttcaatggtgtagtcaggaaagacattttgcagtggatggcacaaagatgaaagatgatgcagctaagtcccatctttctctgacataattgagcctctctcttttctttttttaacttttaattgcagaaattaatgtgattgttgatagatcctgaagcaactatgtagtaaacatgacaatgtctttttctttctaacgcttgaataaagtttcatatactttg

SEQ ID NO: 37306 - protein, 215 aa, Arabidopsis thaliana
  peptide (1)..(215): Ceres Seq. ID no. 12560097
  misc_feature (45)..(179): Homolog of NCBI NO: 25370789 NR Description: hypothetical protein At2g35480 [imported] -
  misc_feature (1)..(179): Homolog of NCBI NO: 30686423 NR Description: expressed protein [Arabidopsis thaliana]
  misc_feature (1)..(179): Homolog of NCBI NO: 15222623 NR Description: hypothetical protein; protein id: At1g32260.1
MVFWEITLGTAYFLGLRRTYRLALKIQRRLVTPKHPKIRQFLHRRTRKIFDVAISVHKNIQERDIEVGRNLGNWILRWLDKMKPAAQIRTRPELPHNSNSNMDKAKRLTELSRPKSHTNTTQTPQNRESDRHLFTSLKDFRHKPFPSVSMMIQPPRPNGTTTQYRHYYSGGLAASLIQPELCYRWRVQWCSQERHFAVDGTKMKDDAAKSHLSLT

SEQ ID NO: 37307 - protein, 134 aa, Arabidopsis thaliana
  peptide (1)..(134): Ceres Seq. ID no. 12560098
  misc_feature (1)..(98): Homolog of NCBI NO: 25370789 NR Description: hypothetical protein At2g35480 [imported] -
  misc_feature (1)..(98): Homolog of NCBI NO: 30686423 NR Description: expressed protein [Arabidopsis thaliana]
  misc_feature (1)..(98): Homolog of NCBI NO: 15222623 NR Description: hypothetical protein; protein id: At1g32260.1
MKPAAQIRTRPELPHNSNSNMDKAKRLTELSRPKSHTNTTQTPQNRESDRHLFTSLKDFRHKPFPSVSMMIQPPRPNGTTTQYRHYYSGGLAASLIQPELCYRWRVQWCSQERHFAVDGTKMKDDAAKSHLSLT

SEQ ID NO: 37308 - protein, 114 aa, Arabidopsis thaliana
  peptide (1)..(114): Ceres Seq. ID no. 12560099
  misc_feature (1)..(78): Homolog of NCBI NO: 25370789 NR Description: hypothetical protein At2g35480 [imported] -
  misc_feature (1)..(78): Homolog of NCBI NO: 30686423 NR Description: expressed protein [Arabidopsis thaliana]
  misc_feature (1)..(78): Homolog of NCBI NO: 15222623 NR Description: hypothetical protein; protein id: At1g32260.1
MDKAKRLTELSRPKSHTNTTQTPQNRESDRHLFTSLKDFRHKPFPSVSMMIQPPRPNGTTTQYRHYYSGGLAASLIQPELCYRWRVQWCSQERHFAVDGTKMKDDAAKSHLSLT

SEQ ID NO: 37309 - DNA, 831 bp, Arabidopsis thaliana
  misc_feature (1)..(831): Ceres Seq. ID no. 13576640
  misc_feature: MA Experiment ID: 20000227 Result: Down-regulated in Transcription
  misc_feature: MA Experiment 20000227 PARAMETER Experiment Name: At_Root-Tips-vs-Tops_P Parameter: Tissue Value: Root Tips vs. Root Tops
  misc_feature: MA Experiment ID: 20000438 Result: Up-regulated in Transcription
  misc_feature: MA Experiment 20000438 PARAMETER Experiment Name: At_Shoots__P Parameter: Age (day) Value: 14
  misc_feature: MA Experiment 20000438 PARAMETER Experiment Name: At_Shoots__P Parameter: Tissue Value: Shoots vs. Whole Plant
  misc_feature: MA Experiment ID: 20000496 Result: Down-regulated in Transcription
  misc_feature: MA Experiment 20000496 PARAMETER Experiment Name: At_Guard_Cells_P Parameter: Harvest Date Value: 7/19/2002
  misc_feature: MA Experiment 20000496 PARAMETER Experiment Name: At_Guard_Cells_P Parameter: Organism Value: Canola
  misc_feature: MA Experiment 20000496 PARAMETER Experiment Name: At_Guard_Cells_P Parameter: Tissue Value: Guard Cells vs. Leaves
  misc_feature: MA Experiment ID: 20000794 Result: Down-regulated in Transcription
  misc_feature: MA Experiment 20000794 PARAMETER Experiment Name: At_Petals_P Parameter: Age (day) Value: 23-25 days
  misc_feature: MA Experiment 20000794 PARAMETER Experiment Name: At_Petals_P Parameter: Plant Line Value: WS
  misc_feature: MA Experiment 20000794 PARAMETER Experiment Name: At_Petals_P Parameter: Tissue Value: Petals vs. Whole plant
  misc_feature: MA Experiment ID: 20001757 Result: Up-regulated in Transcription
  misc_feature: MA Experiment 20001757 PARAMETER Experiment Name: At_50mM_NH4NO3_L-to-H_P Parameter: Timepoint (hr) Value: 6
  misc_feature: MA Experiment 20001757 PARAMETER Experiment Name: At_50mM_NH4NO3_L-to-H_P Parameter: Tissue Value: Leaf
  misc_feature: MA Experiment 20001757 PARAMETER Experiment Name: At_50mM_NH4NO3_L-to-H_P Parameter: Treatment Value: 50mM NH4NO3 vs 100mM Mannitol
  misc_feature: MA Experiment ID: 20001911 Result: Down-regulated in Transcription
  misc_feature: MA Experiment 20001911 PARAMETER Experiment Name: At_Drought_Reproduction_P Parameter: Age (day) Value: 40
  misc_feature: MA Experiment 20001911 PARAMETER Experiment Name: At_Drought_Reproduction_P Parameter: Organism Value: A. thaliana
  misc_feature: MA Experiment 20001911 PARAMETER Experiment Name: At_Drought_Reproduction_P Parameter: Plant Line Value: WS
  misc_feature: MA Experiment 20001911 PARAMETER Experiment Name: At_Drought_Reproduction_P Parameter: Timepoint (day) Value: 10
  misc_feature: MA Experiment 20001911 PARAMETER Experiment Name: At_Drought_Reproduction_P Parameter: Tissue Value: Flowers
  misc_feature: MA Experiment 20001911 PARAMETER Experiment Name: At_Drought_Reproduction_P Parameter: Treatment Value: Drought vs. No Drought
aaaaatcgatcgaaacggttagcgaatcgaagcagagagagcttcaatggctgtcacttcttcctctatgctgctgcttcggaacttctctacggtgggaagagttgctcaatctgttcgtgtgacttcgaggatcttcttctccaccggagaattgattagggttcttccttatactcgttctaaaagattgatctgttctactcgtgctgctcataatgaagaagccgccgcgaaagctgcggcttctgttgctgacaccggagctccgaccatatttgacaagattatagcaaaagagattccctcagatattgtctatgaagatgaaaacgttttggcattcagagacattaaccctcaggctcctgttcatgttttggtcattcccaagttgagagatggcttgacctcgcttggcaaggctgaaccaagacacgtagaggttcttggccaacttctacatgcatcgaagattgttgctgagaaagaaggaatccttgatgggttccgtgtggttatcaacaacggtgttgaagcctgccaatctgtttaccatcttcatctgcacgtcctcggaggccgacagatgaaatggccacccggttaagaagaaagattcatgtcaacccaaagccaacgtgctccaaaattgtcaactacaatcctttcttatatggtttatgagtttttaccactatcggattttatccagttgtgaattcctagagattagatagcttccatttccaattgttatcgaattctttttcttttttcattgttagaaataaatactaacaatttatatgatatgagtagtttctctcc

SEQ ID NO: 37310 - protein, 187 aa, Arabidopsis thaliana
  peptide (1)..(187): Ceres Seq. ID no. 13576641
  misc_feature (56)..(187): Homolog of NCBI NO: 23612841 NR Description: protein kinase c inhibitor-like protein, putative
  misc_feature (80)..(187): Homolog of NCBI NO: 23480654 NR Description: putative protein kinase C interacting protein 1
  misc_feature (76)..(187): Homolog of NCBI NO: 1177046 NR Description: 14 KD ZINC-BINDING PROTEIN (PROTEIN KINASE C
  misc_feature (64)..(187): Homolog of NCBI NO: 18410510 NR Description: protein kinase C inhibitor-related protein
  misc_feature (64)..(187): Homolog of NCBI NO: 11260559 NR Description: protein kinase C inhibitor-like protein -
  misc_feature (61)..(187): Homolog of NCBI NO: 1177047 NR Description: 14 KD ZINC-BINDING PROTEIN (PROTEIN KINASE C
  misc_feature (58)..(187): Homolog of NCBI NO: 629858 NR Description: protein kinase C inhibitor - maize
  misc_feature (167)..(187): Homolog of NCBI NO: 25518144 NR Description: F28K20.9 protein - Arabidopsis thaliana
  misc_feature (1)..(168): Homolog of NCBI NO: 25518144 NR Description: F28K20.9 protein - Arabidopsis thaliana
  misc_feature (1)..(187): Homolog of NCBI NO: 15221629 NR Description: protein kinase C inhibitor (Zinc-binding protein)
MAVTSSSMLLLRNFSTVGRVAQSVRVTSRIFFSTGELIRVLPYTRSKRLICSTRAAHNEEAAAKAAASVADTGAPTIFDKIIAKEIPSDIVYEDENVLAFRDINPQAPVHVLVIPKLRDGLTSLGKAEPRHVEVLGQLLHASKIVAEKEGILDGFRVVINNGVEACQSVYHLHLHVLGGRQMKWPPG

SEQ ID NO: 37311 - protein, 180 aa, Arabidopsis thaliana
  peptide (1)..(180): Ceres Seq. ID no. 13576642
  misc_feature (49)..(180): Homolog of NCBI NO: 23612841 NR Description: protein kinase c inhibitor-like protein, putative
  misc_feature (73)..(180): Homolog of NCBI NO: 23480654 NR Description: putative protein kinase C interacting protein 1
  misc_feature (69)..(180): Homolog of NCBI NO: 1177046 NR Description: 14 KD ZINC-BINDING PROTEIN (PROTEIN KINASE C
  misc_feature (57)..(180): Homolog of NCBI NO: 18410510 NR Description: protein kinase C inhibitor-related protein
  misc_feature (57)..(180): Homolog of NCBI NO: 11260559 NR Description: protein kinase C inhibitor-like protein -
  misc_feature (54)..(180): Homolog of NCBI NO: 1177047 NR Description: 14 KD ZINC-BINDING PROTEIN (PROTEIN KINASE C
  misc_feature (51)..(180): Homolog of NCBI NO: 629858 NR Description: protein kinase C inhibitor - maize
  misc_feature (160)..(180): Homolog of NCBI NO: 25518144 NR Description: F28K20.9 protein - Arabidopsis thaliana
  misc_feature (1)..(161): Homolog of NCBI NO: 25518144 NR Description: F28K20.9 protein - Arabidopsis thaliana
  misc_feature (1)..(180): Homolog of NCBI NO: 15221629 NR Description: protein kinase C inhibitor (Zinc-binding protein)
MLLLRNFSTVGRVAQSVRVTSRIFFSTGELIRVLPYTRSKRLICSTRAAHNEEAAAKAAASVADTGAPTIFDKIIAKEIPSDIVYEDENVLAFRDINPQAPVHVLVIPKLRDGLTSLGKAEPRHVEVLGQLLHASKIVAEKEGILDGFRVVINNGVEACQSVYHLHLHVLGGRQMKWPPG

SEQ ID NO: 37312 - DNA, 845 bp, Arabidopsis thaliana
  misc_feature (1)..(845): Ceres Seq. ID no. 12357707
  misc_feature: MA Experiment ID: 108435 Result: Down-regulated in Transcription
  misc_feature: MA Experiment 108435 PARAMETER Experiment Name: At_stm_Mutants_cDNA_P Parameter: Plant Line Value: wt Landsburg vs stm
  misc_feature: MA Experiment 108435 PARAMETER Experiment Name: At_stm_Mutants_cDNA_P Parameter: Tissue Value: Shoot Apical Meristem Region
  misc_feature: MA Experiment ID: 108461 Result: Up-regulated in Transcription
  misc_feature: MA Experiment 108461 PARAMETER Experiment Name: At_Germinating_Seeds_cDNA_P Parameter: Age (day) Value: 1 vs. 0
  misc_feature: MA Experiment 108461 PARAMETER Experiment Name: At_Germinating_Seeds_cDNA_P Parameter: Tissue Value: Germinating Seeds
  misc_feature: MA Experiment ID: 108462 Result: Up-regulated in Transcription
  misc_feature: MA Experiment 108462 PARAMETER Experiment Name: At_Germinating_Seeds_cDNA_P Parameter: Age (day) Value: 2 vs. 0
  misc_feature: MA Experiment 108462 PARAMETER Experiment Name: At_Germinating_Seeds_cDNA_P Parameter: Tissue Value: Germinating Seeds
  misc_feature: MA Experiment ID: 108463 Result: Up-regulated in Transcription
  misc_feature: MA Experiment 108463 PARAMETER Experiment Name: At_Germinating_Seeds_cDNA_P Parameter: Age (day) Value: 3 vs. 0
  misc_feature: MA Experiment 108463 PARAMETER Experiment Name: At_Germinating_Seeds_cDNA_P Parameter: Tissue Value: Germinating Seeds
  misc_feature: MA Experiment ID: 108464 Result: Up-regulated in Transcription
  misc_feature: MA Experiment 108464 PARAMETER Experiment Name: At_Germinating_Seeds_cDNA_P Parameter: Age (day) Value: 4 vs. 0
  misc_feature: MA Experiment 108464 PARAMETER Experiment Name: At_Germinating_Seeds_cDNA_P Parameter: Tissue Value: Germinating Seeds
  misc_feature: MA Experiment ID: 108488 Result: Down-regulated in Transcription
  misc_feature: MA Experiment ID: 108595 Result: Up-regulated in Transcription
  misc_feature: MA Experiment 108595 PARAMETER Experiment Name: At_Ler-pi_Ovule_cDNA_P Parameter: Plant Line Value: null
  misc_feature: MA Experiment ID: 108608 Result: Up-regulated in Transcription
  misc_feature: MA Experiment 108608 PARAMETER Experiment Name: At_100uM_ABA_cDNA_P Parameter: Timepoint (hr) Value: 1
  misc_feature: MA Experiment 108608 PARAMETER Experiment Name: At_100uM_ABA_cDNA_P Parameter: Tissue Value: Aerial
  misc_feature: MA Experiment 108608 PARAMETER Experiment Name: At_100uM_ABA_cDNA_P Parameter: Treatment Value: 100uM ABA vs. No Treatment
  misc_feature: MA Experiment ID: 108609 Result: Up-regulated in Transcription
  misc_feature: MA Experiment 108609 PARAMETER Experiment Name: At_100uM_ABA_cDNA_P Parameter: Timepoint (hr) Value: 24
  misc_feature: MA Experiment 108609 PARAMETER Experiment Name: At_100uM_ABA_cDNA_P Parameter: Tissue Value: Aerial
  misc_feature: MA Experiment 108609 PARAMETER Experiment Name: At_100uM_ABA_cDNA_P Parameter: Treatment Value: 100uM ABA vs. No Treatment
  misc_feature: MA Experiment ID: 20000069 Result: Up-regulated in Transcription
  misc_feature: MA Experiment 20000069 PARAMETER Experiment Name: At_100uM_ABA_Mutants_cDNA_P Parameter: Plant Line Value: CS23
  misc_feature: MA Experiment 20000069 PARAMETER Experiment Name: At_100uM_ABA_Mutants_cDNA_P Parameter: Timepoint (hr) Value: 6
  misc_feature: MA Experiment 20000069 PARAMETER Experiment Name: At_100uM_ABA_Mutants_cDNA_P Parameter: Tissue Value: Aerial
  misc_feature: MA Experiment 20000069 PARAMETER Experiment Name: At_100uM_ABA_Mutants_cDNA_P Parameter: Treatment Value: 100uM ABA vs. No Treatment
  misc_feature: MA Experiment ID: 20000070 Result: Up-regulated in Transcription
  misc_feature: MA Experiment 20000070 PARAMETER Experiment Name: At_100uM_ABA_Mutants_cDNA_P Parameter: Plant Line Value: CS24
  misc_feature: MA Experiment 20000070 PARAMETER Experiment Name: At_100uM_ABA_Mutants_cDNA_P Parameter: Timepoint (hr) Value: 6
  misc_feature: MA Experiment 20000070 PARAMETER Experiment Name: At_100uM_ABA_Mutants_cDNA_P Parameter: Tissue Value: Aerial
  misc_feature: MA Experiment 20000070 PARAMETER Experiment Name: At_100uM_ABA_Mutants_cDNA_P Parameter: Treatment Value: 100uM ABA vs. No Treatment
  misc_feature: MA Experiment ID: 20000071 Result: Up-regulated in Transcription
  misc_feature: MA Experiment 20000071 PARAMETER Experiment Name: At_100uM_ABA_Mutants_cDNA_P Parameter: Plant Line Value: CS8104
  misc_feature: MA Experiment 20000071 PARAMETER Experiment Name: At_100uM_ABA_Mutants_cDNA_P Parameter: Timepoint (hr) Value: 6
  misc_feature: MA Experiment 20000071 PARAMETER Experiment Name: At_100uM_ABA_Mutants_cDNA_P Parameter: Tissue Value: Aerial
  misc_feature: MA Experiment 20000071 PARAMETER Experiment Name: At_100uM_ABA_Mutants_cDNA_P Parameter: Treatment Value: 100uM ABA vs. No Treatment
  misc_feature: MA Experiment ID: 20000072 Result: Up-regulated in Transcription
  misc_feature: MA Experiment 20000072 PARAMETER Experiment Name: At_100uM_ABA_Mutants_cDNA_P Parameter: Plant Line Value: CS8105
  misc_feature: MA Experiment 20000072 PARAMETER Experiment Name: At_100uM_ABA_Mutants_cDNA_P Parameter: Timepoint (hr) Value: 6
  misc_feature: MA Experiment 20000072 PARAMETER Experiment Name: At_100uM_ABA_Mutants_cDNA_P Parameter: Tissue Value: Aerial
  misc_feature: MA Experiment 20000072 PARAMETER Experiment Name: At_100uM_ABA_Mutants_cDNA_P Parameter: Treatment Value: 100uM ABA vs. No Treatment
  misc_feature: MA Experiment ID: 20000086 Result: Up-regulated in Transcription
  misc_feature: MA Experiment 20000086 PARAMETER Experiment Name: At_100uM_ABA_Mutants_cDNA_P Parameter: Plant Line Value: CS22
  misc_feature: MA Experiment 20000086 PARAMETER Experiment Name: At_100uM_ABA_Mutants_cDNA_P Parameter: Timepoint (hr) Value: 6
  misc_feature: MA Experiment 20000086 PARAMETER Experiment Name: At_100uM_ABA_Mutants_cDNA_P Parameter: Tissue Value: Aerial
  misc_feature: MA Experiment 20000086 PARAMETER Experiment Name: At_100uM_ABA_Mutants_cDNA_P Parameter: Treatment Value: 100uM ABA vs. No Treatment
  misc_feature: MA Experiment ID: 20000087 Result: Up-regulated in Transcription
  misc_feature: MA Experiment 20000087 PARAMETER Experiment Name: At_100uM_ABA_Mutants_cDNA_P Parameter: Plant Line Value: WS
  misc_feature: MA Experiment 20000087 PARAMETER Experiment Name: At_100uM_ABA_Mutants_cDNA_P Parameter: Timepoint (hr) Value: 6
  misc_feature: MA Experiment 20000087 PARAMETER Experiment Name: At_100uM_ABA_Mutants_cDNA_P Parameter: Tissue Value: Aerial
  misc_feature: MA Experiment 20000087 PARAMETER Experiment Name: At_100uM_ABA_Mutants_cDNA_P Parameter: Treatment Value: 100uM ABA vs. No Treatment
  misc_feature: MA Experiment ID: 20000088 Result: Up-regulated in Transcription
  misc_feature: MA Experiment 20000088 PARAMETER Experiment Name: At_100uM_ABA_Mutants_cDNA_P Parameter: Plant Line Value: Landsberg
  misc_feature: MA Experiment 20000088 PARAMETER Experiment Name: At_100uM_ABA_Mutants_cDNA_P Parameter: Timepoint (hr) Value: 6
  misc_feature: MA Experiment 20000088 PARAMETER Experiment Name: At_100uM_ABA_Mutants_cDNA_P Parameter: Tissue Value: Aerial
  misc_feature: MA Experiment 20000088 PARAMETER Experiment Name: At_100uM_ABA_Mutants_cDNA_P Parameter: Treatment Value: 100uM ABA vs. No Treatment
  misc_feature: MA Experiment ID: 20000089 Result: Up-regulated in Transcription
  misc_feature: MA Experiment ID: 20000090 Result: Up-regulated in Transcription
  misc_feature: MA Experiment ID: 20000113 Result: Up-regulated in Transcription
  misc_feature: MA Experiment 20000113 PARAMETER Experiment Name: At_42deg_Heat_cDNA_P Parameter: Temperature (deg C) Value: 42 vs. 22
  misc_feature: MA Experiment 20000113 PARAMETER Experiment Name: At_42deg_Heat_cDNA_P Parameter: Timepoint (hr) Value: 8
  misc_feature: MA Experiment 20000113 PARAMETER Experiment Name: At_42deg_Heat_cDNA_P Parameter: Tissue Value: Aerial
  misc_feature: MA Experiment ID: 20000117 Result: Up-regulated in Transcription
  misc_feature: MA Experiment 20000117 PARAMETER Experiment Name: At_100uM_ABA_Mutants_cDNA_P Parameter: Plant Line Value: Columbia
  misc_feature: MA Experiment 20000117 PARAMETER Experiment Name: At_100uM_ABA_Mutants_cDNA_P Parameter: Timepoint (hr) Value: 6
  misc_feature: MA Experiment 20000117 PARAMETER Experiment Name: At_100uM_ABA_Mutants_cDNA_P Parameter: Tissue Value: Aerial
  misc_feature: MA Experiment 20000117 PARAMETER Experiment Name: At_100uM_ABA_Mutants_cDNA_P Parameter: Treatment Value: 100uM ABA vs. No Treatment
  misc_feature: MA Experiment ID: 20000166 Result: Up-regulated in Transcription
  misc_feature: MA Experiment 20000166 PARAMETER Experiment Name: At_100uM_ABA_P Parameter: Age (day) Value: 14
  misc_feature: MA Experiment 20000166 PARAMETER Experiment Name: At_100uM_ABA_P Parameter: Organism Value: A. thaliana
  misc_feature: MA Experiment 20000166 PARAMETER Experiment Name: At_100uM_ABA_P Parameter: Plant Line Value: WS
  misc_feature: MA Experiment 20000166 PARAMETER Experiment Name: At_100uM_ABA_P Parameter: Timepoint (hr) Value: 1
  misc_feature: MA Experiment 20000166 PARAMETER Experiment Name: At_100uM_ABA_P Parameter: Tissue Value: Aerial
  misc_feature: MA Experiment 20000166 PARAMETER Experiment Name: At_100uM_ABA_P Parameter: Treatment Value: 100uM ABA vs. No Treatment
  misc_feature: MA Experiment ID: 20000180 Result: Up-regulated in Transcription
  misc_feature: MA Experiment 20000180 PARAMETER Experiment Name: At_Germinating_Seeds_P Parameter: Age (hr) Value: 24 vs. 0
  misc_feature: MA Experiment 20000180 PARAMETER Experiment Name: At_Germinating_Seeds_P Parameter: Tissue Value: Germinating Seeds
  misc_feature: MA Experiment ID: 20000184 Result: Down-regulated in Transcription
  misc_feature: MA Experiment 20000184 PARAMETER Experiment Name: At_Shoots__P Parameter: Age (day) Value: 7
  misc_feature: MA Experiment 20000184 PARAMETER Experiment Name: At_Shoots__P Parameter: Tissue Value: Shoots vs. Whole Plant
  misc_feature: MA Experiment ID: 20000227 Result: Up-regulated in Transcription
  misc_feature: MA Experiment 20000227 PARAMETER Experiment Name: At_Root-Tips-vs-Tops_P Parameter: Tissue Value: Root Tips vs. Root Tops
  misc_feature: MA Experiment ID: 20000437 Result: Up-regulated in Transcription
  misc_feature: MA Experiment 20000437 PARAMETER Experiment Name: At_Drought_P Parameter: Age (day) Value: 8
  misc_feature: MA Experiment 20000437 PARAMETER Experiment Name: At_Drought_P Parameter: Organism Value: A. thaliana
  misc_feature: MA Experiment 20000437 PARAMETER Experiment Name: At_Drought_P Parameter: Plant Line Value: WS
  misc_feature: MA Experiment 20000437 PARAMETER Experiment Name: At_Drought_P Parameter: Timepoint (hr) Value: 24
  misc_feature: MA Experiment 20000437 PARAMETER Experiment Name: At_Drought_P Parameter: Tissue Value: Whole Plant
  misc_feature: MA Experiment 20000437 PARAMETER Experiment Name: At_Drought_P Parameter: Treatment Value: Drought vs. No Drought
  misc_feature: MA Experiment ID: 20000453 Result: Up-regulated in Transcription
  misc_feature: MA Experiment 20000453 PARAMETER Experiment Name: At_100uM_ABA_P Parameter: Age (day) Value: 15
  misc_feature: MA Experiment 20000453 PARAMETER Experiment Name: At_100uM_ABA_P Parameter: Organism Value: A. thaliana
  misc_feature: MA Experiment 20000453 PARAMETER Experiment Name: At_100uM_ABA_P Parameter: Plant Line Value: WS
  misc_feature: MA Experiment 20000453 PARAMETER Experiment Name: At_100uM_ABA_P Parameter: Timepoint (hr) Value: 24
  misc_feature: MA Experiment 20000453 PARAMETER Experiment Name: At_100uM_ABA_P Parameter: Tissue Value: Aerial
  misc_feature: MA Experiment 20000453 PARAMETER Experiment Name: At_100uM_ABA_P Parameter: Treatment Value: 100uM ABA vs. No Treatment
  misc_feature: MA Experiment ID: 20000496 Result: Down-regulated in Transcription
  misc_feature: MA Experiment 20000496 PARAMETER Experiment Name: At_Guard_Cells_P Parameter: Harvest Date Value: 7/19/2002
  misc_feature: MA Experiment 20000496 PARAMETER Experiment Name: At_Guard_Cells_P Parameter: Organism Value: Canola
  misc_feature: MA Experiment 20000496 PARAMETER Experiment Name: At_Guard_Cells_P Parameter: Tissue Value: Guard Cells vs. Leaves
  misc_feature: MA Experiment ID: 20001248 Result: Up-regulated in Transcription
  misc_feature: MA Experiment 20001248 PARAMETER Experiment Name: At_Far-red-induction_P Parameter: Age (day) Value: 7
  misc_feature: MA Experiment 20001248 PARAMETER Experiment Name: At_Far-red-induction_P Parameter: Light Value: Far-red vs. White
  misc_feature: MA Experiment 20001248 PARAMETER Experiment Name: At_Far-red-induction_P Parameter: Organism Value: A. thaliana
  misc_feature: MA Experiment 20001248 PARAMETER Experiment Name: At_Far-red-induction_P Parameter: Plant Line Value: Columbia
  misc_feature: MA Experiment 20001248 PARAMETER Experiment Name: At_Far-red-induction_P Parameter: Timepoint (hr) Value: 4
  misc_feature: MA Experiment 20001248 PARAMETER Experiment Name: At_Far-red-induction_P Parameter: Tissue Value: Whole Plant
  misc_feature: MA Experiment ID: 20001451 Result: Up-regulated in Transcription
  misc_feature: MA Experiment 20001451 PARAMETER Experiment Name: At_Far-red-induction_P Parameter: Age (day) Value: 7
  misc_feature: MA Experiment 20001451 PARAMETER Experiment Name: At_Far-red-induction_P Parameter: Light Value: Far-red vs. White
  misc_feature: MA Experiment 20001451 PARAMETER Experiment Name: At_Far-red-induction_P Parameter: Organism Value: A. thaliana
  misc_feature: MA Experiment 20001451 PARAMETER Experiment Name: At_Far-red-induction_P Parameter: Plant Line Value: Columbia
  misc_feature: MA Experiment 20001451 PARAMETER Experiment Name: At_Far-red-induction_P Parameter: Timepoint (hr) Value: 24
  misc_feature: MA Experiment 20001451 PARAMETER Experiment Name: At_Far-red-induction_P Parameter: Tissue Value: Whole Plant
  misc_feature: MA Experiment ID: 20001557 Result: Down-regulated in Transcription
  misc_feature: MA Experiment 20001557 PARAMETER Experiment Name: At_Drought_Soil_Dry_P Parameter: Age (day) Value: 27
  misc_feature: MA Experiment 20001557 PARAMETER Experiment Name: At_Drought_Soil_Dry_P Parameter: Organism Value: A. thaliana
  misc_feature: MA Experiment 20001557 PARAMETER Experiment Name: At_Drought_Soil_Dry_P Parameter: Plant Line Value: WS
  misc_feature: MA Experiment 20001557 PARAMETER Experiment Name: At_Drought_Soil_Dry_P Parameter: Post Timepoint (hr) Value: 3
  misc_feature: MA Experiment 20001557 PARAMETER Experiment Name: At_Drought_Soil_Dry_P Parameter: Post-Treatment Value: Re-Water vs. No Drought
  misc_feature: MA Experiment 20001557 PARAMETER Experiment Name: At_Drought_Soil_Dry_P Parameter: Timepoint (day) Value: 13
  misc_feature: MA Experiment 20001557 PARAMETER Experiment Name: At_Drought_Soil_Dry_P Parameter: Treatment Value: Drought vs. No Drought
  misc_feature: MA Experiment ID: 20001558 Result: Down-regulated in Transcription
  misc_feature: MA Experiment 20001558 PARAMETER Experiment Name: At_Drought_Soil_Dry_P Parameter: Age (day) Value: 27
  misc_feature: MA Experiment 20001558 PARAMETER Experiment Name: At_Drought_Soil_Dry_P Parameter: Organism Value: A. thaliana
  misc_feature: MA Experiment 20001558 PARAMETER Experiment Name: At_Drought_Soil_Dry_P Parameter: Plant Line Value: WS
  misc_feature: MA Experiment 20001558 PARAMETER Experiment Name: At_Drought_Soil_Dry_P Parameter: Post Timepoint (hr) Value: 6
  misc_feature: MA Experiment 20001558 PARAMETER Experiment Name: At_Drought_Soil_Dry_P Parameter: Post-Treatment Value: Re-Water vs. No Drought
  misc_feature: MA Experiment 20001558 PARAMETER Experiment Name: At_Drought_Soil_Dry_P Parameter: Timepoint (day) Value: 13
  misc_feature: MA Experiment 20001558 PARAMETER Experiment Name: At_Drought_Soil_Dry_P Parameter: Treatment Value: Drought vs. No Drought
  misc_feature: MA Experiment ID: 20001911 Result: Up-regulated in Transcription
  misc_feature: MA Experiment 20001911 PARAMETER Experiment Name: At_Drought_Reproduction_P Parameter: Age (day) Value: 40
  misc_feature: MA Experiment 20001911 PARAMETER Experiment Name: At_Drought_Reproduction_P Parameter: Organism Value: A. thaliana
  misc_feature: MA Experiment 20001911 PARAMETER Experiment Name: At_Drought_Reproduction_P Parameter: Plant Line Value: WS
  misc_feature: MA Experiment 20001911 PARAMETER Experiment Name: At_Drought_Reproduction_P Parameter: Timepoint (day) Value: 10
  misc_feature: MA Experiment 20001911 PARAMETER Experiment Name: At_Drought_Reproduction_P Parameter: Tissue Value: Flowers
  misc_feature: MA Experiment 20001911 PARAMETER Experiment Name: At_Drought_Reproduction_P Parameter: Treatment Value: Drought vs. No Drought
acaagtcaccaccatttctctctagaaaaaatctgaaaaacaaaaccatctcaaagtttcttgagaagaaaaaaagggtcaagaaagatgcctaaagacaggaatatcggaatcgccatggatttctcagagagcagcaagaacgctctgaaatgggcgatcgagaacttagcagacaaaggagacacgatttacatcatccacactctaccactctctggcgatgaatctcgtaactccctctggttcaaatccggttctcctctcataccgttggcagagtttagggaaccggagattatggagaaatacggtgtcaaaaccgacatcgcatgtcttgatatgctcgacactggttcgaggcagaaagaggtttttatccgaatcaacaatacatttttgttcaaagactctttggcaaagacaataactaatggtggttttgttgaaataaaaaggtgcatgtagtgaccaagttatactggggagatgcaagagagaagcttgttgatgctgttaaagatcttaaactcgattctattgtcatgggaagcagaggactcagtgctcttcaaaggataataatgggaagcgtgagcagctttgtgatccaacacgcgccttgccctgtcaccgttgtcaaggataacgaataaacgattctcactacaaaaaaaaaaaaaaaactgtctttatcttataagtcctaccaaataatcatcgcaatttatgctttttattttttattaataaaagaatctttatgttggttttatttgtaatttgactacaacaaaaaaagaacccagagtgttttcatcttctagttttgagagtttcttgct

SEQ ID NO: 37313 - protein, 126 aa, Arabidopsis thaliana
  peptide (1)..(126): Ceres Seq. ID no. 12357708
  misc_feature (4)..(98): Pfam Name: Universal stress protein family Pfam Description: Universal stress protein family
  misc_feature (5)..(100): Homolog of NCBI NO: 15528707 NR Description: P0583G08.8 [Oryza sativa (japonica
  misc_feature (5)..(98): Homolog of NCBI NO: 18401345 NR Description: expressed protein
  misc_feature (1)..(96): Homolog of NCBI NO: 18396497 NR Description: expressed protein
  misc_feature (4)..(98): Homolog of NCBI NO: 20160561 NR Description: P0414E03.3 [Oryza sativa (japonica
  misc_feature (1)..(96): Homolog of NCBI NO: 30678807 NR Description: expressed protein [Arabidopsis thaliana]
  misc_feature (1)..(98): Homolog of NCBI NO: 11602749 NR Description: early nodulin ENOD18 [Vicia faba]
  misc_feature (1)..(98): Homolog of NCBI NO: 11602747 NR Description: early nodulin ENOD18 [Vicia faba]
  misc_feature (3)..(98): Homolog of NCBI NO: 11602751 NR Description: ENOD18 protein [Vicia faba]
  misc_feature (1)..(126): Homolog of NCBI NO: 21555070 NR Description: unknown [Arabidopsis thaliana]
  misc_feature (1)..(98): Homolog of NCBI NO: 30693971 NR Description: expressed protein [Arabidopsis thaliana]
MPKDRNIGIAMDFSESSKNALKWAIENLADKGDTIYIIHTLPLSGDESRNSLWFKSGSPLIPLAEFREPEIMEKYGVKTDIACLDMLDTGSRQKEVFIRINNTFLFKDSLAKTITNGGFVEIKRCM

SEQ ID NO: 37314 - protein, 116 aa, Arabidopsis thaliana
  peptide (1)..(116): Ceres Seq. ID no. 12357709
  misc_feature (1)..(88): Pfam Name: Universal stress protein family Pfam Description: Universal stress protein family
  misc_feature (1)..(90): Homolog of NCBI NO: 15528707 NR Description: P0583G08.8 [Oryza sativa (japonica
  misc_feature (1)..(88): Homolog of NCBI NO: 18401345 NR Description: expressed protein
  misc_feature (1)..(86): Homolog of NCBI NO: 18396497 NR Description: expressed protein
  misc_feature (1)..(88): Homolog of NCBI NO: 20160561 NR Description: P0414E03.3 [Oryza sativa (japonica
  misc_feature (1)..(86): Homolog of NCBI NO: 30678807 NR Description: expressed protein [Arabidopsis thaliana]
  misc_feature (1)..(88): Homolog of NCBI NO: 11602749 NR Description: early nodulin ENOD18 [Vicia faba]
  misc_feature (1)..(88): Homolog of NCBI NO: 11602747 NR Description: early nodulin ENOD18 [Vicia faba]
  misc_feature (1)..(88): Homolog of NCBI NO: 11602751 NR Description: ENOD18 protein [Vicia faba]
  misc_feature (1)..(116): Homolog of NCBI NO: 21555070 NR Description: unknown [Arabidopsis thaliana]
  misc_feature (1)..(88): Homolog of NCBI NO: 30693971 NR Description: expressed protein [Arabidopsis thaliana]
MDFSESSKNALKWAIENLADKGDTIYIIHTLPLSGDESRNSLWFKSGSPLIPLAEFREPEIMEKYGVKTDIACLDMLDTGSRQKEVFIRINNTFLFKDSLAKTITNGGFVEIKRCM

SEQ ID NO: 37315 - protein, 68 aa, Arabidopsis thaliana
  peptide (1)..(68): Ceres Seq. ID no. 12357710
MNLVTPSGSNPVLLSYRWQSLGNRRLWRNTVSKPTSHVLICSTLVRGRKRFLSESTIHFCSKTLWQRQ

SEQ ID NO: 37316 - DNA, 1885 bp, Arabidopsis thaliana
  misc_feature (1)..(1885): Ceres Seq. ID no. 12394454
  misc_feature: MA Experiment ID: 108488 Result: Up-regulated in Transcription
  misc_feature: MA Experiment ID: 108573 Result: Up-regulated in Transcription
  misc_feature: MA Experiment 108573 PARAMETER Experiment Name: At_Drought_cDNA_P Parameter: Timepoint (hr) Value: 6
  misc_feature: MA Experiment 108573 PARAMETER Experiment Name: At_Drought_cDNA_P Parameter: Tissue Value: Aerial
  misc_feature: MA Experiment 108573 PARAMETER Experiment Name: At_Drought_cDNA_P Parameter: Treatment Value: Drought vs. No Drought
  misc_feature: MA Experiment ID: 108595 Result: Down-regulated in Transcription
  misc_feature: MA Experiment 108595 PARAMETER Experiment Name: At_Ler-pi_Ovule_cDNA_P Parameter: Plant Line Value: null
  misc_feature: MA Experiment ID: 20000184 Result: Up-regulated in Transcription
  misc_feature: MA Experiment 20000184 PARAMETER Experiment Name: At_Shoots__P Parameter: Age (day) Value: 7
  misc_feature: MA Experiment 20000184 PARAMETER Experiment Name: At_Shoots__P Parameter: Tissue Value: Shoots vs. Whole Plant
cacacattcttgcagaaggttttagaatcacaaagcataactcacctacccctaaaccaactccaatttctctcctcctctattaaatctttctcaatcatctttctttgagtcttttgccttggaatcctgatcatggcgtcttctctcacttccaaatccattctcggatgcaccaaacccgcttcttcttcttttcttccgtcggagctccgtcgtctctcttctcccgccgttcagatatctctccattcacaaaccaggaagaacttccggcagtcgtggggattgaagaagagtgatctgatgctaaatggttctgagattcgtcctgtgaaggttagggcttctgtttccacggcggagaaagcttcggagattgtgcttcaacccattagagaaatctcgggtctcattaagcttcctggctccaagtctctctctaatcgaattctgcttctcgctgctctatctgagggaactactgtagtggacaacttgttgaacagtgatgacatcaattacatgcttgatgcgttgaagatattgggacttaatgtggaaactcacagtgaaaacaatcgtgctgtagttgaaggatgtggcggggtatttccagcttccattgattccaagagtgatatcgaactttacctcggcaatgcaggaacagcaatgcgtccacttaccgccgcagttactgctgcaggtggcaacgcaagttatgtccttgatggggtgcctcggatgagagagagacctataggggatttggttgttggtcttaagcagcttggtgctgatgttgaatgtactcttggcactaactgccctcctgttcgtgtcaacgctaatggtggccttcctggtggaaaggtgaagctttctggatctattagtagtcagtacttgaccgctctgctcatggcagctcccttagctcttggagacgtcgaaattgaaattgtcgataaattgatttctgttccgtatgttgaaatgacattgaagttgatggaacgttttggggtaagtgctgagcatagtgaaagctgggatcgtttctttgttaagggtgggcaaaaatacaagtcgccgggtaatgcttacgtagaaggtgatgcttctagtgctagttatttcctggctggtgctgccattaccggtgaaactgtcactgttgaaggttgtggaacgaccagtttgcagggagatgtgaaatttgccgaggttcttgagaaaatgggatgtaaagtgtcctggacagagaacagtgtgactgtgacagggccgtctagagatgcttttggaatgagacacttgcgggctattgatgtcaacatgaacaaaatgcctgatgtagcaatgactcttgccgtcgttgctctctttgccgatggtccaaccaccattagagatgtggctagctggagagtaaaggagacggaaaggatgattgccatttgcacagagcttagaaaactgggagctacagtggaagaaggttcagattattgtgtgattactccgccgaaaaaggtgaaaccggcagagattgatacatatgatgatcatagaatggcaatggcattctctcttgcagcttgtgctgatgttccaatcaccatcaatgaccccggttgcaccaggaaaaccttccccgactacttccaagtccttgaaagaatcacaaagcattaaacaaaaaaactctaaaatctccactgttttttcttctgatccaagcttatctgtttccatttttcttgtctctgtaacattattagaaagcaagagtagtgtttgtttgtgtgtacctgaactgagtgagatttgagatgcaatcattgaatcggctttggtatatcattttactctgttttcc

SEQ ID NO: 37317 - protein, 521 aa, Arabidopsis thaliana
  peptide (1)..(521): Ceres Seq. ID no. 12394455
  misc_feature (40)..(521): Homolog of NCBI NO: 114176 NR Description: 3-phosphoshikimate 1-carboxyvinyltransferase, precursor (5-enolpyruvylshikimate-3-phosphate synthase) (EPSP
  misc_feature (32)..(521): Homolog of NCBI NO: 66619 NR Description: 3-phosphoshikimate 1-carboxyvinyltransferase (EC
  misc_feature (12)..(521): Homolog of NCBI NO: 114165 NR Description: 3-phosphoshikimate 1-carboxyvinyltransferase 1, precursor (5-enolpyruvylshikimate-3-phosphate synthase 1) (EPSP
  misc_feature (12)..(521): Homolog of NCBI NO: 1351978 NR Description: 3-phosphoshikimate 1-carboxyvinyltransferase, precursor (3-enolpyruvylshikimate-5-phosphate synthase) (EPSP
  misc_feature (24)..(521): Homolog of NCBI NO: 114171 NR Description: 3-phosphoshikimate 1-carboxyvinyltransferase, precursor (3-enolpyruvylshikimate-5-phosphate synthase) (EPSP
  misc_feature (12)..(521): Homolog of NCBI NO: 66618 NR Description: 3-phosphoshikimate 1-carboxyvinyltransferase (EC
  misc_feature (12)..(521): Homolog of NCBI NO: 15225450 NR Description: 5-enolpyruvylshikimate-3-phosphate (EPSP) synthase
  misc_feature (19)..(521): Homolog of NCBI NO: 18251236 NR Description: 5-enolpyruvylshikimate-3-phosphate synthase
  misc_feature (1)..(521): Homolog of NCBI NO: 21555078 NR Description: 5-enolpyruvylshikimate-3-phosphate (EPSP)
  misc_feature (1)..(521): Homolog of NCBI NO: 15221986 NR Description: 5-enolpyruvylshikimate-3-phosphate (EPSP)
MASSLTSKSILGCTKPASSSFLPSELRRLSSPAVQISLHSQTRKNFRQSWGLKKSDLMLNGSEIRPVKVRASVSTAEKASEIVLQPIREISGLIKLPGSKSLSNRILLLAALSEGTTVVDNLLNSDDINYMLDALKILGLNVETHSENNRAVVEGCGGVFPASIDSKSDIELYLGNAGTAMRPLTAAVTAAGGNASYVLDGVPRMRERPIGDLVVGLKQLGADVECTLGTNCPPVRVNANGGLPGGKVKLSGSISSQYLTALLMAAPLALGDVEIEIVDKLISVPYVEMTLKLMERFGVSAEHSESWDRFFVKGGQKYKSPGNAYVEGDASSASYFLAGAAITGETVTVEGCGTTSLQGDVKFAEVLEKMGCKVSWTENSVTVTGPSRDAFGMRHLRAIDVNMNKMPDVAMTLAVVALFADGPTTIRDVASWRVKETERMIAICTELRKLGATVEEGSDYCVITPPKKVKPAEIDTYDDHRMAMAFSLAACADVPITINDPGCTRKTFPDYFQVLERITKH

SEQ ID NO: 37318 - protein, 464 aa, Arabidopsis thaliana
  peptide (1)..(464): Ceres Seq. ID no. 12394456
  misc_feature (1)..(464): Homolog of NCBI NO: 114176 NR Description: 3-phosphoshikimate 1-carboxyvinyltransferase, precursor (5-enolpyruvylshikimate-3-phosphate synthase) (EPSP
  misc_feature (1)..(464): Homolog of NCBI NO: 66619 NR Description: 3-phosphoshikimate 1-carboxyvinyltransferase (EC
  misc_feature (1)..(464): Homolog of NCBI NO: 114165 NR Description: 3-phosphoshikimate 1-carboxyvinyltransferase 1, precursor (5-enolpyruvylshikimate-3-phosphate synthase 1) (EPSP
  misc_feature (1)..(464): Homolog of NCBI NO: 1351978 NR Description: 3-phosphoshikimate 1-carboxyvinyltransferase, precursor (3-enolpyruvylshikimate-5-phosphate synthase) (EPSP
  misc_feature (1)..(464): Homolog of NCBI NO: 114171 NR Description: 3-phosphoshikimate 1-carboxyvinyltransferase, precursor (3-enolpyruvylshikimate-5-phosphate synthase) (EPSP
  misc_feature (1)..(464): Homolog of NCBI NO: 66618 NR Description: 3-phosphoshikimate 1-carboxyvinyltransferase (EC
  misc_feature (1)..(464): Homolog of NCBI NO: 15225450 NR Description: 5-enolpyruvylshikimate-3-phosphate (EPSP) synthase
  misc_feature (1)..(464): Homolog of NCBI NO: 18251236 NR Description: 5-enolpyruvylshikimate-3-phosphate synthase
  misc_feature (1)..(464): Homolog of NCBI NO: 21555078 NR Description: 5-enolpyruvylshikimate-3-phosphate (EPSP)
  misc_feature (1)..(464): Homolog of NCBI NO: 15221986 NR Description: 5-enolpyruvylshikimate-3-phosphate (EPSP)
MLNGSEIRPVKVRASVSTAEKASEIVLQPIREISGLIKLPGSKSLSNRILLLAALSEGTTVVDNLLNSDDINYMLDALKILGLNVETHSENNRAVVEGCGGVFPASIDSKSDIELYLGNAGTAMRPLTAAVTAAGGNASYVLDGVPRMRERPIGDLVVGLKQLGADVECTLGTNCPPVRVNANGGLPGGKVKLSGSISSQYLTALLMAAPLALGDVEIEIVDKLISVPYVEMTLKLMERFGVSAEHSESWDRFFVKGGQKYKSPGNAYVEGDASSASYFLAGAAITGETVTVEGCGTTSLQGDVKFAEVLEKMGCKVSWTENSVTVTGPSRDAFGMRHLRAIDVNMNKMPDVAMTLAVVALFADGPTTIRDVASWRVKETERMIAICTELRKLGATVEEGSDYCVITPPKKVKPAEIDTYDDHRMAMAFSLAACADVPITINDPGCTRKTFPDYFQVLERITKH

SEQ ID NO: 37319 - protein, 391 aa, Arabidopsis thaliana
  peptide (1)..(391): Ceres Seq. ID no. 12394457
  misc_feature (1)..(391): Homolog of NCBI NO: 114176 NR Description: 3-phosphoshikimate 1-carboxyvinyltransferase, precursor (5-enolpyruvylshikimate-3-phosphate synthase) (EPSP
  misc_feature (1)..(391): Homolog of NCBI NO: 66619 NR Description: 3-phosphoshikimate 1-carboxyvinyltransferase (EC
  misc_feature (1)..(391): Homolog of NCBI NO: 114165 NR Description: 3-phosphoshikimate 1-carboxyvinyltransferase 1, precursor (5-enolpyruvylshikimate-3-phosphate synthase 1) (EPSP
  misc_feature (1)..(391): Homolog of NCBI NO: 1351978 NR Description: 3-phosphoshikimate 1-carboxyvinyltransferase, precursor (3-enolpyruvylshikimate-5-phosphate synthase) (EPSP
  misc_feature (1)..(391): Homolog of NCBI NO: 114171 NR Description: 3-phosphoshikimate 1-carboxyvinyltransferase, precursor (3-enolpyruvylshikimate-5-phosphate synthase) (EPSP
  misc_feature (1)..(391): Homolog of NCBI NO: 66618 NR Description: 3-phosphoshikimate 1-carboxyvinyltransferase (EC
  misc_feature (1)..(391): Homolog of NCBI NO: 15225450 NR Description: 5-enolpyruvylshikimate-3-phosphate (EPSP) synthase
  misc_feature (1)..(391): Homolog of NCBI NO: 18251236 NR Description: 5-enolpyruvylshikimate-3-phosphate synthase
  misc_feature (1)..(391): Homolog of NCBI NO: 21555078 NR Description: 5-enolpyruvylshikimate-3-phosphate (EPSP)
  misc_feature (1)..(391): Homolog of NCBI NO: 15221986 NR Description: 5-enolpyruvylshikimate-3-phosphate (EPSP)
MLDALKILGLNVETHSENNRAVVEGCGGVFPASIDSKSDIELYLGNAGTAMRPLTAAVTAAGGNASYVLDGVPRMRERPIGDLVVGLKQLGADVECTLGTNCPPVRVNANGGLPGGKVKLSGSISSQYLTALLMAAPLALGDVEIEIVDKLISVPYVEMTLKLMERFGVSAEHSESWDRFFVKGGQKYKSPGNAYVEGDASSASYFLAGAAITGETVTVEGCGTTSLQGDVKFAEVLEKMGCKVSWTENSVTVTGPSRDAFGMRHLRAIDVNMNKMPDVAMTLAVVALFADGPTTIRDVASWRVKETERMIAICTELRKLGATVEEGSDYCVITPPKKVKPAEIDTYDDHRMAMAFSLAACADVPITINDPGCTRKTFPDYFQVLERITKH

SEQ ID NO: 37320 - DNA, 1533 bp, Arabidopsis thaliana
  misc_feature (1)..(1533): Ceres Seq. ID no. 13647140
  misc_feature: MA Experiment ID: 20000171 Result: Down-regulated in Transcription
  misc_feature: MA Experiment 20000171 PARAMETER Experiment Name: At_42deg_Heat_P Parameter: Age (day) Value: 14
  misc_feature: MA Experiment 20000171 PARAMETER Experiment Name: At_42deg_Heat_P Parameter: Organism Value: A. thaliana
  misc_feature: MA Experiment 20000171 PARAMETER Experiment Name: At_42deg_Heat_P Parameter: Plant Line Value: WS
  misc_feature: MA Experiment 20000171 PARAMETER Experiment Name: At_42deg_Heat_P Parameter: Temperature (deg C) Value: 42 vs. 22
  misc_feature: MA Experiment 20000171 PARAMETER Experiment Name: At_42deg_Heat_P Parameter: Timepoint (hr) Value: 1
  misc_feature: MA Experiment 20000171 PARAMETER Experiment Name: At_42deg_Heat_P Parameter: Tissue Value: Aerial
  misc_feature: MA Experiment ID: 20000173 Result: Down-regulated in Transcription
  misc_feature: MA Experiment 20000173 PARAMETER Experiment Name: At_42deg_Heat_P Parameter: Age (day) Value: 14
  misc_feature: MA Experiment 20000173 PARAMETER Experiment Name: At_42deg_Heat_P Parameter: Organism Value: A. thaliana
  misc_feature: MA Experiment 20000173 PARAMETER Experiment Name: At_42deg_Heat_P Parameter: Plant Line Value: WS
  misc_feature: MA Experiment 20000173 PARAMETER Experiment Name: At_42deg_Heat_P Parameter: Temperature (deg C) Value: 42 vs. 22
  misc_feature: MA Experiment 20000173 PARAMETER Experiment Name: At_42deg_Heat_P Parameter: Timepoint (hr) Value: 6
  misc_feature: MA Experiment 20000173 PARAMETER Experiment Name: At_42deg_Heat_P Parameter: Tissue Value: Aerial
  misc_feature: MA Experiment ID: 20000179 Result: Up-regulated in Transcription
  misc_feature: MA Experiment 20000179 PARAMETER Experiment Name: At_Germinating_Seeds_P Parameter: Age (hr) Value: 6 vs. 0
  misc_feature: MA Experiment 20000179 PARAMETER Experiment Name: At_Germinating_Seeds_P Parameter: Tissue Value: Germinating Seeds
  misc_feature: MA Experiment ID: 20000180 Result: Up-regulated in Transcription
  misc_feature: MA Experiment 20000180 PARAMETER Experiment Name: At_Germinating_Seeds_P Parameter: Age (hr) Value: 24 vs. 0
  misc_feature: MA Experiment 20000180 PARAMETER Experiment Name: At_Germinating_Seeds_P Parameter: Tissue Value: Germinating Seeds
  misc_feature: MA Experiment ID: 20000185 Result: Up-regulated in Transcription
  misc_feature: MA Experiment 20000185 PARAMETER Experiment Name: At_Roots__P Parameter: Age (day) Value: 7 vs. 21
  misc_feature: MA Experiment 20000185 PARAMETER Experiment Name: At_Roots__P Parameter: Organism Value: A. thaliana
  misc_feature: MA Experiment 20000185 PARAMETER Experiment Name: At_Roots__P Parameter: Tissue Value: Roots vs. Whole Plant
  misc_feature: MA Experiment ID: 20000439 Result: Up-regulated in Transcription
  misc_feature: MA Experiment 20000439 PARAMETER Experiment Name: At_Roots__P Parameter: Age (day) Value: 14 vs. 21
  misc_feature: MA Experiment 20000439 PARAMETER Experiment Name: At_Roots__P Parameter: Organism Value: A. thaliana
  misc_feature: MA Experiment 20000439 PARAMETER Experiment Name: At_Roots__P Parameter: Tissue Value: Roots vs. Whole Plant
  misc_feature: MA Experiment ID: 20001451 Result: Down-regulated in Transcription
  misc_feature: MA Experiment 20001451 PARAMETER Experiment Name: At_Far-red-induction_P Parameter: Age (day) Value: 7
  misc_feature: MA Experiment 20001451 PARAMETER Experiment Name: At_Far-red-induction_P Parameter: Light Value: Far-red vs. White
  misc_feature: MA Experiment 20001451 PARAMETER Experiment Name: At_Far-red-induction_P Parameter: Organism Value: A. thaliana
  misc_feature: MA Experiment 20001451 PARAMETER Experiment Name: At_Far-red-induction_P Parameter: Plant Line Value: Columbia
  misc_feature: MA Experiment 20001451 PARAMETER Experiment Name: At_Far-red-induction_P Parameter: Timepoint (hr) Value: 24
  misc_feature: MA Experiment 20001451 PARAMETER Experiment Name: At_Far-red-induction_P Parameter: Tissue Value: Whole Plant
  misc_feature: MA Experiment ID: 20001911 Result: Down-regulated in Transcription
  misc_feature: MA Experiment 20001911 PARAMETER Experiment Name: At_Drought_Reproduction_P Parameter: Age (day) Value: 40
  misc_feature: MA Experiment 20001911 PARAMETER Experiment Name: At_Drought_Reproduction_P Parameter: Organism Value: A. thaliana
  misc_feature: MA Experiment 20001911 PARAMETER Experiment Name: At_Drought_Reproduction_P Parameter: Plant Line Value: WS
  misc_feature: MA Experiment 20001911 PARAMETER Experiment Name: At_Drought_Reproduction_P Parameter: Timepoint (day) Value: 10
  misc_feature: MA Experiment 20001911 PARAMETER Experiment Name: At_Drought_Reproduction_P Parameter: Tissue Value: Flowers
  misc_feature: MA Experiment 20001911 PARAMETER Experiment Name: At_Drought_Reproduction_P Parameter: Treatment Value: Drought vs. No Drought
ccgatcaagaactcataattattgtaacagataaaatcaaatttgagagatctactactaaatctaacttaaagcattgtactttcttttatctcattctcctttgctctgctttcttctggtcaacccccacgagattccttcttatgtgattgtaaagagaagatttttcagagatgggtctcttcgaatcggtgaaatcaatcgattgggaacaagaatcgttcccaacttatcaagatttagggtttttgcctctctttgcagtgttcttccctacaattcgatttctacttgacagattcgtcttcgagaaattggcaagtcttgtgatctatggaaggatgagtacgaataagagtgacaacataaaagacaggaagaaaaatagtccaaaagttcgaaaatttaaagaatcagcttggaagtgtatttactatctatcagctgagctacttgctttatctgtcacatataatgaaccttggttttcaaatactctctacttttggattggtcctggagatcagatttggcctgatcaaccaatgaagatgaagttgaagtttttatatatgtttgctgctggattctacacgtactctatattcgcgttggtgttttgggaaacaagacggtctgatttcggagtttccatgggtcatcatatcacaacgcttgttctcattgtcctctcctatatctgcagattaactcgtgctggttctgttattcttgcacttcatgatgcgagcgatgtgttccttgaaattgggaaaatgtctaaatattgcggagcggaaagtctcgcgagcatttcgtttgttcttttcgcgctgtcttgggtcgttctacgtctcatttactatcctttttggatcctgtggagcacgagctatcaaatcattatgactgtggacaaagaaaagcatcctaatggaccaatcttgtactatatgttcaacacacttttgtatttcttgcttgttcttcacatattctggtgggttttgatttaccggatgcttgtgaaacaagtgcaagatcgaggcaagcttagcgaagatgttagatccgattctgaaagcgatgatgaacacgaggattaatcgcatgttgggaatattagtagtgcacacgctctatatctcatgaatctgaaccacacggagactaggaatttcaacatcaagtaggatgcattgcagtatttgaacagttggttcatcatcttccagaggatcgtaaccggatcaaaccgttttgaatgaatcggtttctcaatctgaatttttgagtttattgttttctctaaagtttgagcaaattcaagattttgatcaaactgctccacgttctattgttttttcttctataatttttaatttacgcttttgcaataacacaattccttgtatcattatactaatgtcatctcaaaattagctcccttcaacatctatgcaacagactaacaactaaatgaattttcttggggttttttttggttcattgcataatttgataaaatcc

SEQ ID NO: 37321 - protein, 310 aa, Arabidopsis thaliana
  peptide (1)..(310): Ceres Seq. ID no. 13647141
  misc_feature (96)..(307): Pfam Name: Longevity-assurance protein (LAG1) Pfam Description: Longevity-assurance protein (LAG1)
  misc_feature (68)..(306): Homolog of NCBI NO: 21358551 NR Description: Longevity assurance gene 1 CG3576-PB [Drosophila
  misc_feature (1)..(126): Homolog of NCBI NO: 8920562 NR Description: Contains similarity to LAG1 homolog 1 from
  misc_feature (29)..(307): Homolog of NCBI NO: 7658241 NR Description: LAG1 homolog 2 [Arabidopsis thaliana]
  misc_feature (29)..(307): Homolog of NCBI NO: 15230323 NR Description: longevity factor-related protein [Arabidopsis
  misc_feature (25)..(306): Homolog of NCBI NO: 34901974 NR Description: unknown protein [Oryza sativa (japonica
  misc_feature (9)..(310): Homolog of NCBI NO: 7688742 NR Description: ASC1 [Lycopersicon esculentum]
  misc_feature (1)..(241): Homolog of NCBI NO: 30683361 NR Description: longevity assurance protein -related [Arabidopsis
  misc_feature (1)..(310): Homolog of NCBI NO: 16974114 NR Description: putative resistance protein [Lycopersicon
  misc_feature (1)..(310): Homolog of NCBI NO: 25518747 NR Description: hypothetical protein F13B4.7 - Arabidopsis
  misc_feature (1)..(310): Homolog of NCBI NO: 18404559 NR Description: LAG1 homolog 1 [Arabidopsis thaliana]
MGLFESVKSIDWEQESFPTYQDLGFLPLFAVFFPTIRFLLDRFVFEKLASLVIYGRMSTNKSDNIKDRKKNSPKVRKFKESAWKCIYYLSAELLALSVTYNEPWFSNTLYFWIGPGDQIWPDQPMKMKLKFLYMFAAGFYTYSIFALVFWETRRSDFGVSMGHHITTLVLIVLSYICRLTRAGSVILALHDASDVFLEIGKMSKYCGAESLASISFVLFALSWVVLRLIYYPFWILWSTSYQIIMTVDKEKHPNGPILYYMFNTLLYFLLVLHIFWWVLIYRMLVKQVQDRGKLSEDVRSDSESDDEHED

SEQ ID NO: 37322 - protein, 254 aa, Arabidopsis thaliana
  peptide (1)..(254): Ceres Seq. ID no. 13647142
  misc_feature (40)..(251): Pfam Name: Longevity-assurance protein (LAG1) Pfam Description: Longevity-assurance protein (LAG1)
  misc_feature (12)..(250): Homolog of NCBI NO: 21358551 NR Description: Longevity assurance gene 1 CG3576-PB [Drosophila
  misc_feature (1)..(70): Homolog of NCBI NO: 8920562 NR Description: Contains similarity to LAG1 homolog 1 from
  misc_feature (1)..(251): Homolog of NCBI NO: 7658241 NR Description: LAG1 homolog 2 [Arabidopsis thaliana]
  misc_feature (1)..(251): Homolog of NCBI NO: 15230323 NR Description: longevity factor-related protein [Arabidopsis
  misc_feature (1)..(250): Homolog of NCBI NO: 34901974 NR Description: unknown protein [Oryza sativa (japonica
  misc_feature (1)..(254): Homolog of NCBI NO: 7688742 NR Description: ASC1 [Lycopersicon esculentum]
  misc_feature (1)..(185): Homolog of NCBI NO: 30683361 NR Description: longevity assurance protein -related [Arabidopsis
  misc_feature (1)..(254): Homolog of NCBI NO: 16974114 NR Description: putative resistance protein [Lycopersicon
  misc_feature (1)..(254): Homolog of NCBI NO: 25518747 NR Description: hypothetical protein F13B4.7 - Arabidopsis
  misc_feature (1)..(254): Homolog of NCBI NO: 18404559 NR Description: LAG1 homolog 1 [Arabidopsis thaliana]
MSTNKSDNIKDRKKNSPKVRKFKESAWKCIYYLSAELLALSVTYNEPWFSNTLYFWIGPGDQIWPDQPMKMKLKFLYMFAAGFYTYSIFALVFWETRRSDFGVSMGHHITTLVLIVLSYICRLTRAGSVILALHDASDVFLEIGKMSKYCGAESLASISFVLFALSWVVLRLIYYPFWILWSTSYQIIMTVDKEKHPNGPILYYMFNTLLYFLLVLHIFWWVLIYRMLVKQVQDRGKLSEDVRSDSESDDEHED

SEQ ID NO: 37323 - protein, 186 aa, Arabidopsis thaliana
  peptide (1)..(186): Ceres Seq. ID no. 13647143
  misc_feature (1)..(183): Pfam Name: Longevity-assurance protein (LAG1) Pfam Description: Longevity-assurance protein (LAG1)
  misc_feature (1)..(186): Homolog of NCBI NO: 31241781 NR Description: ENSANGP00000012836 [Anopheles gambiae]
  misc_feature (1)..(182): Homolog of NCBI NO: 21358551 NR Description: Longevity assurance gene 1 CG3576-PB [Drosophila
  misc_feature (1)..(183): Homolog of NCBI NO: 7658241 NR Description: LAG1 homolog 2 [Arabidopsis thaliana]
  misc_feature (1)..(183): Homolog of NCBI NO: 15230323 NR Description: longevity factor-related protein [Arabidopsis
  misc_feature (1)..(182): Homolog of NCBI NO: 34901974 NR Description: unknown protein [Oryza sativa (japonica
  misc_feature (1)..(186): Homolog of NCBI NO: 7688742 NR Description: ASC1 [Lycopersicon esculentum]
  misc_feature (1)..(117): Homolog of NCBI NO: 30683361 NR Description: longevity assurance protein -related [Arabidopsis
  misc_feature (1)..(186): Homolog of NCBI NO: 16974114 NR Description: putative resistance protein [Lycopersicon
  misc_feature (1)..(186): Homolog of NCBI NO: 25518747 NR Description: hypothetical protein F13B4.7 - Arabidopsis
  misc_feature (1)..(186): Homolog of NCBI NO: 18404559 NR Description: LAG1 homolog 1 [Arabidopsis thaliana]
MKMKLKFLYMFAAGFYTYSIFALVFWETRRSDFGVSMGHHITTLVLIVLSYICRLTRAGSVILALHDASDVFLEIGKMSKYCGAESLASISFVLFALSWVVLRLIYYPFWILWSTSYQIIMTVDKEKHPNGPILYYMFNTLLYFLLVLHIFWWVLIYRMLVKQVQDRGKLSEDVRSDSESDDEHED

SEQ ID NO: 37324 - DNA, 1089 bp, Arabidopsis thaliana
  misc_feature (1)..(1089): Ceres Seq. ID no. 12339248
  misc_feature: MA Experiment ID: 108595 Result: Up-regulated in Transcription
  misc_feature: MA Experiment 108595 PARAMETER Experiment Name: At_Ler-pi_Ovule_cDNA_P Parameter: Plant Line Value: null
  misc_feature: MA Experiment ID: 20000180 Result: Up-regulated in Transcription
  misc_feature: MA Experiment 20000180 PARAMETER Experiment Name: At_Germinating_Seeds_P Parameter: Age (hr) Value: 24 vs. 0
  misc_feature: MA Experiment 20000180 PARAMETER Experiment Name: At_Germinating_Seeds_P Parameter: Tissue Value: Germinating Seeds
  misc_feature: MA Experiment ID: 20000495 Result: Up-regulated in Transcription
  misc_feature: MA Experiment 20000495 PARAMETER Experiment Name: At_Guard_Cells_P Parameter: Harvest Date Value: 8/2/2002
  misc_feature: MA Experiment 20000495 PARAMETER Experiment Name: At_Guard_Cells_P Parameter: Organism Value: A. thaliana
  misc_feature: MA Experiment 20000495 PARAMETER Experiment Name: At_Guard_Cells_P Parameter: Tissue Value: Guard Cells vs. Leaves
  misc_feature: MA Experiment ID: 20000496 Result: Up-regulated in Transcription
  misc_feature: MA Experiment 20000496 PARAMETER Experiment Name: At_Guard_Cells_P Parameter: Harvest Date Value: 7/19/2002
  misc_feature: MA Experiment 20000496 PARAMETER Experiment Name: At_Guard_Cells_P Parameter: Organism Value: Canola
  misc_feature: MA Experiment 20000496 PARAMETER Experiment Name: At_Guard_Cells_P Parameter: Tissue Value: Guard Cells vs. Leaves
  misc_feature: MA Experiment ID: 20001451 Result: Up-regulated in Transcription
  misc_feature: MA Experiment 20001451 PARAMETER Experiment Name: At_Far-red-induction_P Parameter: Age (day) Value: 7
  misc_feature: MA Experiment 20001451 PARAMETER Experiment Name: At_Far-red-induction_P Parameter: Light Value: Far-red vs. White
  misc_feature: MA Experiment 20001451 PARAMETER Experiment Name: At_Far-red-induction_P Parameter: Organism Value: A. thaliana
  misc_feature: MA Experiment 20001451 PARAMETER Experiment Name: At_Far-red-induction_P Parameter: Plant Line Value: Columbia
  misc_feature: MA Experiment 20001451 PARAMETER Experiment Name: At_Far-red-induction_P Parameter: Timepoint (hr) Value: 24
  misc_feature: MA Experiment 20001451 PARAMETER Experiment Name: At_Far-red-induction_P Parameter: Tissue Value: Whole Plant
aaaagctagtcaattgtttaactcacactctctcgccctctctctctccctctctcaaattctcaaaaattggctttgagcagatgaaaagaatctccatcttcttctctatctcttggctatctctctctctaaactattcactcacacagtcattcttcgtcttcttctgtttcatgcaagattcaaaggcctcacctgcaagaaaaccttggtaccagagagctatggcggtcgccagattcgcaacgaattggagaacaatccctaaatcatcgtcacaacaaccagagaattttcgtccgtctcgaaaccctagcgtcaacagcaagtcatccaatcataaccaaatttatcaccagctgagaaaatgctcgtctctaaaggtagctgcgaattcgttcactagggtttgcctctgcgctccgattggtccatacgacgacgtttttcggaatcacgtcccgccgagaagaagttcaagctatcctccgtcgaagcctcttcctatggagacggcggtggcggtggcgacggccaggatgagtgtggattcagggaggaggatatttagagggaagtcgttgagggaaaacgcgttgatgaggagattcgtggtggcagaagaagaagcgataatggagaatagaaagagagatcaaatggagattgtgaggaagagaaatcagatgaggaggaagaagaagcttggacctagtcctcttagtcgtatggttatcgctgaagatcaagaagtttgtcttctttgaaactttttcatcaagaacagagaaacaaaaaaaaaaagttttttttggttattgtaattgtgtttttatttttcaattggattcagagataattaagcaaaatacgctgccgtttaatacctctttgtaaacggtgccccttttgtttatttagttgtttttgggagttttgaatgaaggatggagctaaagagaattaatatggtttactaattctctttttggtttctttactatgcataccggtgattaaattattcaactgattaactttgttgatagtttaatattcatatctattaatggattcttaagattg

SEQ ID NO: 37325 - protein, 255 aa, Arabidopsis thaliana
  peptide (1)..(255): Ceres Seq. ID no. 12339249
  misc_feature (160)..(250): Homolog of NCBI NO: 34905624 NR Description: hypothetical protein [Oryza sativa (japonica
  misc_feature (65)..(250): Homolog of NCBI NO: 21740779 NR Description: OSJNBa0067K08.20 [Oryza sativa (japonica
  misc_feature (57)..(255): Homolog of NCBI NO: 11288883 NR Description: hypothetical protein T16L24.230 - Arabidopsis
  misc_feature (28)..(255): Homolog of NCBI NO: 30695040 NR Description: expressed protein [Arabidopsis thaliana]
KLVNCLTHTLSPSLSPSLKFSKIGFEQMKRISIFFSISWLSLSLNYSLTQSFFVFFCFMQDSKASPARKPWYQRAMAVARFATNWRTIPKSSSQQPENFRPSRNPSVNSKSSNHNQIYHQLRKCSSLKVAANSFTRVCLCAPIGPYDDVFRNHVPPRRSSSYPPSKPLPMETAVAVATARMSVDSGRRIFRGKSLRENALMRRFVVAEEEAIMENRKRDQMEIVRKRNQMRRKKKLGPSPLSRMVIAEDQEVCLL

SEQ ID NO: 37326 - protein, 228 aa, Arabidopsis thaliana
  peptide (1)..(228): Ceres Seq. ID no. 12339250
  misc_feature (133)..(223): Homolog of NCBI NO: 34905624 NR Description: hypothetical protein [Oryza sativa (japonica
  misc_feature (38)..(223): Homolog of NCBI NO: 21740779 NR Description: OSJNBa0067K08.20 [Oryza sativa (japonica
  misc_feature (30)..(228): Homolog of NCBI NO: 11288883 NR Description: hypothetical protein T16L24.230 - Arabidopsis
  misc_feature (1)..(228): Homolog of NCBI NO: 30695040 NR Description: expressed protein [Arabidopsis thaliana]
MKRISIFFSISWLSLSLNYSLTQSFFVFFCFMQDSKASPARKPWYQRAMAVARFATNWRTIPKSSSQQPENFRPSRNPSVNSKSSNHNQIYHQLRKCSSLKVAANSFTRVCLCAPIGPYDDVFRNHVPPRRSSSYPPSKPLPMETAVAVATARMSVDSGRRIFRGKSLRENALMRRFVVAEEEAIMENRKRDQMEIVRKRNQMRRKKKLGPSPLSRMVIAEDQEVCLL

SEQ ID NO: 37327 - protein, 197 aa, Arabidopsis thaliana
  peptide (1)..(197): Ceres Seq. ID no. 12339251
  misc_feature (102)..(192): Homolog of NCBI NO: 34905624 NR Description: hypothetical protein [Oryza sativa (japonica
  misc_feature (7)..(192): Homolog of NCBI NO: 21740779 NR Description: OSJNBa0067K08.20 [Oryza sativa (japonica
  misc_feature (1)..(197): Homolog of NCBI NO: 11288883 NR Description: hypothetical protein T16L24.230 - Arabidopsis
  misc_feature (1)..(197): Homolog of NCBI NO: 30695040 NR Description: expressed protein [Arabidopsis thaliana]
MQDSKASPARKPWYQRAMAVARFATNWRTIPKSSSQQPENFRPSRNPSVNSKSSNHNQIYHQLRKCSSLKVAANSFTRVCLCAPIGPYDDVFRNHVPPRRSSSYPPSKPLPMETAVAVATARMSVDSGRRIFRGKSLRENALMRRFVVAEEEAIMENRKRDQMEIVRKRNQMRRKKKLGPSPLSRMVIAEDQEVCLL

SEQ ID NO: 37328 - DNA, 2263 bp, Arabidopsis thaliana; identical to SEQ ID NO: 36601
  misc_feature (1)..(2263): Ceres Seq. ID no. 13591438
  misc_feature: MA Experiment ID: 20000171 Result: Down-regulated in Transcription
  misc_feature: MA Experiment 20000171 PARAMETER Experiment Name: At_42deg_Heat_P Parameter: Age (day) Value: 14
  misc_feature: MA Experiment 20000171 PARAMETER Experiment Name: At_42deg_Heat_P Parameter: Organism Value: A. thaliana
  misc_feature: MA Experiment 20000171 PARAMETER Experiment Name: At_42deg_Heat_P Parameter: Plant Line Value: WS
  misc_feature: MA Experiment 20000171 PARAMETER Experiment Name: At_42deg_Heat_P Parameter: Temperature (deg C) Value: 42 vs. 22
  misc_feature: MA Experiment 20000171 PARAMETER Experiment Name: At_42deg_Heat_P Parameter: Timepoint (hr) Value: 1
  misc_feature: MA Experiment 20000171 PARAMETER Experiment Name: At_42deg_Heat_P Parameter: Tissue Value: Aerial
  misc_feature: MA Experiment ID: 20000179 Result: Up-regulated in Transcription
  misc_feature: MA Experiment 20000179 PARAMETER Experiment Name: At_Germinating_Seeds_P Parameter: Age (hr) Value: 6 vs. 0
  misc_feature: MA Experiment 20000179 PARAMETER Experiment Name: At_Germinating_Seeds_P Parameter: Tissue Value: Germinating Seeds
  misc_feature: MA Experiment ID: 20000180 Result: Up-regulated in Transcription
  misc_feature: MA Experiment 20000180 PARAMETER Experiment Name: At_Germinating_Seeds_P Parameter: Age (hr) Value: 24 vs. 0
  misc_feature: MA Experiment 20000180 PARAMETER Experiment Name: At_Germinating_Seeds_P Parameter: Tissue Value: Germinating Seeds

SEQ ID NO: 37329 - protein, 683 aa, Arabidopsis thaliana; identical to SEQ ID NO: 36602
  peptide (1)..(683): Ceres Seq. ID no. 13591439
  misc_feature (1)..(251): Homolog of NCBI NO: 22328878 NR Description: expressed protein [Arabidopsis thaliana]
  misc_feature (1)..(499): Homolog of NCBI NO: 15242183 NR Description: protein kinase family [Arabidopsis thaliana]
  misc_feature (1)..(514): Homolog of NCBI NO: 15235063 NR Description: protein kinase family [Arabidopsis thaliana]
  misc_feature (647)..(680): Homolog of NCBI NO: 30686865 NR Description: protein kinase family [Arabidopsis thaliana]
  misc_feature (1)..(457): Homolog of NCBI NO: 30686865 NR Description: protein kinase family [Arabidopsis thaliana]
  misc_feature (292)..(680): Homolog of NCBI NO: 15235063 NR Description: protein kinase family [Arabidopsis thaliana]
  misc_feature (254)..(681): Homolog of NCBI NO: 15242183 NR Description: protein kinase family [Arabidopsis thaliana]
  misc_feature (12)..(250): Homolog of NCBI NO: 15220862 NR Description: protein kinase family [Arabidopsis thaliana]
  misc_feature (427)..(683): Homolog of NCBI NO: 15220862 NR Description: protein kinase family [Arabidopsis thaliana]
  misc_feature (1)..(683): Homolog of NCBI NO: 37531832 NR Description: putative protein kinase [Oryza sativa (japonica
  misc_feature (1)..(251): Homolog of NCBI NO: 22328878 NR Description: expressed protein [Arabidopsis thaliana]
  misc_feature (1)..(499): Homolog of NCBI NO: 15242183 NR Description: protein kinase family [Arabidopsis thaliana]
  misc_feature (1)..(514): Homolog of NCBI NO: 15235063 NR Description: protein kinase family [Arabidopsis thaliana]
  misc_feature (647)..(680): Homolog of NCBI NO: 30686865 NR Description: protein kinase family [Arabidopsis thaliana]
  misc_feature (1)..(457): Homolog of NCBI NO: 30686865 NR Description: protein kinase family [Arabidopsis thaliana]
  misc_feature (292)..(680): Homolog of NCBI NO: 15235063 NR Description: protein kinase family [Arabidopsis thaliana]
  misc_feature (254)..(681): Homolog of NCBI NO: 15242183 NR Description: protein kinase family [Arabidopsis thaliana]
  misc_feature (12)..(250): Homolog of NCBI NO: 15220862 NR Description: protein kinase family [Arabidopsis thaliana]
  misc_feature (427)..(683): Homolog of NCBI NO: 15220862 NR Description: protein kinase family [Arabidopsis thaliana]
  misc_feature (1)..(683): Homolog of NCBI NO: 37531832 NR Description: putative protein kinase [Oryza sativa (japonica

SEQ ID NO: 37330 - protein, 561 aa, Arabidopsis thaliana; identical to SEQ ID NO: 36603
  peptide (1)..(561): Ceres Seq. ID no. 13591440
  misc_feature (1)..(129): Homolog of NCBI NO: 22328878 NR Description: expressed protein [Arabidopsis thaliana]
  misc_feature (1)..(377): Homolog of NCBI NO: 15242183 NR Description: protein kinase family [Arabidopsis thaliana]
  misc_feature (1)..(392): Homolog of NCBI NO: 15235063 NR Description: protein kinase family [Arabidopsis thaliana]
  misc_feature (525)..(558): Homolog of NCBI NO: 30686865 NR Description: protein kinase family [Arabidopsis thaliana]
  misc_feature (1)..(335): Homolog of NCBI NO: 30686865 NR Description: protein kinase family [Arabidopsis thaliana]
  misc_feature (170)..(558): Homolog of NCBI NO: 15235063 NR Description: protein kinase family [Arabidopsis thaliana]
  misc_feature (132)..(559): Homolog of NCBI NO: 15242183 NR Description: protein kinase family [Arabidopsis thaliana]
  misc_feature (1)..(128): Homolog of NCBI NO: 15220862 NR Description: protein kinase family [Arabidopsis thaliana]
  misc_feature (305)..(561): Homolog of NCBI NO: 15220862 NR Description: protein kinase family [Arabidopsis thaliana]
  misc_feature (1)..(561): Homolog of NCBI NO: 37531832 NR Description: putative protein kinase [Oryza sativa (japonica
  misc_feature (1)..(129): Homolog of NCBI NO: 22328878 NR Description: expressed protein [Arabidopsis thaliana]
  misc_feature (1)..(377): Homolog of NCBI NO: 15242183 NR Description: protein kinase family [Arabidopsis thaliana]
  misc_feature (1)..(392): Homolog of NCBI NO: 15235063 NR Description: protein kinase family [Arabidopsis thaliana]
  misc_feature (525)..(558): Homolog of NCBI NO: 30686865 NR Description: protein kinase family [Arabidopsis thaliana]
  misc_feature (1)..(335): Homolog of NCBI NO: 30686865 NR Description: protein kinase family [Arabidopsis thaliana]
  misc_feature (170)..(558): Homolog of NCBI NO: 15235063 NR Description: protein kinase family [Arabidopsis thaliana]
  misc_feature (132)..(559): Homolog of NCBI NO: 15242183 NR Description: protein kinase family [Arabidopsis thaliana]
  misc_feature (1)..(128): Homolog of NCBI NO: 15220862 NR Description: protein kinase family [Arabidopsis thaliana]
  misc_feature (305)..(561): Homolog of NCBI NO: 15220862 NR Description: protein kinase family [Arabidopsis thaliana]
  misc_feature (1)..(561): Homolog of NCBI NO: 37531832 NR Description: putative protein kinase [Oryza sativa (japonica

SEQ ID NO: 37331 - protein, 510 aa, Arabidopsis thaliana; identical to SEQ ID NO: 36604
  peptide (1)..(510): Ceres Seq. ID no. 13591441
  misc_feature (1)..(78): Homolog of NCBI NO: 22328878 NR Description: expressed protein [Arabidopsis thaliana]
  misc_feature (1)..(326): Homolog of NCBI NO: 15242183 NR Description: protein kinase family [Arabidopsis thaliana]
  misc_feature (1)..(341): Homolog of NCBI NO: 15235063 NR Description: protein kinase family [Arabidopsis thaliana]
  misc_feature (474)..(507): Homolog of NCBI NO: 30686865 NR Description: protein kinase family [Arabidopsis thaliana]
  misc_feature (1)..(284): Homolog of NCBI NO: 30686865 NR Description: protein kinase family [Arabidopsis thaliana]
  misc_feature (119)..(507): Homolog of NCBI NO: 15235063 NR Description: protein kinase family [Arabidopsis thaliana]
  misc_feature (81)..(508): Homolog of NCBI NO: 15242183 NR Description: protein kinase family [Arabidopsis thaliana]
  misc_feature (1)..(77): Homolog of NCBI NO: 15220862 NR Description: protein kinase family [Arabidopsis thaliana]
  misc_feature (254)..(510): Homolog of NCBI NO: 15220862 NR Description: protein kinase family [Arabidopsis thaliana]
  misc_feature (1)..(510): Homolog of NCBI NO: 37531832 NR Description: putative protein kinase [Oryza sativa (japonica
  misc_feature (1)..(78): Homolog of NCBI NO: 22328878 NR Description: expressed protein [Arabidopsis thaliana]
  misc_feature (1)..(326): Homolog of NCBI NO: 15242183 NR Description: protein kinase family [Arabidopsis thaliana]
  misc_feature (1)..(341): Homolog of NCBI NO: 15235063 NR Description: protein kinase family [Arabidopsis thaliana]
  misc_feature (474)..(507): Homolog of NCBI NO: 30686865 NR Description: protein kinase family [Arabidopsis thaliana]
  misc_feature (1)..(284): Homolog of NCBI NO: 30686865 NR Description: protein kinase family [Arabidopsis thaliana]
  misc_feature (119)..(507): Homolog of NCBI NO: 15235063 NR Description: protein kinase family [Arabidopsis thaliana]
  misc_feature (81)..(508): Homolog of NCBI NO: 15242183 NR Description: protein kinase family [Arabidopsis thaliana]
  misc_feature (1)..(77): Homolog of NCBI NO: 15220862 NR Description: protein kinase family [Arabidopsis thaliana]
  misc_feature (254)..(510): Homolog of NCBI NO: 15220862 NR Description: protein kinase family [Arabidopsis thaliana]
  misc_feature (1)..(510): Homolog of NCBI NO: 37531832 NR Description: putative protein kinase [Oryza sativa (japonica

SEQ ID NO: 37332 - DNA, 1671 bp, Arabidopsis thaliana
  misc_feature (1)..(1671): Ceres Seq. ID no. 12394614
  misc_feature: MA Experiment ID: 108434 Result: Down-regulated in Transcription
  misc_feature: MA Experiment 108434 PARAMETER Experiment Name: At_Root_Tips_cDNA_P Parameter: Tissue Value: Root Tips
  misc_feature: MA Experiment ID: 108461 Result: Up-regulated in Transcription
  misc_feature: MA Experiment 108461 PARAMETER Experiment Name: At_Germinating_Seeds_cDNA_P Parameter: Age (day) Value: 1 vs. 0
  misc_feature: MA Experiment 108461 PARAMETER Experiment Name: At_Germinating_Seeds_cDNA_P Parameter: Tissue Value: Germinating Seeds
  misc_feature: MA Experiment ID: 108462 Result: Up-regulated in Transcription
  misc_feature: MA Experiment 108462 PARAMETER Experiment Name: At_Germinating_Seeds_cDNA_P Parameter: Age (day) Value: 2 vs. 0
  misc_feature: MA Experiment 108462 PARAMETER Experiment Name: At_Germinating_Seeds_cDNA_P Parameter: Tissue Value: Germinating Seeds
  misc_feature: MA Experiment ID: 108463 Result: Up-regulated in Transcription
  misc_feature: MA Experiment 108463 PARAMETER Experiment Name: At_Germinating_Seeds_cDNA_P Parameter: Age (day) Value: 3 vs. 0
  misc_feature: MA Experiment 108463 PARAMETER Experiment Name: At_Germinating_Seeds_cDNA_P Parameter: Tissue Value: Germinating Seeds
  misc_feature: MA Experiment ID: 108464 Result: Up-regulated in Transcription
  misc_feature: MA Experiment 108464 PARAMETER Experiment Name: At_Germinating_Seeds_cDNA_P Parameter: Age (day) Value: 4 vs. 0
  misc_feature: MA Experiment 108464 PARAMETER Experiment Name: At_Germinating_Seeds_cDNA_P Parameter: Tissue Value: Germinating Seeds
aacgaggctgtggagaaaagaaccaaaggtgactgttgttagagatgaggaatgcagagctcatcttcatcccaacaccaactgttggtcatcttgttccgtttcttgaatttgctaggcgtctcattgagcaggatgataaaatccgtatcaccttcctcttgatgaagcaacaaggtcagtctcatctggattcctatgttaagacaatttcctcgtctctgccgtttgttagatttattgatgtccctgagttagaggagaaaccaacacttggtacacagtctgtggaagcctatgtgtacgattttattgaaacaaatgtccctcttgtgcaaaatataatcatgggtatcctatcttctcctgcatttgatggagttacggtcaagggattcgttgctgattttttctgtctcccgatgattgatgttgcaaaagatgcaagtcttcctttttatgtgttcttgacttcaaattccggattcctagctatgatgcagtatctggcatatggacataagaaagatacctcagtttttgcaagaaactctgaagaaatgttgtcaattcctggatttgtaaaccctgtcccagccaaagtactgccgtcagctctgtttattgaggatggttatgatgctgacgttaaactggctatattgtttacaaaggctaatggaatcctagtgaatacctcctttgatattgagcctacctctctgaatcattttcttgaagaagagaattacccttctgtttatgctgttggccccatatttaacccgaaggcccatcctcatccagatcaagacctcgcctgttgtgacgagtcgatgaaatggcttgatgctcaacccgaggcatcagttgtattcctttgttttgggagtatgggtagcttaagaggtcctctagtgaaggaaatagcacatggacttgagctatgtcagtatagattcctctggtcactccgcacagaagaagtgacaaatgatgatcttttgccaganggattcatggaccgtgtcagtggacggggaatgatatgcggttggtctcctcaggtggaaatactggcccataaagcagtgggaggttttgtttctcattgtggatggaactcaatagtagagagtttatggtttggtgtgccaattgtgacatggccaatgtatgcagagcaacagctcaatgcgtttctgatggtgaaggaactgaagctcgcagtggagctgaaactcgattatagtgtacatagtggtgagattgtaagtgcaaacgagatagagacagcgatttcttgtgtaatgaacaaggataataatgttgtgaggaaacgagtgatggatatctcgcagatgatccagagagctacgaagaatggtggatcttcgtttgccgcaattgagaaattcatacatgacgtgataggaaccaggacttagcctttcttatcggattctccataaactgtaacctgattatgcaacagtcctttgaatctgctttgtttctaatatttttttctattcttttgtcatcagctttgcttttaactttgtctgtgttgattcctttatctaccaagctgtgagtttctttgttagccaatgctgcatttcttctgttatggattttgttcaaaattgggtacatctcttattcttt

SEQ ID NO: 37333 - protein, 467 aa, Arabidopsis thaliana
  peptide (1)..(467): Ceres Seq. ID no. 12394615
  misc_feature (4)..(466): Pfam Name: UDP-glucoronosyl and UDP-glucosyl transferase Pfam Description: UDP-glucoronosyl and UDP-glucosyl transferase
  misc_feature (1)..(463): Homolog of NCBI NO: 20146091 NR Description: glucosyltransferase NTGT3 [Nicotiana tabacum]
  misc_feature (21)..(462): Homolog of NCBI NO: 21954072 NR Description: putative UDP-glucose glucosyltransferase
  misc_feature (1)..(463): Homolog of NCBI NO: 15227616 NR Description: UDP-glycosyltransferase family; protein id:
  misc_feature (1)..(459): Homolog of NCBI NO: 15227613 NR Description: putative flavonol 3-O-glucosyltransferase
  misc_feature (1)..(462): Homolog of NCBI NO: 30680040 NR Description: glycosyltransferase family [Arabidopsis thaliana]
  misc_feature (4)..(464): Homolog of NCBI NO: 15222348 NR Description: UDP-glucose glucosyltransferase, putative
  misc_feature (1)..(464): Homolog of NCBI NO: 15222344 NR Description: UDP-glucose glucosyltransferase, putative
  misc_feature (1)..(466): Homolog of NCBI NO: 15227610 NR Description: putative flavonol 3-O-glucosyltransferase
  misc_feature (1)..(467): Homolog of NCBI NO: 15227606 NR Description: putative flavonol 3-O-glucosyltransferase
  misc_feature (1)..(467): Homolog of NCBI NO: 21555082 NR Description: putative flavonol 3-O-glucosyltransferase
  misc_feature (323)..(323): Xaa is any aa, unknown or other
MRNAELIFIPTPTVGHLVPFLEFARRLIEQDDKIRITFLLMKQQGQSHLDSYVKTISSSLPFVRFIDVPELEEKPTLGTQSVEAYVYDFIETNVPLVQNIIMGILSSPAFDGVTVKGFVADFFCLPMIDVAKDASLPFYVFLTSNSGFLAMMQYLAYGHKKDTSVFARNSEEMLSIPGFVNPVPAKVLPSALFIEDGYDADVKLAILFTKANGILVNTSFDIEPTSLNHFLEEENYPSVYAVGPIFNPKAHPHPDQDLACCDESMKWLDAQPEASVVFLCFGSMGSLRGPLVKEIAHGLELCQYRFLWSLRTEEVTNDDLLPXGFMDRVSGRGMICGWSPQVEILAHKAVGGFVSHCGWNSIVESLWFGVPIVTWPMYAEQQLNAFLMVKELKLAVELKLDYSVHSGEIVSANEIETAISCVMNKDNNVVRKRVMDISQMIQRATKNGGSSFAAIEKFIHDVIGTRT

SEQ ID NO: 37334 - protein, 427 aa, Arabidopsis thaliana
  peptide (1)..(427): Ceres Seq. ID no. 12394616
  misc_feature (1)..(426): Pfam Name: UDP-glucoronosyl and UDP-glucosyl transferase Pfam Description: UDP-glucoronosyl and UDP-glucosyl transferase
  misc_feature (1)..(423): Homolog of NCBI NO: 20146091 NR Description: glucosyltransferase NTGT3 [Nicotiana tabacum]
  misc_feature (1)..(422): Homolog of NCBI NO: 21954072 NR Description: putative UDP-glucose glucosyltransferase
  misc_feature (1)..(423): Homolog of NCBI NO: 15227616 NR Description: UDP-glycosyltransferase family; protein id:
  misc_feature (1)..(419): Homolog of NCBI NO: 15227613 NR Description: putative flavonol 3-O-glucosyltransferase
  misc_feature (1)..(422): Homolog of NCBI NO: 30680040 NR Description: glycosyltransferase family [Arabidopsis thaliana]
  misc_feature (1)..(424): Homolog of NCBI NO: 15222348 NR Description: UDP-glucose glucosyltransferase, putative
  misc_feature (1)..(424): Homolog of NCBI NO: 15222344 NR Description: UDP-glucose glucosyltransferase, putative
  misc_feature (1)..(426): Homolog of NCBI NO: 15227610 NR Description: putative flavonol 3-O-glucosyltransferase
  misc_feature (1)..(427): Homolog of NCBI NO: 15227606 NR Description: putative flavonol 3-O-glucosyltransferase
  misc_feature (1)..(427): Homolog of NCBI NO: 21555082 NR Description: putative flavonol 3-O-glucosyltransferase
  misc_feature (283)..(283): Xaa is any aa, unknown or other
MKQQGQSHLDSYVKTISSSLPFVRFIDVPELEEKPTLGTQSVEAYVYDFIETNVPLVQNIIMGILSSPAFDGVTVKGFVADFFCLPMIDVAKDASLPFYVFLTSNSGFLAMMQYLAYGHKKDTSVFARNSEEMLSIPGFVNPVPAKVLPSALFIEDGYDADVKLAILFTKANGILVNTSFDIEPTSLNHFLEEENYPSVYAVGPIFNPKAHPHPDQDLACCDESMKWLDAQPEASVVFLCFGSMGSLRGPLVKEIAHGLELCQYRFLWSLRTEEVTNDDLLPXGFMDRVSGRGMICGWSPQVEILAHKAVGGFVSHCGWNSIVESLWFGVPIVTWPMYAEQQLNAFLMVKELKLAVELKLDYSVHSGEIVSANEIETAISCVMNKDNNVVRKRVMDISQMIQRATKNGGSSFAAIEKFIHDVIGTRT

SEQ ID NO: 37335 - protein, 366 aa, Arabidopsis thaliana
  peptide (1)..(366): Ceres Seq. ID no. 12394617
  misc_feature (1)..(365): Pfam Name: UDP-glucoronosyl and UDP-glucosyl transferase Pfam Description: UDP-glucoronosyl and UDP-glucosyl transferase
  misc_feature (1)..(362): Homolog of NCBI NO: 20146091 NR Description: glucosyltransferase NTGT3 [Nicotiana tabacum]
  misc_feature (1)..(361): Homolog of NCBI NO: 21954072 NR Description: putative UDP-glucose glucosyltransferase
  misc_feature (1)..(362): Homolog of NCBI NO: 15227616 NR Description: UDP-glycosyltransferase family; protein id:
  misc_feature (1)..(358): Homolog of NCBI NO: 15227613 NR Description: putative flavonol 3-O-glucosyltransferase
  misc_feature (1)..(361): Homolog of NCBI NO: 30680040 NR Description: glycosyltransferase family [Arabidopsis thaliana]
  misc_feature (1)..(363): Homolog of NCBI NO: 15222348 NR Description: UDP-glucose glucosyltransferase, putative
  misc_feature (1)..(363): Homolog of NCBI NO: 15222344 NR Description: UDP-glucose glucosyltransferase, putative
  misc_feature (1)..(365): Homolog of NCBI NO: 15227610 NR Description: putative flavonol 3-O-glucosyltransferase
  misc_feature (1)..(366): Homolog of NCBI NO: 15227606 NR Description: putative flavonol 3-O-glucosyltransferase
  misc_feature (1)..(366): Homolog of NCBI NO: 21555082 NR Description: putative flavonol 3-O-glucosyltransferase
  misc_feature (222)..(222): Xaa is any aa, unknown or other
MGILSSPAFDGVTVKGFVADFFCLPMIDVAKDASLPFYVFLTSNSGFLAMMQYLAYGHKKDTSVFARNSEEMLSIPGFVNPVPAKVLPSALFIEDGYDADVKLAILFTKANGILVNTSFDIEPTSLNHFLEEENYPSVYAVGPIFNPKAHPHPDQDLACCDESMKWLDAQPEASVVFLCFGSMGSLRGPLVKEIAHGLELCQYRFLWSLRTEEVTNDDLLPXGFMDRVSGRGMICGWSPQVEILAHKAVGGFVSHCGWNSIVESLWFGVPIVTWPMYAEQQLNAFLMVKELKLAVELKLDYSVHSGEIVSANEIETAISCVMNKDNNVVRKRVMDISQMIQRATKNGGSSFAAIEKFIHDVIGTRT

SEQ ID NO: 37336 - DNA, 537 bp, Arabidopsis thaliana
  misc_feature (1)..(537): Ceres Seq. ID no. 12393893
  misc_feature: MA Experiment ID: 108434 Result: Up-regulated in Transcription
  misc_feature: MA Experiment 108434 PARAMETER Experiment Name: At_Root_Tips_cDNA_P Parameter: Tissue Value: Root Tips
  misc_feature: MA Experiment ID: 108461 Result: Up-regulated in Transcription
  misc_feature: MA Experiment 108461 PARAMETER Experiment Name: At_Germinating_Seeds_cDNA_P Parameter: Age (day) Value: 1 vs. 0
  misc_feature: MA Experiment 108461 PARAMETER Experiment Name: At_Germinating_Seeds_cDNA_P Parameter: Tissue Value: Germinating Seeds
  misc_feature: MA Experiment ID: 108462 Result: Up-regulated in Transcription
  misc_feature: MA Experiment 108462 PARAMETER Experiment Name: At_Germinating_Seeds_cDNA_P Parameter: Age (day) Value: 2 vs. 0
  misc_feature: MA Experiment 108462 PARAMETER Experiment Name: At_Germinating_Seeds_cDNA_P Parameter: Tissue Value: Germinating Seeds
  misc_feature: MA Experiment ID: 108463 Result: Up-regulated in Transcription
  misc_feature: MA Experiment 108463 PARAMETER Experiment Name: At_Germinating_Seeds_cDNA_P Parameter: Age (day) Value: 3 vs. 0
  misc_feature: MA Experiment 108463 PARAMETER Experiment Name: At_Germinating_Seeds_cDNA_P Parameter: Tissue Value: Germinating Seeds
  misc_feature: MA Experiment ID: 108464 Result: Up-regulated in Transcription
  misc_feature: MA Experiment 108464 PARAMETER Experiment Name: At_Germinating_Seeds_cDNA_P Parameter: Age (day) Value: 4 vs. 0
  misc_feature: MA Experiment 108464 PARAMETER Experiment Name: At_Germinating_Seeds_cDNA_P Parameter: Tissue Value: Germinating Seeds
  misc_feature: MA Experiment ID: 108474 Result: Down-regulated in Transcription
  misc_feature: MA Experiment 108474 PARAMETER Experiment Name: At_Drought_Flowers_cDNA_P Parameter: Timepoint (hr) Value: null
  misc_feature: MA Experiment 108474 PARAMETER Experiment Name: At_Drought_Flowers_cDNA_P Parameter: Treatment Value: Drought vs. No Drought
  misc_feature: MA Experiment ID: 108569 Result: Down-regulated in Transcription
  misc_feature: MA Experiment 108569 PARAMETER Experiment Name: At_0.001%_MeJA__cDNA_P Parameter: Timepoint (hr) Value: 6
  misc_feature: MA Experiment 108569 PARAMETER Experiment Name: At_0.001%_MeJA__cDNA_P Parameter: Tissue Value: Aerial
  misc_feature: MA Experiment 108569 PARAMETER Experiment Name: At_0.001%_MeJA__cDNA_P Parameter: Treatment Value: 0.001% MeJA vs. No Treatment
  misc_feature: MA Experiment ID: 108573 Result: Down-regulated in Transcription
  misc_feature: MA Experiment 108573 PARAMETER Experiment Name: At_Drought_cDNA_P Parameter: Timepoint (hr) Value: 6
  misc_feature: MA Experiment 108573 PARAMETER Experiment Name: At_Drought_cDNA_P Parameter: Tissue Value: Aerial
  misc_feature: MA Experiment 108573 PARAMETER Experiment Name: At_Drought_cDNA_P Parameter: Treatment Value: Drought vs. No Drought
  misc_feature: MA Experiment ID: 108577 Result: Down-regulated in Transcription
  misc_feature: MA Experiment 108577 PARAMETER Experiment Name: At_42deg_Heat_cDNA_P Parameter: Temperature (deg C) Value: 42 vs. 22
  misc_feature: MA Experiment 108577 PARAMETER Experiment Name: At_42deg_Heat_cDNA_P Parameter: Timepoint (hr) Value: 6
  misc_feature: MA Experiment 108577 PARAMETER Experiment Name: At_42deg_Heat_cDNA_P Parameter: Tissue Value: Aerial
  misc_feature: MA Experiment ID: 108668 Result: Down-regulated in Transcription
  misc_feature: MA Experiment 108668 PARAMETER Experiment Name: At_2mM_SA_cDNA_P Parameter: Plant Line Value: WS
  misc_feature: MA Experiment 108668 PARAMETER Experiment Name: At_2mM_SA_cDNA_P Parameter: Timepoint (hr) Value: 6
  misc_feature: MA Experiment 108668 PARAMETER Experiment Name: At_2mM_SA_cDNA_P Parameter: Treatment Value: 2mM SA vs. No Treatment
  misc_feature: MA Experiment ID: 20000113 Result: Down-regulated in Transcription
  misc_feature: MA Experiment 20000113 PARAMETER Experiment Name: At_42deg_Heat_cDNA_P Parameter: Temperature (deg C) Value: 42 vs. 22
  misc_feature: MA Experiment 20000113 PARAMETER Experiment Name: At_42deg_Heat_cDNA_P Parameter: Timepoint (hr) Value: 8
  misc_feature: MA Experiment 20000113 PARAMETER Experiment Name: At_42deg_Heat_cDNA_P Parameter: Tissue Value: Aerial
atcaaaacatcacatacactatttttctcctctccttattgtctatatatttttcctctttagctttttcatttcgaaatggccaccgttgaggttgaacaagtcactccagtagcagtagagaacgttgaggtaccaacaaagacagtggaggagacagtggtggagacagagaagaaagatgaagaaaccgagaagaaaacagaggagaaagacgagaagacagaagtgatcacggaaactccggtagttgaggaggaggagaagaaagctgaggaagtgaccgaaactccggcggttgtggaggaggagaagaagacagaggtggttgaggagaaacagactgaggttgcggctgctgaggaagtcgccgttgagaaggccgaggagtaaagaggaaggaagaagctatatatgaccttttttggtctcatatcgttttctgtttattttattttatcaacatttcataagtattttctatgtttgttgggtttgttatgatgaaatcagatgtttggatcttttaatggttgc

SEQ ID NO: 37337 - protein, 104 aa, Arabidopsis thaliana
  peptide (1)..(104): Ceres Seq. ID no. 12393894
  misc_feature (22)..(104): Pfam Name: CRAL/TRIO, N-terminus Pfam Description: CRAL/TRIO, N-terminus
  misc_feature (2)..(104): Homolog of NCBI NO: 18407594 NR Description: expressed protein
  misc_feature (1)..(104): Homolog of NCBI NO: 9049359 NR Description: vacuolar calcium binding protein [Raphanus
  misc_feature (1)..(104): Homolog of NCBI NO: 18407594 NR Description: expressed protein
  misc_feature (1)..(104): Homolog of NCBI NO: 21555836 NR Description: unknown [Arabidopsis thaliana]
  misc_feature (1)..(104): Homolog of NCBI NO: 9049359 NR Description: vacuolar calcium binding protein [Raphanus
  misc_feature (1)..(104): Homolog of NCBI NO: 9049359 NR Description: vacuolar calcium binding protein [Raphanus
  misc_feature (1)..(104): Homolog of NCBI NO: 30682601 NR Description: expressed protein [Arabidopsis thaliana]
  misc_feature (1)..(104): Homolog of NCBI NO: 15231671 NR Description: putative protein; protein id: At3g59370.1
  misc_feature (7)..(104): Homolog of NCBI NO: 30682601 NR Description: expressed protein [Arabidopsis thaliana]
  misc_feature (1)..(104): Homolog of NCBI NO: 18391349 NR Description: expressed protein
MATVEVEQVTPVAVENVEVPTKTVEETVVETEKKDEETEKKTEEKDEKTEVITETPVVEEEEKKAEEVTETPAVVEEEKKTEVVEEKQTEVAAAEEVAVEKAEE

SEQ ID NO: 37338 - DNA, 1834 bp, Arabidopsis thaliana
  misc_feature (1)..(1834): Ceres Seq. ID no. 12603486
  misc_feature: MA Experiment ID: 20000171 Result: Down-regulated in Transcription
  misc_feature: MA Experiment 20000171 PARAMETER Experiment Name: At_42deg_Heat_P Parameter: Age (day) Value: 14
  misc_feature: MA Experiment 20000171 PARAMETER Experiment Name: At_42deg_Heat_P Parameter: Organism Value: A. thaliana
  misc_feature: MA Experiment 20000171 PARAMETER Experiment Name: At_42deg_Heat_P Parameter: Plant Line Value: WS
  misc_feature: MA Experiment 20000171 PARAMETER Experiment Name: At_42deg_Heat_P Parameter: Temperature (deg C) Value: 42 vs. 22
  misc_feature: MA Experiment 20000171 PARAMETER Experiment Name: At_42deg_Heat_P Parameter: Timepoint (hr) Value: 1
  misc_feature: MA Experiment 20000171 PARAMETER Experiment Name: At_42deg_Heat_P Parameter: Tissue Value: Aerial
  misc_feature: MA Experiment ID: 20000173 Result: Down-regulated in Transcription
  misc_feature: MA Experiment 20000173 PARAMETER Experiment Name: At_42deg_Heat_P Parameter: Age (day) Value: 14
  misc_feature: MA Experiment 20000173 PARAMETER Experiment Name: At_42deg_Heat_P Parameter: Organism Value: A. thaliana
  misc_feature: MA Experiment 20000173 PARAMETER Experiment Name: At_42deg_Heat_P Parameter: Plant Line Value: WS
  misc_feature: MA Experiment 20000173 PARAMETER Experiment Name: At_42deg_Heat_P Parameter: Temperature (deg C) Value: 42 vs. 22
  misc_feature: MA Experiment 20000173 PARAMETER Experiment Name: At_42deg_Heat_P Parameter: Timepoint (hr) Value: 6
  misc_feature: MA Experiment 20000173 PARAMETER Experiment Name: At_42deg_Heat_P Parameter: Tissue Value: Aerial
  misc_feature: MA Experiment ID: 20000180 Result: Up-regulated in Transcription
  misc_feature: MA Experiment 20000180 PARAMETER Experiment Name: At_Germinating_Seeds_P Parameter: Age (hr) Value: 24 vs. 0
  misc_feature: MA Experiment 20000180 PARAMETER Experiment Name: At_Germinating_Seeds_P Parameter: Tissue Value: Germinating Seeds
  misc_feature: MA Experiment ID: 20000227 Result: Up-regulated in Transcription
  misc_feature: MA Experiment 20000227 PARAMETER Experiment Name: At_Root-Tips-vs-Tops_P Parameter: Tissue Value: Root Tips vs. Root Tops
  misc_feature: MA Experiment ID: 20000234 Result: Up-regulated in Transcription
  misc_feature: MA Experiment 20000234 PARAMETER Experiment Name: At_Siliques_P Parameter: Age (day) Value: 21
  misc_feature: MA Experiment 20000234 PARAMETER Experiment Name: At_Siliques_P Parameter: Organism Value: A. thaliana
  misc_feature: MA Experiment 20000234 PARAMETER Experiment Name: At_Siliques_P Parameter: Plant Line Value: WS
  misc_feature: MA Experiment 20000234 PARAMETER Experiment Name: At_Siliques_P Parameter: Tissue Value: Less Than 5mm Siliques vs. Whole Plant
atggagtcgataacgttagatatagagctgttgcagttaccagagacatcgccaatgtcgatgaaatctaatcaagattttgttaagaagctctttgatcaatggcttgctcttcctgaaaccaatcgtttggttacatctttggtaaatgatgcaaaggcaggagtggctttgaatgttatgtgtggaggaggctcttctggcacgaattcagggtcgaatagtccattagcttcaatgtttccggcacgcaatgggcctcctctttctccaaggaattcaactggttctcctcggatcgccagacaaagaactggactatcaaatcttagttctcctctcaaagtagtttctgatcatgttaaagaactcattcctcagttttactttgaagatggtcggccaccaccaaatgatctaaaagagcagtgcatagctaagatcaatagtcttttctatggccacgaggatggtttgcaactccaagaatttaaattagtcactactgaaatatgcaaagttccatcatttttttccacctccattttcaagaaagttgataccaataacactggttttgtgaaaagagaagacttcattgattattgggttaagggaaatatgttaacaaaggagataacaagtcaagtatttacaatattgaagcagccagatcacaactaccttgtccaggatgatttcaagccagtgcttcaagaattattggcaacacaccctggtcttgaattcttgcaaggcacaccggaatttcaggatagatatgctgaaactgtaatatacagaatatattactacataaataggagtggaaatgggcatcttaccttgagagagcttaagcgaggaaatttagttgacgcaatgcagcatgccgatgaagaagaggacatcaataaggtgttgaggtacttctcgtatgaacatttctatgtcatatactgcaagttctgggagttggatacagatcatgatttcttaatcgacaaagagaatctcatccgatatagtaaccatgcgctcacctataggattgtcgatcgaatcttttcacaggtaccgaggaagtttactagtaaaaccgaaggaaagatgggttatgaggattttgtttacttcatattggctgaagaagacaagtcatcagaacctagtcttgagtattggttcaagtgcattgatttggatgcaaatggagttttgacgcggaacgagctgcaattcttttacgaggagcagctacatagaatggaatgcatggcgcaagaggcggtgttgtttgaggatattttgtgccaattattcgacatggtcaaaccagaggacgaagggttcatttgtctaaatgatttgaagggttctaaactttctggaaatgtcttcaacatactttttaacctcaacaagtttatggcgtttgaaacgcgtgatcccttcctcatccgccaggagcgcgcaaatccgacatggacagagtgggatcgttttgctcatagagaatatattaggctatcaatggaagaagatgtcgaagatgcttctaatggaagtgctgaagcatgggacgactcacttgaggtccccttttgagaattttatggtaagctctcactataaaaagcggaccaataatgagtaatataatcaaaaaaaaaaaggaagctagggtatggggcccttgattttcggataacattatttggtttattaatttgttcggtttatgatatataagggtgaatggaaactaaacaccattcggatttgtttgatacagttttgaactttgatttggattttatataaaaaacatatg

SEQ ID NO: 37339 - protein, 535 aa, Arabidopsis thaliana
  peptide (1)..(535): Ceres Seq. ID no. 12603487
  misc_feature (391)..(419): Pfam Name: EF hand Pfam Description: EF hand
  misc_feature (6)..(535): Homolog of NCBI NO: 15219596 NR Description: putative protein phosphatase 2A; protein id:
  misc_feature (6)..(535): Homolog of NCBI NO: 28393301 NR Description: putative protein phosphatase 2A [Arabidopsis
  misc_feature (2)..(196): Homolog of NCBI NO: 16905168 NR Description: putative phosphatase subunit, 3'-partial [Oryza
  misc_feature (196)..(489): Homolog of NCBI NO: 16905168 NR Description: putative phosphatase subunit, 3'-partial [Oryza
  misc_feature (6)..(535): Homolog of NCBI NO: 15240089 NR Description: protein phosphatase 2A 62 kDa B regulatory
  misc_feature (2)..(196): Homolog of NCBI NO: 37535364 NR Description: putative protein phosphatase 2A regulatory
  misc_feature (196)..(535): Homolog of NCBI NO: 37535364 NR Description: putative protein phosphatase 2A regulatory
  misc_feature (6)..(535): Homolog of NCBI NO: 15241978 NR Description: protein phosphatase 2A regulatory subunit B-like
  misc_feature (6)..(535): Homolog of NCBI NO: 18421273 NR Description: protein phosphatase 2A regulatory subunit B-like
  misc_feature (1)..(535): Homolog of NCBI NO: 15221817 NR Description: protein phosphatase 2A 72 kDa regulatory subunit,
MESITLDIELLQLPETSPMSMKSNQDFVKKLFDQWLALPETNRLVTSLVNDAKAGVALNVMCGGGSSGTNSGSNSPLASMFPARNGPPLSPRNSTGSPRIARQRTGLSNLSSPLKVVSDHVKELIPQFYFEDGRPPPNDLKEQCIAKINSLFYGHEDGLQLQEFKLVTTEICKVPSFFSTSIFKKVDTNNTGFVKREDFIDYWVKGNMLTKEITSQVFTILKQPDHNYLVQDDFKPVLQELLATHPGLEFLQGTPEFQDRYAETVIYRIYYYINRSGNGHLTLRELKRGNLVDAMQHADEEEDINKVLRYFSYEHFYVIYCKFWELDTDHDFLIDKENLIRYSNHALTYRIVDRIFSQVPRKFTSKTEGKMGYEDFVYFILAEEDKSSEPSLEYWFKCIDLDANGVLTRNELQFFYEEQLHRMECMAQEAVLFEDILCQLFDMVKPEDEGFICLNDLKGSKLSGNVFNILFNLNKFMAFETRDPFLIRQERANPTWTEWDRFAHREYIRLSMEEDVEDASNGSAEAWDDSLEVPF

SEQ ID NO: 37340 - protein, 517 aa, Arabidopsis thaliana
  peptide (1)..(517): Ceres Seq. ID no. 12603488
  misc_feature (373)..(401): Pfam Name: EF hand Pfam Description: EF hand
  misc_feature (1)..(517): Homolog of NCBI NO: 15219596 NR Description: putative protein phosphatase 2A; protein id:
  misc_feature (1)..(517): Homolog of NCBI NO: 28393301 NR Description: putative protein phosphatase 2A [Arabidopsis
  misc_feature (1)..(178): Homolog of NCBI NO: 16905168 NR Description: putative phosphatase subunit, 3'-partial [Oryza
  misc_feature (178)..(471): Homolog of NCBI NO: 16905168 NR Description: putative phosphatase subunit, 3'-partial [Oryza
  misc_feature (1)..(517): Homolog of NCBI NO: 15240089 NR Description: protein phosphatase 2A 62 kDa B regulatory
  misc_feature (1)..(178): Homolog of NCBI NO: 37535364 NR Description: putative protein phosphatase 2A regulatory
  misc_feature (178)..(517): Homolog of NCBI NO: 37535364 NR Description: putative protein phosphatase 2A regulatory
  misc_feature (1)..(517): Homolog of NCBI NO: 15241978 NR Description: protein phosphatase 2A regulatory subunit B-like
  misc_feature (1)..(517): Homolog of NCBI NO: 18421273 NR Description: protein phosphatase 2A regulatory subunit B-like
  misc_feature (1)..(517): Homolog of NCBI NO: 15221817 NR Description: protein phosphatase 2A 72 kDa regulatory subunit,
MSMKSNQDFVKKLFDQWLALPETNRLVTSLVNDAKAGVALNVMCGGGSSGTNSGSNSPLASMFPARNGPPLSPRNSTGSPRIARQRTGLSNLSSPLKVVSDHVKELIPQFYFEDGRPPPNDLKEQCIAKINSLFYGHEDGLQLQEFKLVTTEICKVPSFFSTSIFKKVDTNNTGFVKREDFIDYWVKGNMLTKEITSQVFTILKQPDHNYLVQDDFKPVLQELLATHPGLEFLQGTPEFQDRYAETVIYRIYYYINRSGNGHLTLRELKRGNLVDAMQHADEEEDINKVLRYFSYEHFYVIYCKFWELDTDHDFLIDKENLIRYSNHALTYRIVDRIFSQVPRKFTSKTEGKMGYEDFVYFILAEEDKSSEPSLEYWFKCIDLDANGVLTRNELQFFYEEQLHRMECMAQEAVLFEDILCQLFDMVKPEDEGFICLNDLKGSKLSGNVFNILFNLNKFMAFETRDPFLIRQERANPTWTEWDRFAHREYIRLSMEEDVEDASNGSAEAWDDSLEVPF

SEQ ID NO: 37341 - protein, 515 aa, Arabidopsis thaliana
  peptide (1)..(515): Ceres Seq. ID no. 12603489
  misc_feature (371)..(399): Pfam Name: EF hand Pfam Description: EF hand
  misc_feature (1)..(515): Homolog of NCBI NO: 15219596 NR Description: putative protein phosphatase 2A; protein id:
  misc_feature (1)..(515): Homolog of NCBI NO: 28393301 NR Description: putative protein phosphatase 2A [Arabidopsis
  misc_feature (1)..(176): Homolog of NCBI NO: 16905168 NR Description: putative phosphatase subunit, 3'-partial [Oryza
  misc_feature (176)..(469): Homolog of NCBI NO: 16905168 NR Description: putative phosphatase subunit, 3'-partial [Oryza
  misc_feature (1)..(515): Homolog of NCBI NO: 15240089 NR Description: protein phosphatase 2A 62 kDa B regulatory
  misc_feature (1)..(176): Homolog of NCBI NO: 37535364 NR Description: putative protein phosphatase 2A regulatory
  misc_feature (176)..(515): Homolog of NCBI NO: 37535364 NR Description: putative protein phosphatase 2A regulatory
  misc_feature (1)..(515): Homolog of NCBI NO: 15241978 NR Description: protein phosphatase 2A regulatory subunit B-like
  misc_feature (1)..(515): Homolog of NCBI NO: 18421273 NR Description: protein phosphatase 2A regulatory subunit B-like
  misc_feature (1)..(515): Homolog of NCBI NO: 15221817 NR Description: protein phosphatase 2A 72 kDa regulatory subunit,
MKSNQDFVKKLFDQWLALPETNRLVTSLVNDAKAGVALNVMCGGGSSGTNSGSNSPLASMFPARNGPPLSPRNSTGSPRIARQRTGLSNLSSPLKVVSDHVKELIPQFYFEDGRPPPNDLKEQCIAKINSLFYGHEDGLQLQEFKLVTTEICKVPSFFSTSIFKKVDTNNTGFVKREDFIDYWVKGNMLTKEITSQVFTILKQPDHNYLVQDDFKPVLQELLATHPGLEFLQGTPEFQDRYAETVIYRIYYYINRSGNGHLTLRELKRGNLVDAMQHADEEEDINKVLRYFSYEHFYVIYCKFWELDTDHDFLIDKENLIRYSNHALTYRIVDRIFSQVPRKFTSKTEGKMGYEDFVYFILAEEDKSSEPSLEYWFKCIDLDANGVLTRNELQFFYEEQLHRMECMAQEAVLFEDILCQLFDMVKPEDEGFICLNDLKGSKLSGNVFNILFNLNKFMAFETRDPFLIRQERANPTWTEWDRFAHREYIRLSMEEDVEDASNGSAEAWDDSLEVPF

SEQ ID NO: 37342 - DNA, 621 bp, Arabidopsis thaliana
  misc_feature (1)..(621): Ceres Seq. ID no. 12397236
  misc_feature: MA Experiment ID: 108434 Result: Up-regulated in Transcription
  misc_feature: MA Experiment 108434 PARAMETER Experiment Name: At_Root_Tips_cDNA_P Parameter: Tissue Value: Root Tips
ataaaaataaaaaagtaggagcatatcacacaaacaaacaacgtagaaagggttcgaatgacgagtaatggagaagggggagaggtggtggcgaagaggaggaggaagggaattaaggagctagtgcaggtggctctcaggggaggttgtttggctgcttcagccacggccatggcggtgatgctgaccgctactgaggagggagtggcagacatctacggcttcaagctcactctctcctccaactggtctttctctccctcctaccagtatgtggtgggggcatgcgcagggaccgtgctctactccctgttacagctctgcctcggtgtttacagactcgtcaccggatctcccatcacgccttcccgcttccaagcttggctttgcttcacctccgatcagctcttttgttatttgatgatgagcgctggatcagccggttccggagttaccaacctcaacaaaaccggcatcaggcacactcctctccccgacttctgcaagaccctttcttctttctgcaatcatgtcgccctgtctctcctcttagtcttcctctccttcatcttcctcgcttcctcttccttctttactgtccttgtgctctccactccctag

SEQ ID NO: 37343 - protein, 187 aa, Arabidopsis thaliana
  peptide (1)..(187): Ceres Seq. ID no. 12397237
  misc_feature (17)..(172): Pfam Name: Domain of unknown function (DUF588) Pfam Description: Domain of unknown function (DUF588)
  misc_feature (19)..(169): Homolog of NCBI NO: 29420795 NR Description: hypothetical protein [Oryza sativa (japonica
  misc_feature (61)..(180): Homolog of NCBI NO: 15233256 NR Description: putative protein
  misc_feature (22)..(117): Homolog of NCBI NO: 34910750 NR Description: P0022F10.21 [Oryza sativa (japonica
  misc_feature (21)..(185): Homolog of NCBI NO: 15228175 NR Description: hypothetical protein; protein id: At3g16300.1
  misc_feature (127)..(187): Homolog of NCBI NO: 15219983 NR Description: hypothetical protein; protein id: At1g79780.1
  misc_feature (1)..(71): Homolog of NCBI NO: 15219983 NR Description: hypothetical protein; protein id: At1g79780.1
  misc_feature (1)..(187): Homolog of NCBI NO: 7715593 NR Description: F20B17.20 [Arabidopsis thaliana]
MTSNGEGGEVVAKRRRKGIKELVQVALRGGCLAASATAMAVMLTATEEGVADIYGFKLTLSSNWSFSPSYQYVVGACAGTVLYSLLQLCLGVYRLVTGSPITPSRFQAWLCFTSDQLFCYLMMSAGSAGSGVTNLNKTGIRHTPLPDFCKTLSSFCNHVALSLLLVFLSFIFLASSSFFTVLVLSTP

SEQ ID NO: 37344 - protein, 149 aa, Arabidopsis thaliana
  peptide (1)..(149): Ceres Seq. ID no. 12397238
  misc_feature (1)..(134): Pfam Name: Domain of unknown function (DUF588) Pfam Description: Domain of unknown function (DUF588)
  misc_feature (1)..(131): Homolog of NCBI NO: 29420795 NR Description: hypothetical protein [Oryza sativa (japonica
  misc_feature (23)..(142): Homolog of NCBI NO: 15233256 NR Description: putative protein
  misc_feature (1)..(79): Homolog of NCBI NO: 34910750 NR Description: P0022F10.21 [Oryza sativa (japonica
  misc_feature (1)..(147): Homolog of NCBI NO: 15228175 NR Description: hypothetical protein; protein id: At3g16300.1
  misc_feature (89)..(149): Homolog of NCBI NO: 15219983 NR Description: hypothetical protein; protein id: At1g79780.1
  misc_feature (1)..(33): Homolog of NCBI NO: 15219983 NR Description: hypothetical protein; protein id: At1g79780.1
  misc_feature (1)..(149): Homolog of NCBI NO: 7715593 NR Description: F20B17.20 [Arabidopsis thaliana]
MAVMLTATEEGVADIYGFKLTLSSNWSFSPSYQYVVGACAGTVLYSLLQLCLGVYRLVTGSPITPSRFQAWLCFTSDQLFCYLMMSAGSAGSGVTNLNKTGIRHTPLPDFCKTLSSFCNHVALSLLLVFLSFIFLASSSFFTVLVLSTP

SEQ ID NO: 37345 - protein, 146 aa, Arabidopsis thaliana
  peptide (1)..(146): Ceres Seq. ID no. 12397239
  misc_feature (1)..(131): Pfam Name: Domain of unknown function (DUF588) Pfam Description: Domain of unknown function (DUF588)
  misc_feature (1)..(128): Homolog of NCBI NO: 29420795 NR Description: hypothetical protein [Oryza sativa (japonica
  misc_feature (20)..(139): Homolog of NCBI NO: 15233256 NR Description: putative protein
  misc_feature (1)..(76): Homolog of NCBI NO: 34910750 NR Description: P0022F10.21 [Oryza sativa (japonica
  misc_feature (1)..(144): Homolog of NCBI NO: 15228175 NR Description: hypothetical protein; protein id: At3g16300.1
  misc_feature (86)..(146): Homolog of NCBI NO: 15219983 NR Description: hypothetical protein; protein id: At1g79780.1
  misc_feature (1)..(30): Homolog of NCBI NO: 15219983 NR Description: hypothetical protein; protein id: At1g79780.1
  misc_feature (1)..(146): Homolog of NCBI NO: 7715593 NR Description: F20B17.20 [Arabidopsis thaliana]
MLTATEEGVADIYGFKLTLSSNWSFSPSYQYVVGACAGTVLYSLLQLCLGVYRLVTGSPITPSRFQAWLCFTSDQLFCYLMMSAGSAGSGVTNLNKTGIRHTPLPDFCKTLSSFCNHVALSLLLVFLSFIFLASSSFFTVLVLSTP

SEQ ID NO: 37346 - DNA, 875 bp, Arabidopsis thaliana
  misc_feature (1)..(875): Ceres Seq. ID no. 14306853
  misc_feature: MA Experiment ID: 20000169 Result: Up-regulated in Transcription
  misc_feature: MA Experiment 20000169 PARAMETER Experiment Name: At_100uM_ABA_P Parameter: Age (day) Value: 14
  misc_feature: MA Experiment 20000169 PARAMETER Experiment Name: At_100uM_ABA_P Parameter: Organism Value: A. thaliana
  misc_feature: MA Experiment 20000169 PARAMETER Experiment Name: At_100uM_ABA_P Parameter: Plant Line Value: WS
  misc_feature: MA Experiment 20000169 PARAMETER Experiment Name: At_100uM_ABA_P Parameter: Timepoint (hr) Value: 6
  misc_feature: MA Experiment 20000169 PARAMETER Experiment Name: At_100uM_ABA_P Parameter: Tissue Value: Aerial
  misc_feature: MA Experiment 20000169 PARAMETER Experiment Name: At_100uM_ABA_P Parameter: Treatment Value: 100uM ABA vs. No Treatment
  misc_feature: MA Experiment ID: 20000180 Result: Up-regulated in Transcription
  misc_feature: MA Experiment 20000180 PARAMETER Experiment Name: At_Germinating_Seeds_P Parameter: Age (hr) Value: 24 vs. 0
  misc_feature: MA Experiment 20000180 PARAMETER Experiment Name: At_Germinating_Seeds_P Parameter: Tissue Value: Germinating Seeds
  misc_feature: MA Experiment ID: 20000182 Result: Up-regulated in Transcription
  misc_feature: MA Experiment 20000182 PARAMETER Experiment Name: At_2mM_SA_P Parameter: Age (day) Value: 14
  misc_feature: MA Experiment 20000182 PARAMETER Experiment Name: At_2mM_SA_P Parameter: Organism Value: A. thaliana
  misc_feature: MA Experiment 20000182 PARAMETER Experiment Name: At_2mM_SA_P Parameter: Plant Line Value: WS
  misc_feature: MA Experiment 20000182 PARAMETER Experiment Name: At_2mM_SA_P Parameter: Timepoint (hr) Value: 6
  misc_feature: MA Experiment 20000182 PARAMETER Experiment Name: At_2mM_SA_P Parameter: Tissue Value: Aerial
  misc_feature: MA Experiment 20000182 PARAMETER Experiment Name: At_2mM_SA_P Parameter: Treatment Value: 2mM SA vs. No Treatment
  misc_feature: MA Experiment ID: 20000185 Result: Up-regulated in Transcription
  misc_feature: MA Experiment 20000185 PARAMETER Experiment Name: At_Roots__P Parameter: Age (day) Value: 7 vs. 21
  misc_feature: MA Experiment 20000185 PARAMETER Experiment Name: At_Roots__P Parameter: Organism Value: A. thaliana
  misc_feature: MA Experiment 20000185 PARAMETER Experiment Name: At_Roots__P Parameter: Tissue Value: Roots vs. Whole Plant
  misc_feature: MA Experiment ID: 20000227 Result: Down-regulated in Transcription
  misc_feature: MA Experiment 20000227 PARAMETER Experiment Name: At_Root-Tips-vs-Tops_P Parameter: Tissue Value: Root Tips vs. Root Tops
  misc_feature: MA Experiment ID: 20000234 Result: Down-regulated in Transcription
  misc_feature: MA Experiment 20000234 PARAMETER Experiment Name: At_Siliques_P Parameter: Age (day) Value: 21
  misc_feature: MA Experiment 20000234 PARAMETER Experiment Name: At_Siliques_P Parameter: Organism Value: A. thaliana
  misc_feature: MA Experiment 20000234 PARAMETER Experiment Name: At_Siliques_P Parameter: Plant Line Value: WS
  misc_feature: MA Experiment 20000234 PARAMETER Experiment Name: At_Siliques_P Parameter: Tissue Value: Less Than 5mm Siliques vs. Whole Plant
  misc_feature: MA Experiment ID: 20000267 Result: Up-regulated in Transcription
  misc_feature: MA Experiment 20000267 PARAMETER Experiment Name: At_Drought_P Parameter: Age (day) Value: 7
  misc_feature: MA Experiment 20000267 PARAMETER Experiment Name: At_Drought_P Parameter: Organism Value: A. thaliana
  misc_feature: MA Experiment 20000267 PARAMETER Experiment Name: At_Drought_P Parameter: Plant Line Value: WS
  misc_feature: MA Experiment 20000267 PARAMETER Experiment Name: At_Drought_P Parameter: Timepoint (hr) Value: 6
  misc_feature: MA Experiment 20000267 PARAMETER Experiment Name: At_Drought_P Parameter: Tissue Value: Whole Plant
  misc_feature: MA Experiment 20000267 PARAMETER Experiment Name: At_Drought_P Parameter: Treatment Value: Drought vs. No Drought
  misc_feature: MA Experiment ID: 20000286 Result: Down-regulated in Transcription
  misc_feature: MA Experiment 20000286 PARAMETER Experiment Name: At_Open_Flower_P Parameter: Age (day) Value: 21
  misc_feature: MA Experiment 20000286 PARAMETER Experiment Name: At_Open_Flower_P Parameter: Plant Line Value: WS
  misc_feature: MA Experiment 20000286 PARAMETER Experiment Name: At_Open_Flower_P Parameter: Tissue Value: Half Open vs. Whole Plant
  misc_feature: MA Experiment ID: 20000439 Result: Up-regulated in Transcription
  misc_feature: MA Experiment 20000439 PARAMETER Experiment Name: At_Roots__P Parameter: Age (day) Value: 14 vs. 21
  misc_feature: MA Experiment 20000439 PARAMETER Experiment Name: At_Roots__P Parameter: Organism Value: A. thaliana
  misc_feature: MA Experiment 20000439 PARAMETER Experiment Name: At_Roots__P Parameter: Tissue Value: Roots vs. Whole Plant
  misc_feature: MA Experiment ID: 20000453 Result: Up-regulated in Transcription
  misc_feature: MA Experiment 20000453 PARAMETER Experiment Name: At_100uM_ABA_P Parameter: Age (day) Value: 15
  misc_feature: MA Experiment 20000453 PARAMETER Experiment Name: At_100uM_ABA_P Parameter: Organism Value: A. thaliana
  misc_feature: MA Experiment 20000453 PARAMETER Experiment Name: At_100uM_ABA_P Parameter: Plant Line Value: WS
  misc_feature: MA Experiment 20000453 PARAMETER Experiment Name: At_100uM_ABA_P Parameter: Timepoint (hr) Value: 24
  misc_feature: MA Experiment 20000453 PARAMETER Experiment Name: At_100uM_ABA_P Parameter: Tissue Value: Aerial
  misc_feature: MA Experiment 20000453 PARAMETER Experiment Name: At_100uM_ABA_P Parameter: Treatment Value: 100uM ABA vs. No Treatment
  misc_feature: MA Experiment ID: 20001248 Result: Down-regulated in Transcription
  misc_feature: MA Experiment 20001248 PARAMETER Experiment Name: At_Far-red-induction_P Parameter: Age (day) Value: 7
  misc_feature: MA Experiment 20001248 PARAMETER Experiment Name: At_Far-red-induction_P Parameter: Light Value: Far-red vs. White
  misc_feature: MA Experiment 20001248 PARAMETER Experiment Name: At_Far-red-induction_P Parameter: Organism Value: A. thaliana
  misc_feature: MA Experiment 20001248 PARAMETER Experiment Name: At_Far-red-induction_P Parameter: Plant Line Value: Columbia
  misc_feature: MA Experiment 20001248 PARAMETER Experiment Name: At_Far-red-induction_P Parameter: Timepoint (hr) Value: 4
  misc_feature: MA Experiment 20001248 PARAMETER Experiment Name: At_Far-red-induction_P Parameter: Tissue Value: Whole Plant
  misc_feature: MA Experiment ID: 20001451 Result: Up-regulated in Transcription
  misc_feature: MA Experiment 20001451 PARAMETER Experiment Name: At_Far-red-induction_P Parameter: Age (day) Value: 7
  misc_feature: MA Experiment 20001451 PARAMETER Experiment Name: At_Far-red-induction_P Parameter: Light Value: Far-red vs. White
  misc_feature: MA Experiment 20001451 PARAMETER Experiment Name: At_Far-red-induction_P Parameter: Organism Value: A. thaliana
  misc_feature: MA Experiment 20001451 PARAMETER Experiment Name: At_Far-red-induction_P Parameter: Plant Line Value: Columbia
  misc_feature: MA Experiment 20001451 PARAMETER Experiment Name: At_Far-red-induction_P Parameter: Timepoint (hr) Value: 24
  misc_feature: MA Experiment 20001451 PARAMETER Experiment Name: At_Far-red-induction_P Parameter: Tissue Value: Whole Plant
  misc_feature: MA Experiment ID: 20001904 Result: Up-regulated in Transcription
  misc_feature: MA Experiment 20001904 PARAMETER Experiment Name: At_Drought_Reproduction_P Parameter: Age (day) Value: 37
  misc_feature: MA Experiment 20001904 PARAMETER Experiment Name: At_Drought_Reproduction_P Parameter: Organism Value: A. thaliana
  misc_feature: MA Experiment 20001904 PARAMETER Experiment Name: At_Drought_Reproduction_P Parameter: Plant Line Value: WS
  misc_feature: MA Experiment 20001904 PARAMETER Experiment Name: At_Drought_Reproduction_P Parameter: Timepoint (day) Value: 7
  misc_feature: MA Experiment 20001904 PARAMETER Experiment Name: At_Drought_Reproduction_P Parameter: Tissue Value: Rosettes
  misc_feature: MA Experiment 20001904 PARAMETER Experiment Name: At_Drought_Reproduction_P Parameter: Treatment Value: Drought vs. No Drought
  misc_feature: MA Experiment ID: 20001905 Result: Up-regulated in Transcription
  misc_feature: MA Experiment 20001905 PARAMETER Experiment Name: At_Drought_Reproduction_P Parameter: Age (day) Value: 40
  misc_feature: MA Experiment 20001905 PARAMETER Experiment Name: At_Drought_Reproduction_P Parameter: Organism Value: A. thaliana
  misc_feature: MA Experiment 20001905 PARAMETER Experiment Name: At_Drought_Reproduction_P Parameter: Plant Line Value: WS
  misc_feature: MA Experiment 20001905 PARAMETER Experiment Name: At_Drought_Reproduction_P Parameter: Timepoint (day) Value: 10
  misc_feature: MA Experiment 20001905 PARAMETER Experiment Name: At_Drought_Reproduction_P Parameter: Tissue Value: Rosettes
  misc_feature: MA Experiment 20001905 PARAMETER Experiment Name: At_Drought_Reproduction_P Parameter: Treatment Value: Drought vs. No Drought
  misc_feature: MA Experiment ID: 20001906 Result: Up-regulated in Transcription
  misc_feature: MA Experiment 20001906 PARAMETER Experiment Name: At_Drought_Reproduction_P Parameter: Age (day) Value: 35
  misc_feature: MA Experiment 20001906 PARAMETER Experiment Name: At_Drought_Reproduction_P Parameter: Organism Value: A. thaliana
  misc_feature: MA Experiment 20001906 PARAMETER Experiment Name: At_Drought_Reproduction_P Parameter: Plant Line Value: WS
  misc_feature: MA Experiment 20001906 PARAMETER Experiment Name: At_Drought_Reproduction_P Parameter: Timepoint (day) Value: 5
  misc_feature: MA Experiment 20001906 PARAMETER Experiment Name: At_Drought_Reproduction_P Parameter: Tissue Value: Siliques
  misc_feature: MA Experiment 20001906 PARAMETER Experiment Name: At_Drought_Reproduction_P Parameter: Treatment Value: Drought vs. No Drought
  misc_feature: MA Experiment ID: 20001908 Result: Up-regulated in Transcription
  misc_feature: MA Experiment 20001908 PARAMETER Experiment Name: At_Drought_Reproduction_P Parameter: Age (day) Value: 40
  misc_feature: MA Experiment 20001908 PARAMETER Experiment Name: At_Drought_Reproduction_P Parameter: Organism Value: A. thaliana
  misc_feature: MA Experiment 20001908 PARAMETER Experiment Name: At_Drought_Reproduction_P Parameter: Plant Line Value: WS
  misc_feature: MA Experiment 20001908 PARAMETER Experiment Name: At_Drought_Reproduction_P Parameter: Timepoint (day) Value: 10
  misc_feature: MA Experiment 20001908 PARAMETER Experiment Name: At_Drought_Reproduction_P Parameter: Tissue Value: Siliques
  misc_feature: MA Experiment 20001908 PARAMETER Experiment Name: At_Drought_Reproduction_P Parameter: Treatment Value: Drought vs. No Drought
acatcacataccaaaaaaaggcaaaacactcacgaaagaagaaacggagaggatgaagcattatgtgctagttcacggaggctgccacggtgcgtggtgttggtacaaggtgaagccgatgcttgaacattccggccaccgtgtcacggtttttgatcttacggcgcatggtgtgaacatgagcagagtagaagatattcagactttggaggatttcgctaagccgttgcttgaggttcttgagtcttttggctcggatgataaagtagtcctcgtcgcgcatagcctcggtggaataccggctgctcttgcagccgacatgtttcctagtaaaatctctgttgctgtcttcgttacttcttttatgcccgacacaacgaatccaccttcttacgtgttcgaaaagtttctcggaagcattacagaagaagaacgtatggacttcgagttagggagctatggaacagatgaccatccactaaagactgcttttcttggacctaactacttgaagaatatgtatctactttctcctatcgaagattatgaattggccaaaatgttgatgagagtcacaccggctattactagtaatctgacggggactaaaagcttaacggcacaaggatatggatcgattagtcgtgtgtatatcgtatgcggagaagataaaggtatacgtgtagatttccaacgatggatgattgagaactctccggttaaagaagtgatggagatcaaagatgcagatcatatgcctatgttttccaagcctcatgaactctgtgatcgtcttctaaagattgctgataaatatccctaagcaagaatatctatgacaatatcaataattttcatgggaataagtttttttg

SEQ ID NO: 37347 - protein, 273 aa, Arabidopsis thaliana
  peptide (1)..(273): Ceres Seq. ID no. 14306854
  misc_feature (46)..(267): Pfam Name: alpha/beta hydrolase fold Pfam Description: alpha/beta hydrolase fold
  misc_feature (14)..(272): Homolog of NCBI NO: 15227863 NR Description: hydrolase, alpha/beta fold family [Arabidopsis
  misc_feature (14)..(272): Homolog of NCBI NO: 21554666 NR Description: putative acetone-cyanohydrin lyase [Arabidopsis
  misc_feature (14)..(272): Homolog of NCBI NO: 27754457 NR Description: putative acetone-cyanohydrin lyase [Arabidopsis
  misc_feature (14)..(272): Homolog of NCBI NO: 15227867 NR Description: esterase, putative [Arabidopsis thaliana]
  misc_feature (14)..(272): Homolog of NCBI NO: 15227865 NR Description: esterase, putative [Arabidopsis thaliana]
  misc_feature (14)..(272): Homolog of NCBI NO: 28393451 NR Description: putative acetone-cyanohydrin lyase [Arabidopsis
  misc_feature (14)..(272): Homolog of NCBI NO: 15227850 NR Description: hydrolase, alpha/beta fold family [Arabidopsis
  misc_feature (14)..(272): Homolog of NCBI NO: 15227851 NR Description: hydrolase, alpha/beta fold family [Arabidopsis
  misc_feature (14)..(272): Homolog of NCBI NO: 15227859 NR Description: hydrolase, alpha/beta fold family [Arabidopsis
  misc_feature (18)..(273): Homolog of NCBI NO: 15235445 NR Description: hydrolase, alpha/beta fold family [Arabidopsis
HHIPKKGKTLTKEETERMKHYVLVHGGCHGAWCWYKVKPMLEHSGHRVTVFDLTAHGVNMSRVEDIQTLEDFAKPLLEVLESFGSDDKVVLVAHSLGGIPAALAADMFPSKISVAVFVTSFMPDTTNPPSYVFEKFLGSITEEERMDFELGSYGTDDHPLKTAFLGPNYLKNMYLLSPIEDYELAKMLMRVTPAITSNLTGTKSLTAQGYGSISRVYIVCGEDKGIRVDFQRWMIENSPVKEVMEIKDADHMPMFSKPHELCDRLLKIADKYP

SEQ ID NO: 37348 - protein, 256 aa, Arabidopsis thaliana
  peptide (1)..(256): Ceres Seq. ID no. 14306855
  misc_feature (29)..(250): Pfam Name: alpha/beta hydrolase fold Pfam Description: alpha/beta hydrolase fold
  misc_feature (1)..(255): Homolog of NCBI NO: 15227863 NR Description: hydrolase, alpha/beta fold family [Arabidopsis
  misc_feature (1)..(255): Homolog of NCBI NO: 21554666 NR Description: putative acetone-cyanohydrin lyase [Arabidopsis
  misc_feature (1)..(255): Homolog of NCBI NO: 27754457 NR Description: putative acetone-cyanohydrin lyase [Arabidopsis
  misc_feature (1)..(255): Homolog of NCBI NO: 15227867 NR Description: esterase, putative [Arabidopsis thaliana]
  misc_feature (1)..(255): Homolog of NCBI NO: 15227865 NR Description: esterase, putative [Arabidopsis thaliana]
  misc_feature (1)..(255): Homolog of NCBI NO: 28393451 NR Description: putative acetone-cyanohydrin lyase [Arabidopsis
  misc_feature (1)..(255): Homolog of NCBI NO: 15227850 NR Description: hydrolase, alpha/beta fold family [Arabidopsis
  misc_feature (1)..(255): Homolog of NCBI NO: 15227851 NR Description: hydrolase, alpha/beta fold family [Arabidopsis
  misc_feature (1)..(255): Homolog of NCBI NO: 15227859 NR Description: hydrolase, alpha/beta fold family [Arabidopsis
  misc_feature (1)..(256): Homolog of NCBI NO: 15235445 NR Description: hydrolase, alpha/beta fold family [Arabidopsis
MKHYVLVHGGCHGAWCWYKVKPMLEHSGHRVTVFDLTAHGVNMSRVEDIQTLEDFAKPLLEVLESFGSDDKVVLVAHSLGGIPAALAADMFPSKISVAVFVTSFMPDTTNPPSYVFEKFLGSITEEERMDFELGSYGTDDHPLKTAFLGPNYLKNMYLLSPIEDYELAKMLMRVTPAITSNLTGTKSLTAQGYGSISRVYIVCGEDKGIRVDFQRWMIENSPVKEVMEIKDADHMPMFSKPHELCDRLLKIADKYP

SEQ ID NO: 37349 - protein, 234 aa, Arabidopsis thaliana
  peptide (1)..(234): Ceres Seq. ID no. 14306856
  misc_feature (7)..(228): Pfam Name: alpha/beta hydrolase fold Pfam Description: alpha/beta hydrolase fold
  misc_feature (1)..(233): Homolog of NCBI NO: 15227863 NR Description: hydrolase, alpha/beta fold family [Arabidopsis
  misc_feature (1)..(233): Homolog of NCBI NO: 21554666 NR Description: putative acetone-cyanohydrin lyase [Arabidopsis
  misc_feature (1)..(233): Homolog of NCBI NO: 27754457 NR Description: putative acetone-cyanohydrin lyase [Arabidopsis
  misc_feature (1)..(233): Homolog of NCBI NO: 15227867 NR Description: esterase, putative [Arabidopsis thaliana]
  misc_feature (1)..(233): Homolog of NCBI NO: 15227865 NR Description: esterase, putative [Arabidopsis thaliana]
  misc_feature (1)..(233): Homolog of NCBI NO: 28393451 NR Description: putative acetone-cyanohydrin lyase [Arabidopsis
  misc_feature (1)..(233): Homolog of NCBI NO: 15227850 NR Description: hydrolase, alpha/beta fold family [Arabidopsis
  misc_feature (1)..(233): Homolog of NCBI NO: 15227851 NR Description: hydrolase, alpha/beta fold family [Arabidopsis
  misc_feature (1)..(233): Homolog of NCBI NO: 15227859 NR Description: hydrolase, alpha/beta fold family [Arabidopsis
  misc_feature (1)..(234): Homolog of NCBI NO: 15235445 NR Description: hydrolase, alpha/beta fold family [Arabidopsis
MLEHSGHRVTVFDLTAHGVNMSRVEDIQTLEDFAKPLLEVLESFGSDDKVVLVAHSLGGIPAALAADMFPSKISVAVFVTSFMPDTTNPPSYVFEKFLGSITEEERMDFELGSYGTDDHPLKTAFLGPNYLKNMYLLSPIEDYELAKMLMRVTPAITSNLTGTKSLTAQGYGSISRVYIVCGEDKGIRVDFQRWMIENSPVKEVMEIKDADHMPMFSKPHELCDRLLKIADKYP

SEQ ID NO: 37350 - DNA, 1055 bp, Arabidopsis thaliana
  misc_feature (1)..(1055): Ceres Seq. ID no. 12393926
  misc_feature: MA Experiment ID: 20000111 Result: Down-regulated in Transcription
  misc_feature: MA Experiment 20000111 PARAMETER Experiment Name: At_42deg_Heat_cDNA_P Parameter: Temperature (deg C) Value: 42 vs. 22
  misc_feature: MA Experiment 20000111 PARAMETER Experiment Name: At_42deg_Heat_cDNA_P Parameter: Timepoint (hr) Value: 6
  misc_feature: MA Experiment 20000111 PARAMETER Experiment Name: At_42deg_Heat_cDNA_P Parameter: Tissue Value: Aerial
  misc_feature: MA Experiment ID: 20000113 Result: Down-regulated in Transcription
  misc_feature: MA Experiment 20000113 PARAMETER Experiment Name: At_42deg_Heat_cDNA_P Parameter: Temperature (deg C) Value: 42 vs. 22
  misc_feature: MA Experiment 20000113 PARAMETER Experiment Name: At_42deg_Heat_cDNA_P Parameter: Timepoint (hr) Value: 8
  misc_feature: MA Experiment 20000113 PARAMETER Experiment Name: At_42deg_Heat_cDNA_P Parameter: Tissue Value: Aerial
  misc_feature: MA Experiment ID: 20000173 Result: Down-regulated in Transcription
  misc_feature: MA Experiment 20000173 PARAMETER Experiment Name: At_42deg_Heat_P Parameter: Age (day) Value: 14
  misc_feature: MA Experiment 20000173 PARAMETER Experiment Name: At_42deg_Heat_P Parameter: Organism Value: A. thaliana
  misc_feature: MA Experiment 20000173 PARAMETER Experiment Name: At_42deg_Heat_P Parameter: Plant Line Value: WS
  misc_feature: MA Experiment 20000173 PARAMETER Experiment Name: At_42deg_Heat_P Parameter: Temperature (deg C) Value: 42 vs. 22
  misc_feature: MA Experiment 20000173 PARAMETER Experiment Name: At_42deg_Heat_P Parameter: Timepoint (hr) Value: 6
  misc_feature: MA Experiment 20000173 PARAMETER Experiment Name: At_42deg_Heat_P Parameter: Tissue Value: Aerial
  misc_feature: MA Experiment ID: 20000235 Result: Up-regulated in Transcription
  misc_feature: MA Experiment 20000235 PARAMETER Experiment Name: At_Siliques_P Parameter: Age (day) Value: 21
  misc_feature: MA Experiment 20000235 PARAMETER Experiment Name: At_Siliques_P Parameter: Organism Value: A. thaliana
  misc_feature: MA Experiment 20000235 PARAMETER Experiment Name: At_Siliques_P Parameter: Plant Line Value: WS
  misc_feature: MA Experiment 20000235 PARAMETER Experiment Name: At_Siliques_P Parameter: Tissue Value: 5-10mm Siliques vs. Whole Plant
  misc_feature: MA Experiment ID: 20000265 Result: Up-regulated in Transcription
  misc_feature: MA Experiment 20000265 PARAMETER Experiment Name: At_Open_Flower_P Parameter: Age (day) Value: 21
  misc_feature: MA Experiment 20000265 PARAMETER Experiment Name: At_Open_Flower_P Parameter: Plant Line Value: WS
  misc_feature: MA Experiment 20000265 PARAMETER Experiment Name: At_Open_Flower_P Parameter: Tissue Value: Closed Flower vs. Whole Plant
  misc_feature: MA Experiment ID: 20001451 Result: Down-regulated in Transcription
  misc_feature: MA Experiment 20001451 PARAMETER Experiment Name: At_Far-red-induction_P Parameter: Age (day) Value: 7
  misc_feature: MA Experiment 20001451 PARAMETER Experiment Name: At_Far-red-induction_P Parameter: Light Value: Far-red vs. White
  misc_feature: MA Experiment 20001451 PARAMETER Experiment Name: At_Far-red-induction_P Parameter: Organism Value: A. thaliana
  misc_feature: MA Experiment 20001451 PARAMETER Experiment Name: At_Far-red-induction_P Parameter: Plant Line Value: Columbia
  misc_feature: MA Experiment 20001451 PARAMETER Experiment Name: At_Far-red-induction_P Parameter: Timepoint (hr) Value: 24
  misc_feature: MA Experiment 20001451 PARAMETER Experiment Name: At_Far-red-induction_P Parameter: Tissue Value: Whole Plant
  misc_feature: MA Experiment ID: 20001560 Result: Up-regulated in Transcription
  misc_feature: MA Experiment 20001560 PARAMETER Experiment Name: At_Drought_Soil_Dry_P Parameter: Age (day) Value: 28
  misc_feature: MA Experiment 20001560 PARAMETER Experiment Name: At_Drought_Soil_Dry_P Parameter: Organism Value: A. thaliana
  misc_feature: MA Experiment 20001560 PARAMETER Experiment Name: At_Drought_Soil_Dry_P Parameter: Plant Line Value: WS
  misc_feature: MA Experiment 20001560 PARAMETER Experiment Name: At_Drought_Soil_Dry_P Parameter: Post Timepoint (hr) Value: None
  misc_feature: MA Experiment 20001560 PARAMETER Experiment Name: At_Drought_Soil_Dry_P Parameter: Post-Treatment Value: None
  misc_feature: MA Experiment 20001560 PARAMETER Experiment Name: At_Drought_Soil_Dry_P Parameter: Timepoint (day) Value: 14
  misc_feature: MA Experiment 20001560 PARAMETER Experiment Name: At_Drought_Soil_Dry_P Parameter: Treatment Value: Drought vs. No Drought
  misc_feature: MA Experiment ID: 20001911 Result: Down-regulated in Transcription
  misc_feature: MA Experiment 20001911 PARAMETER Experiment Name: At_Drought_Reproduction_P Parameter: Age (day) Value: 40
  misc_feature: MA Experiment 20001911 PARAMETER Experiment Name: At_Drought_Reproduction_P Parameter: Organism Value: A. thaliana
  misc_feature: MA Experiment 20001911 PARAMETER Experiment Name: At_Drought_Reproduction_P Parameter: Plant Line Value: WS
  misc_feature: MA Experiment 20001911 PARAMETER Experiment Name: At_Drought_Reproduction_P Parameter: Timepoint (day) Value: 10
  misc_feature: MA Experiment 20001911 PARAMETER Experiment Name: At_Drought_Reproduction_P Parameter: Tissue Value: Flowers
  misc_feature: MA Experiment 20001911 PARAMETER Experiment Name: At_Drought_Reproduction_P Parameter: Treatment Value: Drought vs. No Drought
aaaaaacgataagggatctctctctaattggcgctcctttactaattgccctttaattccatccatcttcggattcttttcaaatcaacaaaaaaagtacaaatcggatacaaatcggatccctacaatatcctctccactcttcacaaatccttctccgagatctacaaacgctgtttcattcttccgattacaatggcgacgagaagacgtactttgctcaaggtcattgtcctcggtgacagtggggttggaaaaacctccttgatgaatcaatatgtgcataagaagtttagtatgcagtataaagcaacgattggtgctgattttgtaaccaaggagcttcagattggggaaaagcttgttactttacagatttgggatactgctggacaagagagattccagagtcttggtgctgctttttatagaggagctgattgttgtgctttggtttatgatgttaatgtgttgaggtcttttgataatctcgaaacttggcatgaggagtttcttaaacaggcaagtccatcagatccaaagacatttccgtttatagtgcttggaaacaagattgacgtagatggagggagcagtagagtggtctctgataagaaagcagctgactggtgtgcttcaaatggtaacataccctatttcgagacatcagcaaaagatgacttcaatgtcgatgaggcattcttaaccattgccaaaaccgcccttgctaacgaacatgaacaggatatatacttccaaggcataccagatgcagtgactgaaaacgagccaaaaggcggtggttgcgcttgctgaaccacagatttgaggattcaatgacattcgtttttttgatgcattcatttgaaggttggtgtactcttgagttgcagaacgataagcttgtagaagcaattttttgtcattccatcatatattaattgattggagaagtctgtgtatgatcaatcgattctgctggatacaaattttatttttgtaagaagaaccattattgctcttaatccctatggcgatataaagttgcatgctac

SEQ ID NO: 37351 - protein, 206 aa, Arabidopsis thaliana
  peptide (1)..(206): Ceres Seq. ID no. 12393927
  misc_feature (10)..(178): Pfam Name: Ras family Pfam Description: Ras family
  misc_feature (1)..(206): Homolog of NCBI NO: 15219943 NR Description: Ras-related GTP-binding protein (Rab7)
  misc_feature (1)..(205): Homolog of NCBI NO: 1370184 NR Description: RAB7B [Lotus japonicus]
  misc_feature (1)..(206): Homolog of NCBI NO: 7438410 NR Description: GTP-binding protein Rab7c - common tobacco
  misc_feature (1)..(206): Homolog of NCBI NO: 541949 NR Description: rab7 protein - Soybean
  misc_feature (1)..(206): Homolog of NCBI NO: 3914558 NR Description: RAS-RELATED PROTEIN RAB7
  misc_feature (35)..(206): Homolog of NCBI NO: 30681167 NR Description: GTP-binding protein, putative [Arabidopsis
  misc_feature (1)..(206): Homolog of NCBI NO: 3914559 NR Description: RAS-RELATED PROTEIN RAB7
  misc_feature (1)..(206): Homolog of NCBI NO: 1370182 NR Description: RAB7A [Lotus japonicus]
  misc_feature (1)..(206): Homolog of NCBI NO: 7438424 NR Description: rab7 protein homolog F17A8.70 - Arabidopsis
  misc_feature (1)..(206): Homolog of NCBI NO: 15234026 NR Description: GTP-binding protein, putative
MATRRRTLLKVIVLGDSGVGKTSLMNQYVHKKFSMQYKATIGADFVTKELQIGEKLVTLQIWDTAGQERFQSLGAAFYRGADCCALVYDVNVLRSFDNLETWHEEFLKQASPSDPKTFPFIVLGNKIDVDGGSSRVVSDKKAADWCASNGNIPYFETSAKDDFNVDEAFLTIAKTALANEHEQDIYFQGIPDAVTENEPKGGGCAC

SEQ ID NO: 37352 - protein, 182 aa, Arabidopsis thaliana
  peptide (1)..(182): Ceres Seq. ID no. 12393928
  misc_feature (1)..(154): Pfam Name: Ras family Pfam Description: Ras family
  misc_feature (1)..(182): Homolog of NCBI NO: 15219943 NR Description: Ras-related GTP-binding protein (Rab7)
  misc_feature (1)..(181): Homolog of NCBI NO: 1370184 NR Description: RAB7B [Lotus japonicus]
  misc_feature (1)..(182): Homolog of NCBI NO: 7438410 NR Description: GTP-binding protein Rab7c - common tobacco
  misc_feature (1)..(182): Homolog of NCBI NO: 541949 NR Description: rab7 protein - Soybean
  misc_feature (1)..(182): Homolog of NCBI NO: 3914558 NR Description: RAS-RELATED PROTEIN RAB7
  misc_feature (11)..(182): Homolog of NCBI NO: 30681167 NR Description: GTP-binding protein, putative [Arabidopsis
  misc_feature (1)..(182): Homolog of NCBI NO: 3914559 NR Description: RAS-RELATED PROTEIN RAB7
  misc_feature (1)..(182): Homolog of NCBI NO: 1370182 NR Description: RAB7A [Lotus japonicus]
  misc_feature (1)..(182): Homolog of NCBI NO: 7438424 NR Description: rab7 protein homolog F17A8.70 - Arabidopsis
  misc_feature (1)..(182): Homolog of NCBI NO: 15234026 NR Description: GTP-binding protein, putative
MNQYVHKKFSMQYKATIGADFVTKELQIGEKLVTLQIWDTAGQERFQSLGAAFYRGADCCALVYDVNVLRSFDNLETWHEEFLKQASPSDPKTFPFIVLGNKIDVDGGSSRVVSDKKAADWCASNGNIPYFETSAKDDFNVDEAFLTIAKTALANEHEQDIYFQGIPDAVTENEPKGGGCAC

SEQ ID NO: 37353 - protein, 172 aa, Arabidopsis thaliana
  peptide (1)..(172): Ceres Seq. ID no. 12393929
  misc_feature (1)..(144): Pfam Name: Ras family Pfam Description: Ras family
  misc_feature (1)..(172): Homolog of NCBI NO: 15219943 NR Description: Ras-related GTP-binding protein (Rab7)
  misc_feature (1)..(171): Homolog of NCBI NO: 1370184 NR Description: RAB7B [Lotus japonicus]
  misc_feature (1)..(172): Homolog of NCBI NO: 7438410 NR Description: GTP-binding protein Rab7c - common tobacco
  misc_feature (1)..(172): Homolog of NCBI NO: 541949 NR Description: rab7 protein - Soybean
  misc_feature (1)..(172): Homolog of NCBI NO: 3914558 NR Description: RAS-RELATED PROTEIN RAB7
  misc_feature (1)..(172): Homolog of NCBI NO: 30681167 NR Description: GTP-binding protein, putative [Arabidopsis
  misc_feature (1)..(172): Homolog of NCBI NO: 3914559 NR Description: RAS-RELATED PROTEIN RAB7
  misc_feature (1)..(172): Homolog of NCBI NO: 1370182 NR Description: RAB7A [Lotus japonicus]
  misc_feature (1)..(172): Homolog of NCBI NO: 7438424 NR Description: rab7 protein homolog F17A8.70 - Arabidopsis
  misc_feature (1)..(172): Homolog of NCBI NO: 15234026 NR Description: GTP-binding protein, putative
MQYKATIGADFVTKELQIGEKLVTLQIWDTAGQERFQSLGAAFYRGADCCALVYDVNVLRSFDNLETWHEEFLKQASPSDPKTFPFIVLGNKIDVDGGSSRVVSDKKAADWCASNGNIPYFETSAKDDFNVDEAFLTIAKTALANEHEQDIYFQGIPDAVTENEPKGGGCAC

SEQ ID NO: 37354 - DNA, 1559 bp, Arabidopsis thaliana
  misc_feature (1)..(1559): Ceres Seq. ID no. 12693600
  misc_feature: MA Experiment ID: 108464 Result: Down-regulated in Transcription
  misc_feature: MA Experiment 108464 PARAMETER Experiment Name: At_Germinating_Seeds_cDNA_P Parameter: Age (day) Value: 4 vs. 0
  misc_feature: MA Experiment 108464 PARAMETER Experiment Name: At_Germinating_Seeds_cDNA_P Parameter: Tissue Value: Germinating Seeds
  misc_feature: MA Experiment ID: 108577 Result: Down-regulated in Transcription
  misc_feature: MA Experiment 108577 PARAMETER Experiment Name: At_42deg_Heat_cDNA_P Parameter: Temperature (deg C) Value: 42 vs. 22
  misc_feature: MA Experiment 108577 PARAMETER Experiment Name: At_42deg_Heat_cDNA_P Parameter: Timepoint (hr) Value: 6
  misc_feature: MA Experiment 108577 PARAMETER Experiment Name: At_42deg_Heat_cDNA_P Parameter: Tissue Value: Aerial
  misc_feature: MA Experiment ID: 108595 Result: Down-regulated in Transcription
  misc_feature: MA Experiment 108595 PARAMETER Experiment Name: At_Ler-pi_Ovule_cDNA_P Parameter: Plant Line Value: null
  misc_feature: MA Experiment ID: 20000264 Result: Up-regulated in Transcription
  misc_feature: MA Experiment 20000264 PARAMETER Experiment Name: At_Open_Flower_P Parameter: Age (day) Value: 21
  misc_feature: MA Experiment 20000264 PARAMETER Experiment Name: At_Open_Flower_P Parameter: Plant Line Value: WS
  misc_feature: MA Experiment 20000264 PARAMETER Experiment Name: At_Open_Flower_P Parameter: Tissue Value: Open Flower vs. Whole Plant
  misc_feature: MA Experiment ID: 20000265 Result: Up-regulated in Transcription
  misc_feature: MA Experiment 20000265 PARAMETER Experiment Name: At_Open_Flower_P Parameter: Age (day) Value: 21
  misc_feature: MA Experiment 20000265 PARAMETER Experiment Name: At_Open_Flower_P Parameter: Plant Line Value: WS
  misc_feature: MA Experiment 20000265 PARAMETER Experiment Name: At_Open_Flower_P Parameter: Tissue Value: Closed Flower vs. Whole Plant
  misc_feature: MA Experiment ID: 20000794 Result: Up-regulated in Transcription
  misc_feature: MA Experiment 20000794 PARAMETER Experiment Name: At_Petals_P Parameter: Age (day) Value: 23-25 days
  misc_feature: MA Experiment 20000794 PARAMETER Experiment Name: At_Petals_P Parameter: Plant Line Value: WS
  misc_feature: MA Experiment 20000794 PARAMETER Experiment Name: At_Petals_P Parameter: Tissue Value: Petals vs. Whole plant
aaagactcgacggtctaccggaaaaaatggctgccaatttctggaattcatctcactataaacagcttttggatccagaagaagtcgacgtagttcatgatctcgataaagaacgtggaatctcaattgatgattttaagctcatcaagttccatatgtctaatcatattatgaaattggctcagcacattaaagtgaggcaaagggttgtagctactgcaattacgtatatgagacgggtttatatcagaaagagtatggtagagtttgagcctcgacttgttgctcttacgtgcttgtacctggcatctaaagctgaagaaagcatagtgcaggccaggaatcttgttttttacatcaaaagattgtatcctgatgagtacaacaaatatgaactaaaggatatattaggaatggagatgaaggtgttagaagcactagattattatctggttgtgtttcacccttaccggtcattatcggagtttttgcaagatgctgcattaaacgatgtaaatatgaaccagattacatggggaattgttaatgatacttataagatggacctcattcttgtacaccctccctaccgcatagcgctagcatgcatatacatagcaagtgtccacagagagaaagatatcactgcatggtttgaagatcttcatgaggacatgaacttggtaaagaatattgccatggagatactggacttctatgagaactacagaacaatcacagaggaaaaagtgaattctgccttcagcaaattggctttgaagctgatcaaagaagctatggcttccaatttctggacttcgacgcactacaaagagcttaaggacccagaagaggttaatgttgttcatcctcttgatgctcagagaggaatctctgttgaagatttcagactcattaagcttcatatgtctaattatatatcgaaactggcacaacacattaagattaggcaaagagttgttgcaactgcagtaacctatatgcgtcgtgtttacacaagaaagagtttgacggaatatgagcctcggcttgttgctcctacatgcttgtatttggcttgcaaagcagaagagagtgtggtgcatgccaaacttcttgtcttctacatgaaaaaactttatgcggatgaaaagtttcgatatgagattaaagatattctggaaatggagatgaaggtcttggaagcattgaacttctatcttgttgtattccacccatatcgatctctgcctgagttcttgcaggattctggaatcaatgacactagtatgacccatctaacttggggtcttgtcaacgacacatatagaatggacctcatccttatacatccgccgtttctcataacactcgcttgcatttacattgcttctgtacacaaagagaaagacataaagacatggtttgaagagctttctgtcgacatgaacattgtgaagaatattgcaatggagatattagatttctatgaaaaccatagactgttcacggaagagagagttcacgccgccttcaacaaacttgctacaaacccataa

SEQ ID NO: 37355 - protein, 518 aa, Arabidopsis thaliana
  peptide (1)..(518): Ceres Seq. ID no. 12693601
  misc_feature (274)..(408): Pfam Name: Cyclin, N-terminal domain Pfam Description: Cyclin, N-terminal domain
  misc_feature (265)..(506): Homolog of NCBI NO: 4885119 NR Description: cyclin C [Homo sapiens]
  misc_feature (9)..(260): Homolog of NCBI NO: 28828497 NR Description: similar to Mus musculus (Mouse). 16 days neonate cDNA, RIKEN full-length enriched library, clone:A130067E11
  misc_feature (265)..(506): Homolog of NCBI NO: 38382739 NR Description: Unknown (protein for IMAGE:6391891) [Mus musculus]
  misc_feature (266)..(514): Homolog of NCBI NO: 28828497 NR Description: similar to Mus musculus (Mouse). 16 days neonate cDNA, RIKEN full-length enriched library, clone:A130067E11
  misc_feature (9)..(260): Homolog of NCBI NO: 3334144 NR Description: G1/S-SPECIFIC CYCLIN C-TYPE
  misc_feature (266)..(514): Homolog of NCBI NO: 3334144 NR Description: G1/S-SPECIFIC CYCLIN C-TYPE
  misc_feature (266)..(515): Homolog of NCBI NO: 15239665 NR Description: cyclin C-like protein; protein id: At5g48640.1
  misc_feature (9)..(258): Homolog of NCBI NO: 15239664 NR Description: cyclin C-like protein
  misc_feature (9)..(261): Homolog of NCBI NO: 15239665 NR Description: cyclin C-like protein; protein id: At5g48640.1
  misc_feature (266)..(518): Homolog of NCBI NO: 15239664 NR Description: cyclin C-like protein
RLDGLPEKMAANFWNSSHYKQLLDPEEVDVVHDLDKERGISIDDFKLIKFHMSNHIMKLAQHIKVRQRVVATAITYMRRVYIRKSMVEFEPRLVALTCLYLASKAEESIVQARNLVFYIKRLYPDEYNKYELKDILGMEMKVLEALDYYLVVFHPYRSLSEFLQDAALNDVNMNQITWGIVNDTYKMDLILVHPPYRIALACIYIASVHREKDITAWFEDLHEDMNLVKNIAMEILDFYENYRTITEEKVNSAFSKLALKLIKEAMASNFWTSTHYKELKDPEEVNVVHPLDAQRGISVEDFRLIKLHMSNYISKLAQHIKIRQRVVATAVTYMRRVYTRKSLTEYEPRLVAPTCLYLACKAEESVVHAKLLVFYMKKLYADEKFRYEIKDILEMEMKVLEALNFYLVVFHPYRSLPEFLQDSGINDTSMTHLTWGLVNDTYRMDLILIHPPFLITLACIYIASVHKEKDIKTWFEELSVDMNIVKNIAMEILDFYENHRLFTEERVHAAFNKLATNP

SEQ ID NO: 37356 - protein, 510 aa, Arabidopsis thaliana
  peptide (1)..(510): Ceres Seq. ID no. 12693602
  misc_feature (266)..(400): Pfam Name: Cyclin, N-terminal domain Pfam Description: Cyclin, N-terminal domain
  misc_feature (257)..(498): Homolog of NCBI NO: 4885119 NR Description: cyclin C [Homo sapiens]
  misc_feature (1)..(252): Homolog of NCBI NO: 28828497 NR Description: similar to Mus musculus (Mouse). 16 days neonate cDNA, RIKEN full-length enriched library, clone:A130067E11
  misc_feature (257)..(498): Homolog of NCBI NO: 38382739 NR Description: Unknown (protein for IMAGE:6391891) [Mus musculus]
  misc_feature (258)..(506): Homolog of NCBI NO: 28828497 NR Description: similar to Mus musculus (Mouse). 16 days neonate cDNA, RIKEN full-length enriched library, clone:A130067E11
  misc_feature (1)..(252): Homolog of NCBI NO: 3334144 NR Description: G1/S-SPECIFIC CYCLIN C-TYPE
  misc_feature (258)..(506): Homolog of NCBI NO: 3334144 NR Description: G1/S-SPECIFIC CYCLIN C-TYPE
  misc_feature (258)..(507): Homolog of NCBI NO: 15239665 NR Description: cyclin C-like protein; protein id: At5g48640.1
  misc_feature (1)..(250): Homolog of NCBI NO: 15239664 NR Description: cyclin C-like protein
  misc_feature (1)..(253): Homolog of NCBI NO: 15239665 NR Description: cyclin C-like protein; protein id: At5g48640.1
  misc_feature (258)..(510): Homolog of NCBI NO: 15239664 NR Description: cyclin C-like protein
MAANFWNSSHYKQLLDPEEVDVVHDLDKERGISIDDFKLIKFHMSNHIMKLAQHIKVRQRVVATAITYMRRVYIRKSMVEFEPRLVALTCLYLASKAEESIVQARNLVFYIKRLYPDEYNKYELKDILGMEMKVLEALDYYLVVFHPYRSLSEFLQDAALNDVNMNQITWGIVNDTYKMDLILVHPPYRIALACIYIASVHREKDITAWFEDLHEDMNLVKNIAMEILDFYENYRTITEEKVNSAFSKLALKLIKEAMASNFWTSTHYKELKDPEEVNVVHPLDAQRGISVEDFRLIKLHMSNYISKLAQHIKIRQRVVATAVTYMRRVYTRKSLTEYEPRLVAPTCLYLACKAEESVVHAKLLVFYMKKLYADEKFRYEIKDILEMEMKVLEALNFYLVVFHPYRSLPEFLQDSGINDTSMTHLTWGLVNDTYRMDLILIHPPFLITLACIYIASVHKEKDIKTWFEELSVDMNIVKNIAMEILDFYENHRLFTEERVHAAFNKLATNP

SEQ ID NO: 37357 - protein, 467 aa, Arabidopsis thaliana
  peptide (1)..(467): Ceres Seq. ID no. 12693603
  misc_feature (223)..(357): Pfam Name: Cyclin, N-terminal domain Pfam Description: Cyclin, N-terminal domain
  misc_feature (214)..(455): Homolog of NCBI NO: 4885119 NR Description: cyclin C [Homo sapiens]
  misc_feature (1)..(209): Homolog of NCBI NO: 28828497 NR Description: similar to Mus musculus (Mouse). 16 days neonate cDNA, RIKEN full-length enriched library, clone:A130067E11
  misc_feature (214)..(455): Homolog of NCBI NO: 38382739 NR Description: Unknown (protein for IMAGE:6391891) [Mus musculus]
  misc_feature (215)..(463): Homolog of NCBI NO: 28828497 NR Description: similar to Mus musculus (Mouse). 16 days neonate cDNA, RIKEN full-length enriched library, clone:A130067E11
  misc_feature (1)..(209): Homolog of NCBI NO: 3334144 NR Description: G1/S-SPECIFIC CYCLIN C-TYPE
  misc_feature (215)..(463): Homolog of NCBI NO: 3334144 NR Description: G1/S-SPECIFIC CYCLIN C-TYPE
  misc_feature (215)..(464): Homolog of NCBI NO: 15239665 NR Description: cyclin C-like protein; protein id: At5g48640.1
  misc_feature (1)..(207): Homolog of NCBI NO: 15239664 NR Description: cyclin C-like protein
  misc_feature (1)..(210): Homolog of NCBI NO: 15239665 NR Description: cyclin C-like protein; protein id: At5g48640.1
  misc_feature (215)..(467): Homolog of NCBI NO: 15239664 NR Description: cyclin C-like protein
MSNHIMKLAQHIKVRQRVVATAITYMRRVYIRKSMVEFEPRLVALTCLYLASKAEESIVQARNLVFYIKRLYPDEYNKYELKDILGMEMKVLEALDYYLVVFHPYRSLSEFLQDAALNDVNMNQITWGIVNDTYKMDLILVHPPYRIALACIYIASVHREKDITAWFEDLHEDMNLVKNIAMEILDFYENYRTITEEKVNSAFSKLALKLIKEAMASNFWTSTHYKELKDPEEVNVVHPLDAQRGISVEDFRLIKLHMSNYISKLAQHIKIRQRVVATAVTYMRRVYTRKSLTEYEPRLVAPTCLYLACKAEESVVHAKLLVFYMKKLYADEKFRYEIKDILEMEMKVLEALNFYLVVFHPYRSLPEFLQDSGINDTSMTHLTWGLVNDTYRMDLILIHPPFLITLACIYIASVHKEKDIKTWFEELSVDMNIVKNIAMEILDFYENHRLFTEERVHAAFNKLATNP

SEQ ID NO: 37358 - DNA, 606 bp, Arabidopsis thaliana
  misc_feature (1)..(606): Ceres Seq. ID no. 12329583
  misc_feature: MA Experiment ID: 108462 Result: Up-regulated in Transcription
  misc_feature: MA Experiment 108462 PARAMETER Experiment Name: At_Germinating_Seeds_cDNA_P Parameter: Age (day) Value: 2 vs. 0
  misc_feature: MA Experiment 108462 PARAMETER Experiment Name: At_Germinating_Seeds_cDNA_P Parameter: Tissue Value: Germinating Seeds
  misc_feature: MA Experiment ID: 108488 Result: Down-regulated in Transcription
  misc_feature: MA Experiment ID: 108668 Result: Up-regulated in Transcription
  misc_feature: MA Experiment 108668 PARAMETER Experiment Name: At_2mM_SA_cDNA_P Parameter: Plant Line Value: WS
  misc_feature: MA Experiment 108668 PARAMETER Experiment Name: At_2mM_SA_cDNA_P Parameter: Timepoint (hr) Value: 6
  misc_feature: MA Experiment 108668 PARAMETER Experiment Name: At_2mM_SA_cDNA_P Parameter: Treatment Value: 2mM SA vs. No Treatment
  misc_feature: MA Experiment ID: 20000069 Result: Up-regulated in Transcription
  misc_feature: MA Experiment 20000069 PARAMETER Experiment Name: At_100uM_ABA_Mutants_cDNA_P Parameter: Plant Line Value: CS23
  misc_feature: MA Experiment 20000069 PARAMETER Experiment Name: At_100uM_ABA_Mutants_cDNA_P Parameter: Timepoint (hr) Value: 6
  misc_feature: MA Experiment 20000069 PARAMETER Experiment Name: At_100uM_ABA_Mutants_cDNA_P Parameter: Tissue Value: Aerial
  misc_feature: MA Experiment 20000069 PARAMETER Experiment Name: At_100uM_ABA_Mutants_cDNA_P Parameter: Treatment Value: 100uM ABA vs. No Treatment
  misc_feature: MA Experiment ID: 20000071 Result: Up-regulated in Transcription
  misc_feature: MA Experiment 20000071 PARAMETER Experiment Name: At_100uM_ABA_Mutants_cDNA_P Parameter: Plant Line Value: CS8104
  misc_feature: MA Experiment 20000071 PARAMETER Experiment Name: At_100uM_ABA_Mutants_cDNA_P Parameter: Timepoint (hr) Value: 6
  misc_feature: MA Experiment 20000071 PARAMETER Experiment Name: At_100uM_ABA_Mutants_cDNA_P Parameter: Tissue Value: Aerial
  misc_feature: MA Experiment 20000071 PARAMETER Experiment Name: At_100uM_ABA_Mutants_cDNA_P Parameter: Treatment Value: 100uM ABA vs. No Treatment
  misc_feature: MA Experiment ID: 20000072 Result: Up-regulated in Transcription
  misc_feature: MA Experiment 20000072 PARAMETER Experiment Name: At_100uM_ABA_Mutants_cDNA_P Parameter: Plant Line Value: CS8105
  misc_feature: MA Experiment 20000072 PARAMETER Experiment Name: At_100uM_ABA_Mutants_cDNA_P Parameter: Timepoint (hr) Value: 6
  misc_feature: MA Experiment 20000072 PARAMETER Experiment Name: At_100uM_ABA_Mutants_cDNA_P Parameter: Tissue Value: Aerial
  misc_feature: MA Experiment 20000072 PARAMETER Experiment Name: At_100uM_ABA_Mutants_cDNA_P Parameter: Treatment Value: 100uM ABA vs. No Treatment
  misc_feature: MA Experiment ID: 20000089 Result: Up-regulated in Transcription
  misc_feature: MA Experiment ID: 20000090 Result: Up-regulated in Transcription
  misc_feature: MA Experiment ID: 20000111 Result: Down-regulated in Transcription
  misc_feature: MA Experiment 20000111 PARAMETER Experiment Name: At_42deg_Heat_cDNA_P Parameter: Temperature (deg C) Value: 42 vs. 22
  misc_feature: MA Experiment 20000111 PARAMETER Experiment Name: At_42deg_Heat_cDNA_P Parameter: Timepoint (hr) Value: 6
  misc_feature: MA Experiment 20000111 PARAMETER Experiment Name: At_42deg_Heat_cDNA_P Parameter: Tissue Value: Aerial
  misc_feature: MA Experiment ID: 20000113 Result: Down-regulated in Transcription
  misc_feature: MA Experiment 20000113 PARAMETER Experiment Name: At_42deg_Heat_cDNA_P Parameter: Temperature (deg C) Value: 42 vs. 22
  misc_feature: MA Experiment 20000113 PARAMETER Experiment Name: At_42deg_Heat_cDNA_P Parameter: Timepoint (hr) Value: 8
  misc_feature: MA Experiment 20000113 PARAMETER Experiment Name: At_42deg_Heat_cDNA_P Parameter: Tissue Value: Aerial
  misc_feature: MA Experiment ID: 20000117 Result: Up-regulated in Transcription
  misc_feature: MA Experiment 20000117 PARAMETER Experiment Name: At_100uM_ABA_Mutants_cDNA_P Parameter: Plant Line Value: Columbia
  misc_feature: MA Experiment 20000117 PARAMETER Experiment Name: At_100uM_ABA_Mutants_cDNA_P Parameter: Timepoint (hr) Value: 6
  misc_feature: MA Experiment 20000117 PARAMETER Experiment Name: At_100uM_ABA_Mutants_cDNA_P Parameter: Tissue Value: Aerial
  misc_feature: MA Experiment 20000117 PARAMETER Experiment Name: At_100uM_ABA_Mutants_cDNA_P Parameter: Treatment Value: 100uM ABA vs. No Treatment
  misc_feature: MA Experiment ID: 20000173 Result: Down-regulated in Transcription
  misc_feature: MA Experiment 20000173 PARAMETER Experiment Name: At_42deg_Heat_P Parameter: Age (day) Value: 14
  misc_feature: MA Experiment 20000173 PARAMETER Experiment Name: At_42deg_Heat_P Parameter: Organism Value: A. thaliana
  misc_feature: MA Experiment 20000173 PARAMETER Experiment Name: At_42deg_Heat_P Parameter: Plant Line Value: WS
  misc_feature: MA Experiment 20000173 PARAMETER Experiment Name: At_42deg_Heat_P Parameter: Temperature (deg C) Value: 42 vs. 22
  misc_feature: MA Experiment 20000173 PARAMETER Experiment Name: At_42deg_Heat_P Parameter: Timepoint (hr) Value: 6
  misc_feature: MA Experiment 20000173 PARAMETER Experiment Name: At_42deg_Heat_P Parameter: Tissue Value: Aerial
  misc_feature: MA Experiment ID: 20000179 Result: Up-regulated in Transcription
  misc_feature: MA Experiment 20000179 PARAMETER Experiment Name: At_Germinating_Seeds_P Parameter: Age (hr) Value: 6 vs. 0
  misc_feature: MA Experiment 20000179 PARAMETER Experiment Name: At_Germinating_Seeds_P Parameter: Tissue Value: Germinating Seeds
  misc_feature: MA Experiment ID: 20000180 Result: Up-regulated in Transcription
  misc_feature: MA Experiment 20000180 PARAMETER Experiment Name: At_Germinating_Seeds_P Parameter: Age (hr) Value: 24 vs. 0
  misc_feature: MA Experiment 20000180 PARAMETER Experiment Name: At_Germinating_Seeds_P Parameter: Tissue Value: Germinating Seeds
  misc_feature: MA Experiment ID: 20000184 Result: Down-regulated in Transcription
  misc_feature: MA Experiment 20000184 PARAMETER Experiment Name: At_Shoots__P Parameter: Age (day) Value: 7
  misc_feature: MA Experiment 20000184 PARAMETER Experiment Name: At_Shoots__P Parameter: Tissue Value: Shoots vs. Whole Plant
  misc_feature: MA Experiment ID: 20000437 Result: Up-regulated in Transcription
  misc_feature: MA Experiment 20000437 PARAMETER Experiment Name: At_Drought_P Parameter: Age (day) Value: 8
  misc_feature: MA Experiment 20000437 PARAMETER Experiment Name: At_Drought_P Parameter: Organism Value: A. thaliana
  misc_feature: MA Experiment 20000437 PARAMETER Experiment Name: At_Drought_P Parameter: Plant Line Value: WS
  misc_feature: MA Experiment 20000437 PARAMETER Experiment Name: At_Drought_P Parameter: Timepoint (hr) Value: 24
  misc_feature: MA Experiment 20000437 PARAMETER Experiment Name: At_Drought_P Parameter: Tissue Value: Whole Plant
  misc_feature: MA Experiment 20000437 PARAMETER Experiment Name: At_Drought_P Parameter: Treatment Value: Drought vs. No Drought
  misc_feature: MA Experiment ID: 20000438 Result: Down-regulated in Transcription
  misc_feature: MA Experiment 20000438 PARAMETER Experiment Name: At_Shoots__P Parameter: Age (day) Value: 14
  misc_feature: MA Experiment 20000438 PARAMETER Experiment Name: At_Shoots__P Parameter: Tissue Value: Shoots vs. Whole Plant
  misc_feature: MA Experiment ID: 20001558 Result: Down-regulated in Transcription
  misc_feature: MA Experiment 20001558 PARAMETER Experiment Name: At_Drought_Soil_Dry_P Parameter: Age (day) Value: 27
  misc_feature: MA Experiment 20001558 PARAMETER Experiment Name: At_Drought_Soil_Dry_P Parameter: Organism Value: A. thaliana
  misc_feature: MA Experiment 20001558 PARAMETER Experiment Name: At_Drought_Soil_Dry_P Parameter: Plant Line Value: WS
  misc_feature: MA Experiment 20001558 PARAMETER Experiment Name: At_Drought_Soil_Dry_P Parameter: Post Timepoint (hr) Value: 6
  misc_feature: MA Experiment 20001558 PARAMETER Experiment Name: At_Drought_Soil_Dry_P Parameter: Post-Treatment Value: Re-Water vs. No Drought
  misc_feature: MA Experiment 20001558 PARAMETER Experiment Name: At_Drought_Soil_Dry_P Parameter: Timepoint (day) Value: 13
  misc_feature: MA Experiment 20001558 PARAMETER Experiment Name: At_Drought_Soil_Dry_P Parameter: Treatment Value: Drought vs. No Drought
agaaaatcctaactccagtcttgcattctgggaatagtttagagatggggagattgttcttggtgaatttggaaggcaagtcttacagttgtaagcactgcaagaccaatcttgctctctgtgatgatgtcgtctctaagtcttttcagtcccgacatgggaaagcttacctcttcagtaaggtagtgaatgtgtatgctggcaagaaagaagataggatgatgatgacgggaatgcatacggtggtcgatatttactgtgtcaaatgcggctcttatgttggatggaaatatgagtttgcttttgagaagaatcaaaagtacaaggaaggaaaatctgttctcgaaaggtacaaggtctggggtccagatgggaacaattattgggtggctcaagaagttgaagccggagacagcgatactgatgatgcttgattctcatcattcatatctgatttgtacattccctccaactctttcatttttctttattcttttttcctcattttgtaaaccatctatcttacattagaacagcttccgagaccaattgtttggtcattgctgcaactaccttggacacataagttaaagatctcattatctc

SEQ ID NO: 37359 - protein, 143 aa, Arabidopsis thaliana
  peptide (1)..(143): Ceres Seq. ID no. 12329584
  misc_feature (15)..(122): Pfam Name: Yippee putative zinc-binding protein Pfam Description: Yippee putative zinc-binding protein
  misc_feature (26)..(115): Homolog of NCBI NO: 20840809 NR Description: similar to hypothetical protein FLJ30213
  misc_feature (15)..(117): Homolog of NCBI NO: 34393694 NR Description: Yippee-like protein [Oryza sativa (japonica
  misc_feature (15)..(143): Homolog of NCBI NO: 15238881 NR Description: zinc-binding protein-like
  misc_feature (15)..(117): Homolog of NCBI NO: 15232001 NR Description: Yippee-like protein; protein id: At3g08990.1
  misc_feature (15)..(135): Homolog of NCBI NO: 15228759 NR Description: Yippee-like protein
  misc_feature (15)..(142): Homolog of NCBI NO: 28273361 NR Description: putative zinc binding protein
  misc_feature (15)..(142): Homolog of NCBI NO: 27923880 NR Description: Yippee-like protein
  misc_feature (15)..(143): Homolog of NCBI NO: 15225631 NR Description: unknown protein
  misc_feature (15)..(143): Homolog of NCBI NO: 21617953 NR Description: yippee-like protein [Arabidopsis thaliana]
  misc_feature (15)..(143): Homolog of NCBI NO: 18399156 NR Description: expressed protein
KILTPVLHSGNSLEMGRLFLVNLEGKSYSCKHCKTNLALCDDVVSKSFQSRHGKAYLFSKVVNVYAGKKEDRMMMTGMHTVVDIYCVKCGSYVGWKYEFAFEKNQKYKEGKSVLERYKVWGPDGNNYWVAQEVEAGDSDTDDA

SEQ ID NO: 37360 - protein, 129 aa, Arabidopsis thaliana
  peptide (1)..(129): Ceres Seq. ID no. 12329585
  misc_feature (1)..(108): Pfam Name: Yippee putative zinc-binding protein Pfam Description: Yippee putative zinc-binding protein
  misc_feature (12)..(101): Homolog of NCBI NO: 20840809 NR Description: similar to hypothetical protein FLJ30213
  misc_feature (1)..(103): Homolog of NCBI NO: 34393694 NR Description: Yippee-like protein [Oryza sativa (japonica
  misc_feature (1)..(129): Homolog of NCBI NO: 15238881 NR Description: zinc-binding protein-like
  misc_feature (1)..(103): Homolog of NCBI NO: 15232001 NR Description: Yippee-like protein; protein id: At3g08990.1
  misc_feature (1)..(121): Homolog of NCBI NO: 15228759 NR Description: Yippee-like protein
  misc_feature (1)..(128): Homolog of NCBI NO: 28273361 NR Description: putative zinc binding protein
  misc_feature (1)..(128): Homolog of NCBI NO: 27923880 NR Description: Yippee-like protein
  misc_feature (1)..(129): Homolog of NCBI NO: 15225631 NR Description: unknown protein
  misc_feature (1)..(129): Homolog of NCBI NO: 21617953 NR Description: yippee-like protein [Arabidopsis thaliana]
  misc_feature (1)..(129): Homolog of NCBI NO: 18399156 NR Description: expressed protein
MGRLFLVNLEGKSYSCKHCKTNLALCDDVVSKSFQSRHGKAYLFSKVVNVYAGKKEDRMMMTGMHTVVDIYCVKCGSYVGWKYEFAFEKNQKYKEGKSVLERYKVWGPDGNNYWVAQEVEAGDSDTDDA

SEQ ID NO: 37361 - protein, 84 aa, Arabidopsis thaliana
  peptide (1)..(84): Ceres Seq. ID no. 12329586
MLDGNMSLLLRRIKSTRKENLFSKGTRSGVQMGTIIGWLKKLKPETAILMMLDSHHSYLICTFPPTLSFFFILFSSFCKPSILH

SEQ ID NO: 37362 - DNA, 1525 bp, Arabidopsis thaliana
  misc_feature (1)..(1525): Ceres Seq. ID no. 12329587
  misc_feature: MA Experiment ID: 20001248 Result: Up-regulated in Transcription
  misc_feature: MA Experiment 20001248 PARAMETER Experiment Name: At_Far-red-induction_P Parameter: Age (day) Value: 7
  misc_feature: MA Experiment 20001248 PARAMETER Experiment Name: At_Far-red-induction_P Parameter: Light Value: Far-red vs. White
  misc_feature: MA Experiment 20001248 PARAMETER Experiment Name: At_Far-red-induction_P Parameter: Organism Value: A. thaliana
  misc_feature: MA Experiment 20001248 PARAMETER Experiment Name: At_Far-red-induction_P Parameter: Plant Line Value: Columbia
  misc_feature: MA Experiment 20001248 PARAMETER Experiment Name: At_Far-red-induction_P Parameter: Timepoint (hr) Value: 4
  misc_feature: MA Experiment 20001248 PARAMETER Experiment Name: At_Far-red-induction_P Parameter: Tissue Value: Whole Plant
  misc_feature: MA Experiment ID: 20001451 Result: Up-regulated in Transcription
  misc_feature: MA Experiment 20001451 PARAMETER Experiment Name: At_Far-red-induction_P Parameter: Age (day) Value: 7
  misc_feature: MA Experiment 20001451 PARAMETER Experiment Name: At_Far-red-induction_P Parameter: Light Value: Far-red vs. White
  misc_feature: MA Experiment 20001451 PARAMETER Experiment Name: At_Far-red-induction_P Parameter: Organism Value: A. thaliana
  misc_feature: MA Experiment 20001451 PARAMETER Experiment Name: At_Far-red-induction_P Parameter: Plant Line Value: Columbia
  misc_feature: MA Experiment 20001451 PARAMETER Experiment Name: At_Far-red-induction_P Parameter: Timepoint (hr) Value: 24
  misc_feature: MA Experiment 20001451 PARAMETER Experiment Name: At_Far-red-induction_P Parameter: Tissue Value: Whole Plant
aaagaacacaaaagtacagtttctttattcccttttttgaacactttaaacatcatcactcttgaaacacttcaaatctccggtcaacaaaaaccatgacttcaatttcttaaacaaaaagtttcaatctttttccaaacaaaacccatttcagattttgttctttgagaaaccaacatgagaaagacttctgtttcatctaatagctttggtgggtttttaagtcccggagctccgagttacgctgacaacaaaggttggagctccgagagagttcctcatccttcctccactacttcctcctctgcaattaacggtggtcgtcgtcacatcggctcttcttccgctttaacgacgccgttttacagcggcagagcaattccttcgaaatgggaagatgctgagcggtggatttgtagccctgtgtcgacttacccacaaggtgtttgtttaaattcctcagtgagttctgaacagagaaggcagaaatctaaaagtggtccgattgttcctcctacgttgcctcatccgcatcctacgtcttcttcgtcggcgactgggtgttatcactattctccgaggatgatgatgcggtctatggatgctcctcctaagggtttaatggttgctggttctccgttttctactggagttttggaggcggatagggtttttagaggaagtgtcggtggtggtggttgtgatggctatggtcgtggacctggccatggacatagccggagctgggttgatttgatgagtgaagaaacttcttcacttagctccaaaactgatacagaggagaaagcagagatgacgacggcgatgcaatctccggtggtatcaagaagagatatggctactcagatgagtccagaagagacgagtcctaataacaataaccagtctccaccattggttgtttctgtgattgagccacctccttgtagaggtgaagtgagagaagtgaaaatggataaaggagcaagaatgattaagcgtccaaagagacgagtcatgtcttctaggattattaggagagagcaacctgaggttgaagacaattctgaagcttctgcttcttcttcttcttgggatatctcagaaccagccatgactctttctaagttgcaaagagaggaagcgaagattgcagcttgggaaaatctgcagaaggcgaaagcagaagccgctattagaaaacttgaggtgaagctggagaagaagaaatcagcatcaatggataagatcttgaacaagcttcaaacagctaagatcaaagcacaagagatgaggagaagttcagtatccagtgaacatgaacaacaacaagggaatcatcaaatctccagaaactcggtgaagatcacgcatcttgttcgaagacatactttcatgactcctttcatgacttgctttgctcctcgtgttgattgcagaaaatcttcttctgctctctgaatttttttattgaaaagacaatttgatcaaaagaaaaaaaaatgtacactgcgaatttttcttg

SEQ ID NO: 37363 - protein, 427 aa, Arabidopsis thaliana
  peptide (1)..(427): Ceres Seq. ID no. 12329588
  misc_feature (294)..(413): Pfam Name: Remorin, C-terminal region Pfam Description: Remorin, C-terminal region
  misc_feature (208)..(383): Homolog of NCBI NO: 21536537 NR Description: unknown [Arabidopsis thaliana]
  misc_feature (208)..(383): Homolog of NCBI NO: 18408804 NR Description: expressed protein
  misc_feature (214)..(383): Homolog of NCBI NO: 28393368 NR Description: unknown protein [Arabidopsis thaliana]
  misc_feature (4)..(88): Homolog of NCBI NO: 18395321 NR Description: expressed protein
  misc_feature (178)..(401): Homolog of NCBI NO: 18395321 NR Description: expressed protein
  misc_feature (23)..(84): Homolog of NCBI NO: 34902218 NR Description: Unknown protein [Oryza sativa (japonica
  misc_feature (194)..(400): Homolog of NCBI NO: 34902218 NR Description: Unknown protein [Oryza sativa (japonica
  misc_feature (1)..(375): Homolog of NCBI NO: 30693941 NR Description: conserved hypothetical protein [Arabidopsis
  misc_feature (1)..(427): Homolog of NCBI NO: 15028061 NR Description: unknown protein [Arabidopsis thaliana]
  misc_feature (1)..(427): Homolog of NCBI NO: 18419945 NR Description: expressed protein; protein id: At4g36970.1
MRKTSVSSNSFGGFLSPGAPSYADNKGWSSERVPHPSSTTSSSAINGGRRHIGSSSALTTPFYSGRAIPSKWEDAERWICSPVSTYPQGVCLNSSVSSEQRRQKSKSGPIVPPTLPHPHPTSSSSATGCYHYSPRMMMRSMDAPPKGLMVAGSPFSTGVLEADRVFRGSVGGGGCDGYGRGPGHGHSRSWVDLMSEETSSLSSKTDTEEKAEMTTAMQSPVVSRRDMATQMSPEETSPNNNNQSPPLVVSVIEPPPCRGEVREVKMDKGARMIKRPKRRVMSSRIIRREQPEVEDNSEASASSSSWDISEPAMTLSKLQREEAKIAAWENLQKAKAEAAIRKLEVKLEKKKSASMDKILNKLQTAKIKAQEMRRSSVSSEHEQQQGNHQISRNSVKITHLVRRHTFMTPFMTCFAPRVDCRKSSSAL

SEQ ID NO: 37364 - protein, 292 aa, Arabidopsis thaliana
  peptide (1)..(292): Ceres Seq. ID no. 12329589
  misc_feature (159)..(278): Pfam Name: Remorin, C-terminal region Pfam Description: Remorin, C-terminal region
  misc_feature (79)..(238): Homolog of NCBI NO: 15220725 NR Description: hypothetical protein; protein id: At1g30320.1
  misc_feature (171)..(249): Homolog of NCBI NO: 23928441 NR Description: hypothetical protein [Zea mays]
  misc_feature (73)..(248): Homolog of NCBI NO: 21536537 NR Description: unknown [Arabidopsis thaliana]
  misc_feature (73)..(248): Homolog of NCBI NO: 18408804 NR Description: expressed protein
  misc_feature (79)..(248): Homolog of NCBI NO: 28393368 NR Description: unknown protein [Arabidopsis thaliana]
  misc_feature (43)..(266): Homolog of NCBI NO: 18395321 NR Description: expressed protein
  misc_feature (59)..(265): Homolog of NCBI NO: 34902218 NR Description: Unknown protein [Oryza sativa (japonica
  misc_feature (1)..(240): Homolog of NCBI NO: 30693941 NR Description: conserved hypothetical protein [Arabidopsis
  misc_feature (1)..(292): Homolog of NCBI NO: 15028061 NR Description: unknown protein [Arabidopsis thaliana]
  misc_feature (1)..(292): Homolog of NCBI NO: 18419945 NR Description: expressed protein; protein id: At4g36970.1
MMMRSMDAPPKGLMVAGSPFSTGVLEADRVFRGSVGGGGCDGYGRGPGHGHSRSWVDLMSEETSSLSSKTDTEEKAEMTTAMQSPVVSRRDMATQMSPEETSPNNNNQSPPLVVSVIEPPPCRGEVREVKMDKGARMIKRPKRRVMSSRIIRREQPEVEDNSEASASSSSWDISEPAMTLSKLQREEAKIAAWENLQKAKAEAAIRKLEVKLEKKKSASMDKILNKLQTAKIKAQEMRRSSVSSEHEQQQGNHQISRNSVKITHLVRRHTFMTPFMTCFAPRVDCRKSSSAL

SEQ ID NO: 37365 - protein, 291 aa, Arabidopsis thaliana
  peptide (1)..(291): Ceres Seq. ID no. 12329590
  misc_feature (158)..(277): Pfam Name: Remorin, C-terminal region Pfam Description: Remorin, C-terminal region
  misc_feature (78)..(237): Homolog of NCBI NO: 15220725 NR Description: hypothetical protein; protein id: At1g30320.1
  misc_feature (170)..(248): Homolog of NCBI NO: 23928441 NR Description: hypothetical protein [Zea mays]
  misc_feature (72)..(247): Homolog of NCBI NO: 21536537 NR Description: unknown [Arabidopsis thaliana]
  misc_feature (72)..(247): Homolog of NCBI NO: 18408804 NR Description: expressed protein
  misc_feature (78)..(247): Homolog of NCBI NO: 28393368 NR Description: unknown protein [Arabidopsis thaliana]
  misc_feature (42)..(265): Homolog of NCBI NO: 18395321 NR Description: expressed protein
  misc_feature (58)..(264): Homolog of NCBI NO: 34902218 NR Description: Unknown protein [Oryza sativa (japonica
  misc_feature (1)..(239): Homolog of NCBI NO: 30693941 NR Description: conserved hypothetical protein [Arabidopsis
  misc_feature (1)..(291): Homolog of NCBI NO: 15028061 NR Description: unknown protein [Arabidopsis thaliana]
  misc_feature (1)..(291): Homolog of NCBI NO: 18419945 NR Description: expressed protein; protein id: At4g36970.1
MMRSMDAPPKGLMVAGSPFSTGVLEADRVFRGSVGGGGCDGYGRGPGHGHSRSWVDLMSEETSSLSSKTDTEEKAEMTTAMQSPVVSRRDMATQMSPEETSPNNNNQSPPLVVSVIEPPPCRGEVREVKMDKGARMIKRPKRRVMSSRIIRREQPEVEDNSEASASSSSWDISEPAMTLSKLQREEAKIAAWENLQKAKAEAAIRKLEVKLEKKKSASMDKILNKLQTAKIKAQEMRRSSVSSEHEQQQGNHQISRNSVKITHLVRRHTFMTPFMTCFAPRVDCRKSSSAL

SEQ ID NO: 37366 - DNA, 1002 bp, Arabidopsis thaliana
  misc_feature (1)..(1002): Ceres Seq. ID no. 12603466
  misc_feature: MA Experiment ID: 20000180 Result: Up-regulated in Transcription
  misc_feature: MA Experiment 20000180 PARAMETER Experiment Name: At_Germinating_Seeds_P Parameter: Age (hr) Value: 24 vs. 0
  misc_feature: MA Experiment 20000180 PARAMETER Experiment Name: At_Germinating_Seeds_P Parameter: Tissue Value: Germinating Seeds
  misc_feature: MA Experiment ID: 20000184 Result: Up-regulated in Transcription
  misc_feature: MA Experiment 20000184 PARAMETER Experiment Name: At_Shoots__P Parameter: Age (day) Value: 7
  misc_feature: MA Experiment 20000184 PARAMETER Experiment Name: At_Shoots__P Parameter: Tissue Value: Shoots vs. Whole Plant
  misc_feature: MA Experiment ID: 20000185 Result: Up-regulated in Transcription
  misc_feature: MA Experiment 20000185 PARAMETER Experiment Name: At_Roots__P Parameter: Age (day) Value: 7 vs. 21
  misc_feature: MA Experiment 20000185 PARAMETER Experiment Name: At_Roots__P Parameter: Organism Value: A. thaliana
  misc_feature: MA Experiment 20000185 PARAMETER Experiment Name: At_Roots__P Parameter: Tissue Value: Roots vs. Whole Plant
  misc_feature: MA Experiment ID: 20000264 Result: Down-regulated in Transcription
  misc_feature: MA Experiment 20000264 PARAMETER Experiment Name: At_Open_Flower_P Parameter: Age (day) Value: 21
  misc_feature: MA Experiment 20000264 PARAMETER Experiment Name: At_Open_Flower_P Parameter: Plant Line Value: WS
  misc_feature: MA Experiment 20000264 PARAMETER Experiment Name: At_Open_Flower_P Parameter: Tissue Value: Open Flower vs. Whole Plant
  misc_feature: MA Experiment ID: 20000265 Result: Down-regulated in Transcription
  misc_feature: MA Experiment 20000265 PARAMETER Experiment Name: At_Open_Flower_P Parameter: Age (day) Value: 21
  misc_feature: MA Experiment 20000265 PARAMETER Experiment Name: At_Open_Flower_P Parameter: Plant Line Value: WS
  misc_feature: MA Experiment 20000265 PARAMETER Experiment Name: At_Open_Flower_P Parameter: Tissue Value: Closed Flower vs. Whole Plant
  misc_feature: MA Experiment ID: 20000436 Result: Down-regulated in Transcription
  misc_feature: MA Experiment 20000436 PARAMETER Experiment Name: At_Drought_P Parameter: Age (day) Value: 7
  misc_feature: MA Experiment 20000436 PARAMETER Experiment Name: At_Drought_P Parameter: Organism Value: A. thaliana
  misc_feature: MA Experiment 20000436 PARAMETER Experiment Name: At_Drought_P Parameter: Plant Line Value: WS
  misc_feature: MA Experiment 20000436 PARAMETER Experiment Name: At_Drought_P Parameter: Timepoint (hr) Value: 12
  misc_feature: MA Experiment 20000436 PARAMETER Experiment Name: At_Drought_P Parameter: Tissue Value: Whole Plant
  misc_feature: MA Experiment 20000436 PARAMETER Experiment Name: At_Drought_P Parameter: Treatment Value: Drought vs. No Drought
  misc_feature: MA Experiment ID: 20000437 Result: Down-regulated in Transcription
  misc_feature: MA Experiment 20000437 PARAMETER Experiment Name: At_Drought_P Parameter: Age (day) Value: 8
  misc_feature: MA Experiment 20000437 PARAMETER Experiment Name: At_Drought_P Parameter: Organism Value: A. thaliana
  misc_feature: MA Experiment 20000437 PARAMETER Experiment Name: At_Drought_P Parameter: Plant Line Value: WS
  misc_feature: MA Experiment 20000437 PARAMETER Experiment Name: At_Drought_P Parameter: Timepoint (hr) Value: 24
  misc_feature: MA Experiment 20000437 PARAMETER Experiment Name: At_Drought_P Parameter: Tissue Value: Whole Plant
  misc_feature: MA Experiment 20000437 PARAMETER Experiment Name: At_Drought_P Parameter: Treatment Value: Drought vs. No Drought
  misc_feature: MA Experiment ID: 20000439 Result: Up-regulated in Transcription
  misc_feature: MA Experiment 20000439 PARAMETER Experiment Name: At_Roots__P Parameter: Age (day) Value: 14 vs. 21
  misc_feature: MA Experiment 20000439 PARAMETER Experiment Name: At_Roots__P Parameter: Organism Value: A. thaliana
  misc_feature: MA Experiment 20000439 PARAMETER Experiment Name: At_Roots__P Parameter: Tissue Value: Roots vs. Whole Plant
  misc_feature: MA Experiment ID: 20001457 Result: Down-regulated in Transcription
  misc_feature: MA Experiment 20001457 PARAMETER Experiment Name: At_50mM_NH4NO3_L-to-H_P Parameter: Age (day) Value: Undefined
  misc_feature: MA Experiment 20001457 PARAMETER Experiment Name: At_50mM_NH4NO3_L-to-H_P Parameter: Organism Value: Undefined
  misc_feature: MA Experiment 20001457 PARAMETER Experiment Name: At_50mM_NH4NO3_L-to-H_P Parameter: Plant Line Value: Undefined
  misc_feature: MA Experiment 20001457 PARAMETER Experiment Name: At_50mM_NH4NO3_L-to-H_P Parameter: Timepoint (hr) Value: 0.5
  misc_feature: MA Experiment 20001457 PARAMETER Experiment Name: At_50mM_NH4NO3_L-to-H_P Parameter: Tissue Value: Siliques
  misc_feature: MA Experiment 20001457 PARAMETER Experiment Name: At_50mM_NH4NO3_L-to-H_P Parameter: Treatment Value: 50mM NH4NO3 vs. 100mM Manitol
  misc_feature: MA Experiment ID: 20001556 Result: Down-regulated in Transcription
  misc_feature: MA Experiment 20001556 PARAMETER Experiment Name: At_Drought_Soil_Dry_P Parameter: Age (day) Value: 26
  misc_feature: MA Experiment 20001556 PARAMETER Experiment Name: At_Drought_Soil_Dry_P Parameter: Organism Value: A. thaliana
  misc_feature: MA Experiment 20001556 PARAMETER Experiment Name: At_Drought_Soil_Dry_P Parameter: Plant Line Value: WS
  misc_feature: MA Experiment 20001556 PARAMETER Experiment Name: At_Drought_Soil_Dry_P Parameter: Post Timepoint (hr) Value: None
  misc_feature: MA Experiment 20001556 PARAMETER Experiment Name: At_Drought_Soil_Dry_P Parameter: Post-Treatment Value: None
  misc_feature: MA Experiment 20001556 PARAMETER Experiment Name: At_Drought_Soil_Dry_P Parameter: Timepoint (day) Value: 12
  misc_feature: MA Experiment 20001556 PARAMETER Experiment Name: At_Drought_Soil_Dry_P Parameter: Treatment Value: Drought vs. No Drought
  misc_feature: MA Experiment ID: 20001560 Result: Down-regulated in Transcription
  misc_feature: MA Experiment 20001560 PARAMETER Experiment Name: At_Drought_Soil_Dry_P Parameter: Age (day) Value: 28
  misc_feature: MA Experiment 20001560 PARAMETER Experiment Name: At_Drought_Soil_Dry_P Parameter: Organism Value: A. thaliana
  misc_feature: MA Experiment 20001560 PARAMETER Experiment Name: At_Drought_Soil_Dry_P Parameter: Plant Line Value: WS
  misc_feature: MA Experiment 20001560 PARAMETER Experiment Name: At_Drought_Soil_Dry_P Parameter: Post Timepoint (hr) Value: None
  misc_feature: MA Experiment 20001560 PARAMETER Experiment Name: At_Drought_Soil_Dry_P Parameter: Post-Treatment Value: None
  misc_feature: MA Experiment 20001560 PARAMETER Experiment Name: At_Drought_Soil_Dry_P Parameter: Timepoint (day) Value: 14
  misc_feature: MA Experiment 20001560 PARAMETER Experiment Name: At_Drought_Soil_Dry_P Parameter: Treatment Value: Drought vs. No Drought
  misc_feature: MA Experiment ID: 20001904 Result: Down-regulated in Transcription
  misc_feature: MA Experiment 20001904 PARAMETER Experiment Name: At_Drought_Reproduction_P Parameter: Age (day) Value: 37
  misc_feature: MA Experiment 20001904 PARAMETER Experiment Name: At_Drought_Reproduction_P Parameter: Organism Value: A. thaliana
  misc_feature: MA Experiment 20001904 PARAMETER Experiment Name: At_Drought_Reproduction_P Parameter: Plant Line Value: WS
  misc_feature: MA Experiment 20001904 PARAMETER Experiment Name: At_Drought_Reproduction_P Parameter: Timepoint (day) Value: 7
  misc_feature: MA Experiment 20001904 PARAMETER Experiment Name: At_Drought_Reproduction_P Parameter: Tissue Value: Rosettes
  misc_feature: MA Experiment 20001904 PARAMETER Experiment Name: At_Drought_Reproduction_P Parameter: Treatment Value: Drought vs. No Drought
atacacaacccctcttcttctccaccttctctccattttctctttctctcatatctctctgtctacttctactcctctttctccatctgcaactcatatatttccaaaaagtgatcaagatcaacaaaatatccgaatcttgatccgaactttctttcttcgcttaacttcttgtaaatatatataactatagtctatactctatagagcatatatataaacatgaagcgaggtctagatatggcgagaagctacaatgatcatgaaagtagtcaagaaaccggacccgaatcaccaaattcttcaacctttaacggcatgaaagctcttatctcttctcattcgcctaaaagaagcaggagatccgtagagaagagagtagtgaacgtaccgatgaaagaaatggaaggatctcggcacaaaggggacacaactccgccctcagattcatgggcttggcgtaagtacggccaaaagcccattaagggatctccataccctagaggttattaccgttgtagtagcacaaaaggttgtccggcgaggaagcaagtcgagagaagcagagatgatccaacgatgattctcatcacttacacttctgagcataaccatccttggcctctcacttcttccacaagaaacgggcctaaacctaaacccgagcccaaacccgaacctgagcctgaggtagagccagaggcggaggaggaggataataagtttatggttcttggaagggggattgaaacgacgccatcatgtgtcgacgagttcgcatggtttacggagatggagacaacatcttcgacgattcttgagagcccgattttctcgtcggagaaaaagacggctgtctcgggggctgatgacgtggcggtgttctttccgatgggagaagaggatgagtctttgttcgccgatctcggcgagttgccggagtgttctgtggtgtttcgtcaccggagtagcgtagtggggtcacaagttgagatcttttga

SEQ ID NO: 37367 - protein, 259 aa, Arabidopsis thaliana
  peptide (1)..(259): Ceres Seq. ID no. 12603467
  misc_feature (73)..(133): Pfam Name: WRKY DNA -binding domain Pfam Description: WRKY DNA -binding domain
  misc_feature (26)..(151): Homolog of NCBI NO: 18397606 NR Description: WRKY family transcription factor
  misc_feature (26)..(149): Homolog of NCBI NO: 15226838 NR Description: WRKY family transcription factor
  misc_feature (8)..(166): Homolog of NCBI NO: 34909540 NR Description: P0481E12.40 [Oryza sativa (japonica
  misc_feature (224)..(249): Homolog of NCBI NO: 34910854 NR Description: P0435H01.23 [Oryza sativa (japonica
  misc_feature (1)..(197): Homolog of NCBI NO: 34910854 NR Description: P0435H01.23 [Oryza sativa (japonica
  misc_feature (13)..(95): Homolog of NCBI NO: 11357269 NR Description: DNA-binding WRKY-like protein - Arabidopsis
  misc_feature (95)..(251): Homolog of NCBI NO: 11357269 NR Description: DNA-binding WRKY-like protein - Arabidopsis
  misc_feature (13)..(251): Homolog of NCBI NO: 22331854 NR Description: WRKY family transcription factor
  misc_feature (13)..(251): Homolog of NCBI NO: 30694863 NR Description: WRKY family transcription factor [Arabidopsis
  misc_feature (1)..(259): Homolog of NCBI NO: 22329838 NR Description: WRKY family transcription factor
MKRGLDMARSYNDHESSQETGPESPNSSTFNGMKALISSHSPKRSRRSVEKRVVNVPMKEMEGSRHKGDTTPPSDSWAWRKYGQKPIKGSPYPRGYYRCSSTKGCPARKQVERSRDDPTMILITYTSEHNHPWPLTSSTRNGPKPKPEPKPEPEPEVEPEAEEEDNKFMVLGRGIETTPSCVDEFAWFTEMETTSSTILESPIFSSEKKTAVSGADDVAVFFPMGEEDESLFADLGELPECSVVFRHRSSVVGSQVEIF

SEQ ID NO: 37368 - protein, 253 aa, Arabidopsis thaliana
  peptide (1)..(253): Ceres Seq. ID no. 12603468
  misc_feature (67)..(127): Pfam Name: WRKY DNA -binding domain Pfam Description: WRKY DNA -binding domain
  misc_feature (20)..(145): Homolog of NCBI NO: 18397606 NR Description: WRKY family transcription factor
  misc_feature (20)..(143): Homolog of NCBI NO: 15226838 NR Description: WRKY family transcription factor
  misc_feature (2)..(160): Homolog of NCBI NO: 34909540 NR Description: P0481E12.40 [Oryza sativa (japonica
  misc_feature (218)..(243): Homolog of NCBI NO: 34910854 NR Description: P0435H01.23 [Oryza sativa (japonica
  misc_feature (1)..(191): Homolog of NCBI NO: 34910854 NR Description: P0435H01.23 [Oryza sativa (japonica
  misc_feature (7)..(89): Homolog of NCBI NO: 11357269 NR Description: DNA-binding WRKY-like protein - Arabidopsis
  misc_feature (89)..(245): Homolog of NCBI NO: 11357269 NR Description: DNA-binding WRKY-like protein - Arabidopsis
  misc_feature (7)..(245): Homolog of NCBI NO: 22331854 NR Description: WRKY family transcription factor
  misc_feature (7)..(245): Homolog of NCBI NO: 30694863 NR Description: WRKY family transcription factor [Arabidopsis
  misc_feature (1)..(253): Homolog of NCBI NO: 22329838 NR Description: WRKY family transcription factor
MARSYNDHESSQETGPESPNSSTFNGMKALISSHSPKRSRRSVEKRVVNVPMKEMEGSRHKGDTTPPSDSWAWRKYGQKPIKGSPYPRGYYRCSSTKGCPARKQVERSRDDPTMILITYTSEHNHPWPLTSSTRNGPKPKPEPKPEPEPEVEPEAEEEDNKFMVLGRGIETTPSCVDEFAWFTEMETTSSTILESPIFSSEKKTAVSGADDVAVFFPMGEEDESLFADLGELPECSVVFRHRSSVVGSQVEIF

SEQ ID NO: 37369 - protein, 227 aa, Arabidopsis thaliana
  peptide (1)..(227): Ceres Seq. ID no. 12603469
  misc_feature (41)..(101): Pfam Name: WRKY DNA -binding domain Pfam Description: WRKY DNA -binding domain
  misc_feature (1)..(119): Homolog of NCBI NO: 18397606 NR Description: WRKY family transcription factor
  misc_feature (1)..(117): Homolog of NCBI NO: 15226838 NR Description: WRKY family transcription factor
  misc_feature (1)..(134): Homolog of NCBI NO: 34909540 NR Description: P0481E12.40 [Oryza sativa (japonica
  misc_feature (192)..(217): Homolog of NCBI NO: 34910854 NR Description: P0435H01.23 [Oryza sativa (japonica
  misc_feature (1)..(165): Homolog of NCBI NO: 34910854 NR Description: P0435H01.23 [Oryza sativa (japonica
  misc_feature (1)..(63): Homolog of NCBI NO: 11357269 NR Description: DNA-binding WRKY-like protein - Arabidopsis
  misc_feature (63)..(219): Homolog of NCBI NO: 11357269 NR Description: DNA-binding WRKY-like protein - Arabidopsis
  misc_feature (1)..(219): Homolog of NCBI NO: 22331854 NR Description: WRKY family transcription factor
  misc_feature (1)..(219): Homolog of NCBI NO: 30694863 NR Description: WRKY family transcription factor [Arabidopsis
  misc_feature (1)..(227): Homolog of NCBI NO: 22329838 NR Description: WRKY family transcription factor
MKALISSHSPKRSRRSVEKRVVNVPMKEMEGSRHKGDTTPPSDSWAWRKYGQKPIKGSPYPRGYYRCSSTKGCPARKQVERSRDDPTMILITYTSEHNHPWPLTSSTRNGPKPKPEPKPEPEPEVEPEAEEEDNKFMVLGRGIETTPSCVDEFAWFTEMETTSSTILESPIFSSEKKTAVSGADDVAVFFPMGEEDESLFADLGELPECSVVFRHRSSVVGSQVEIF

SEQ ID NO: 37370 - DNA, 1211 bp, Arabidopsis thaliana
  misc_feature (1)..(1211): Ceres Seq. ID no. 12420820
  misc_feature: MA Experiment ID: 108569 Result: Down-regulated in Transcription
  misc_feature: MA Experiment 108569 PARAMETER Experiment Name: At_0.001%_MeJA__cDNA_P Parameter: Timepoint (hr) Value: 6
  misc_feature: MA Experiment 108569 PARAMETER Experiment Name: At_0.001%_MeJA__cDNA_P Parameter: Tissue Value: Aerial
  misc_feature: MA Experiment 108569 PARAMETER Experiment Name: At_0.001%_MeJA__cDNA_P Parameter: Treatment Value: 0.001% MeJA vs. No Treatment
  misc_feature: MA Experiment ID: 108594 Result: Up-regulated in Transcription
  misc_feature: MA Experiment 108594 PARAMETER Experiment Name: At_Ler-rhl_Root_cDNA_P Parameter: Plant Line Value: null
  misc_feature: MA Experiment ID: 108595 Result: Up-regulated in Transcription
  misc_feature: MA Experiment 108595 PARAMETER Experiment Name: At_Ler-pi_Ovule_cDNA_P Parameter: Plant Line Value: null
  misc_feature: MA Experiment ID: 20000111 Result: Down-regulated in Transcription
  misc_feature: MA Experiment 20000111 PARAMETER Experiment Name: At_42deg_Heat_cDNA_P Parameter: Temperature (deg C) Value: 42 vs. 22
  misc_feature: MA Experiment 20000111 PARAMETER Experiment Name: At_42deg_Heat_cDNA_P Parameter: Timepoint (hr) Value: 6
  misc_feature: MA Experiment 20000111 PARAMETER Experiment Name: At_42deg_Heat_cDNA_P Parameter: Tissue Value: Aerial
  misc_feature: MA Experiment ID: 20001451 Result: Up-regulated in Transcription
  misc_feature: MA Experiment 20001451 PARAMETER Experiment Name: At_Far-red-induction_P Parameter: Age (day) Value: 7
  misc_feature: MA Experiment 20001451 PARAMETER Experiment Name: At_Far-red-induction_P Parameter: Light Value: Far-red vs. White
  misc_feature: MA Experiment 20001451 PARAMETER Experiment Name: At_Far-red-induction_P Parameter: Organism Value: A. thaliana
  misc_feature: MA Experiment 20001451 PARAMETER Experiment Name: At_Far-red-induction_P Parameter: Plant Line Value: Columbia
  misc_feature: MA Experiment 20001451 PARAMETER Experiment Name: At_Far-red-induction_P Parameter: Timepoint (hr) Value: 24
  misc_feature: MA Experiment 20001451 PARAMETER Experiment Name: At_Far-red-induction_P Parameter: Tissue Value: Whole Plant
agtgaaagagtgaatcaaagaggtgcggcggtcgccggcgaagacgtgtgctcgtcgaagaaacttctccaacctaaaattttccgaagaagtaagagttgagcaagttatcaatggaaatcgatgaagaagagccaatggtgttcttggaccgtacaacaagagcaacacggggtaaacggatgaccaagttgcttgatgacgaagtagaagaagatgaacagttttggaatcaagaagctcttaaagaggaagaacatgatgatgaatatgaagcagaacgtgaggttgctgatgagtttgacagtgacttcaatgacgatgagcctgagcctgatgcagtcgctgtaaatgaaaaagaattgagggatctgccaaagaagcggctgatttaccctgggaaaactgcttcaaagaaaaagaaaaagaagacgaaggtagtttcacaactagaatatattcctggagatgagaagccaggtgaagaattgggaaacaaggaacaagaagaaaaagaagagaatgaagcacaagaagatatggaaggtgagaaagtcattaggaaatcaacacggacttcagtggttgtacggcaagcagaaagagatgcattgcgtgctgctatacaagcaacaacaaagccaatacaaaggaaaaaagtaggggaggaaaaacggatgacccaagaagaaatgctgctggaagctgctcaaacagaaatcatgaacttgaggaatttagaacgtgtcttggcaagggaagaagaagtaaaaaagaaagcgattgtgcataaagcagtctacaagggtcctcagattcggtatcattcaaaagatggatgtaactatttagaattctgtaatggtgcgtcattcaattcagagttgtcgacgaagtctgttccctatccagaaaaagctgtatgtgtgattacgggattacctgccaagtaccgggatccaaaaacgggtcttccttatgcaactagagacgccttcaaagcaatacgtgaaaggttcatggacgaacatgatggtttgagaaagaaaatggagatgggagatttgtttgatacactagtggcgaaaggttttgcaacaaaacaaaagagaacgaagattccaaagagtaacaaatcattttccctcagaagctcagctcgtttccttagctccgagtctgaagaagagagtgaagaagattcagattaa

SEQ ID NO: 37371 - protein, 365 aa, Arabidopsis thaliana
  peptide (1)..(365): Ceres Seq. ID no. 12420821
  misc_feature (26)..(167): Pfam Name: Krr1 family Pfam Description: Krr1 family
  misc_feature (14)..(239): Homolog of NCBI NO: 37572298 NR Description: Transcription factor-like 1 [Mus musculus]
  misc_feature (245)..(302): Homolog of NCBI NO: 6678255 NR Description: transcription factor-like 1 [Mus musculus]
  misc_feature (14)..(239): Homolog of NCBI NO: 6678255 NR Description: transcription factor-like 1 [Mus musculus]
  misc_feature (245)..(302): Homolog of NCBI NO: 13436005 NR Description: transcription factor-like 1 [Mus musculus]
  misc_feature (14)..(239): Homolog of NCBI NO: 13436005 NR Description: transcription factor-like 1 [Mus musculus]
  misc_feature (14)..(302): Homolog of NCBI NO: 20129451 NR Description: CG4621-PA [Drosophila melanogaster]
  misc_feature (70)..(363): Homolog of NCBI NO: 12054303 NR Description: stress responsive gene 6 protein, Srg6
  misc_feature (4)..(363): Homolog of NCBI NO: 12054305 NR Description: stress responsive gene 6 protein, Srg6
  misc_feature (2)..(363): Homolog of NCBI NO: 40253658 NR Description: putative stress responsive gene 6 protein, Srg6
  misc_feature (1)..(365): Homolog of NCBI NO: 15228030 NR Description: hypothetical protein; protein id: At2g36740.1
MEIDEEEPMVFLDRTTRATRGKRMTKLLDDEVEEDEQFWNQEALKEEEHDDEYEAEREVADEFDSDFNDDEPEPDAVAVNEKELRDLPKKRLIYPGKTASKKKKKKTKVVSQLEYIPGDEKPGEELGNKEQEEKEENEAQEDMEGEKVIRKSTRTSVVVRQAERDALRAAIQATTKPIQRKKVGEEKRMTQEEMLLEAAQTEIMNLRNLERVLAREEEVKKKAIVHKAVYKGPQIRYHSKDGCNYLEFCNGASFNSELSTKSVPYPEKAVCVITGLPAKYRDPKTGLPYATRDAFKAIRERFMDEHDGLRKKMEMGDLFDTLVAKGFATKQKRTKIPKSNKSFSLRSSARFLSSESEEESEEDSD

SEQ ID NO: 37372 - protein, 357 aa, Arabidopsis thaliana
  peptide (1)..(357): Ceres Seq. ID no. 12420822
  misc_feature (18)..(159): Pfam Name: Krr1 family Pfam Description: Krr1 family
  misc_feature (6)..(231): Homolog of NCBI NO: 37572298 NR Description: Transcription factor-like 1 [Mus musculus]
  misc_feature (237)..(294): Homolog of NCBI NO: 6678255 NR Description: transcription factor-like 1 [Mus musculus]
  misc_feature (6)..(231): Homolog of NCBI NO: 6678255 NR Description: transcription factor-like 1 [Mus musculus]
  misc_feature (237)..(294): Homolog of NCBI NO: 13436005 NR Description: transcription factor-like 1 [Mus musculus]
  misc_feature (6)..(231): Homolog of NCBI NO: 13436005 NR Description: transcription factor-like 1 [Mus musculus]
  misc_feature (6)..(294): Homolog of NCBI NO: 20129451 NR Description: CG4621-PA [Drosophila melanogaster]
  misc_feature (62)..(355): Homolog of NCBI NO: 12054303 NR Description: stress responsive gene 6 protein, Srg6
  misc_feature (1)..(355): Homolog of NCBI NO: 12054305 NR Description: stress responsive gene 6 protein, Srg6
  misc_feature (1)..(355): Homolog of NCBI NO: 40253658 NR Description: putative stress responsive gene 6 protein, Srg6
  misc_feature (1)..(357): Homolog of NCBI NO: 15228030 NR Description: hypothetical protein; protein id: At2g36740.1
MVFLDRTTRATRGKRMTKLLDDEVEEDEQFWNQEALKEEEHDDEYEAEREVADEFDSDFNDDEPEPDAVAVNEKELRDLPKKRLIYPGKTASKKKKKKTKVVSQLEYIPGDEKPGEELGNKEQEEKEENEAQEDMEGEKVIRKSTRTSVVVRQAERDALRAAIQATTKPIQRKKVGEEKRMTQEEMLLEAAQTEIMNLRNLERVLAREEEVKKKAIVHKAVYKGPQIRYHSKDGCNYLEFCNGASFNSELSTKSVPYPEKAVCVITGLPAKYRDPKTGLPYATRDAFKAIRERFMDEHDGLRKKMEMGDLFDTLVAKGFATKQKRTKIPKSNKSFSLRSSARFLSSESEEESEEDSD

SEQ ID NO: 37373 - protein, 342 aa, Arabidopsis thaliana
  peptide (1)..(342): Ceres Seq. ID no. 12420823
  misc_feature (3)..(144): Pfam Name: Krr1 family Pfam Description: Krr1 family
  misc_feature (1)..(216): Homolog of NCBI NO: 37572298 NR Description: Transcription factor-like 1 [Mus musculus]
  misc_feature (222)..(279): Homolog of NCBI NO: 6678255 NR Description: transcription factor-like 1 [Mus musculus]
  misc_feature (1)..(216): Homolog of NCBI NO: 6678255 NR Description: transcription factor-like 1 [Mus musculus]
  misc_feature (222)..(279): Homolog of NCBI NO: 13436005 NR Description: transcription factor-like 1 [Mus musculus]
  misc_feature (1)..(216): Homolog of NCBI NO: 13436005 NR Description: transcription factor-like 1 [Mus musculus]
  misc_feature (1)..(279): Homolog of NCBI NO: 20129451 NR Description: CG4621-PA [Drosophila melanogaster]
  misc_feature (47)..(340): Homolog of NCBI NO: 12054303 NR Description: stress responsive gene 6 protein, Srg6
  misc_feature (1)..(340): Homolog of NCBI NO: 12054305 NR Description: stress responsive gene 6 protein, Srg6
  misc_feature (1)..(340): Homolog of NCBI NO: 40253658 NR Description: putative stress responsive gene 6 protein, Srg6
  misc_feature (1)..(342): Homolog of NCBI NO: 15228030 NR Description: hypothetical protein; protein id: At2g36740.1
MTKLLDDEVEEDEQFWNQEALKEEEHDDEYEAEREVADEFDSDFNDDEPEPDAVAVNEKELRDLPKKRLIYPGKTASKKKKKKTKVVSQLEYIPGDEKPGEELGNKEQEEKEENEAQEDMEGEKVIRKSTRTSVVVRQAERDALRAAIQATTKPIQRKKVGEEKRMTQEEMLLEAAQTEIMNLRNLERVLAREEEVKKKAIVHKAVYKGPQIRYHSKDGCNYLEFCNGASFNSELSTKSVPYPEKAVCVITGLPAKYRDPKTGLPYATRDAFKAIRERFMDEHDGLRKKMEMGDLFDTLVAKGFATKQKRTKIPKSNKSFSLRSSARFLSSESEEESEEDSD

SEQ ID NO: 37374 - DNA, 694 bp, Arabidopsis thaliana
  misc_feature (1)..(694): Ceres Seq. ID no. 13576731
  misc_feature: MA Experiment ID: 20000180 Result: Up-regulated in Transcription
  misc_feature: MA Experiment 20000180 PARAMETER Experiment Name: At_Germinating_Seeds_P Parameter: Age (hr) Value: 24 vs. 0
  misc_feature: MA Experiment 20000180 PARAMETER Experiment Name: At_Germinating_Seeds_P Parameter: Tissue Value: Germinating Seeds
  misc_feature: MA Experiment ID: 20000234 Result: Up-regulated in Transcription
  misc_feature: MA Experiment 20000234 PARAMETER Experiment Name: At_Siliques_P Parameter: Age (day) Value: 21
  misc_feature: MA Experiment 20000234 PARAMETER Experiment Name: At_Siliques_P Parameter: Organism Value: A. thaliana
  misc_feature: MA Experiment 20000234 PARAMETER Experiment Name: At_Siliques_P Parameter: Plant Line Value: WS
  misc_feature: MA Experiment 20000234 PARAMETER Experiment Name: At_Siliques_P Parameter: Tissue Value: Less Than 5mm Siliques vs. Whole Plant
  misc_feature: MA Experiment ID: 20000235 Result: Up-regulated in Transcription
  misc_feature: MA Experiment 20000235 PARAMETER Experiment Name: At_Siliques_P Parameter: Age (day) Value: 21
  misc_feature: MA Experiment 20000235 PARAMETER Experiment Name: At_Siliques_P Parameter: Organism Value: A. thaliana
  misc_feature: MA Experiment 20000235 PARAMETER Experiment Name: At_Siliques_P Parameter: Plant Line Value: WS
  misc_feature: MA Experiment 20000235 PARAMETER Experiment Name: At_Siliques_P Parameter: Tissue Value: 5-10mm Siliques vs. Whole Plant
  misc_feature: MA Experiment ID: 20000264 Result: Up-regulated in Transcription
  misc_feature: MA Experiment 20000264 PARAMETER Experiment Name: At_Open_Flower_P Parameter: Age (day) Value: 21
  misc_feature: MA Experiment 20000264 PARAMETER Experiment Name: At_Open_Flower_P Parameter: Plant Line Value: WS
  misc_feature: MA Experiment 20000264 PARAMETER Experiment Name: At_Open_Flower_P Parameter: Tissue Value: Open Flower vs. Whole Plant
  misc_feature: MA Experiment ID: 20000265 Result: Up-regulated in Transcription
  misc_feature: MA Experiment 20000265 PARAMETER Experiment Name: At_Open_Flower_P Parameter: Age (day) Value: 21
  misc_feature: MA Experiment 20000265 PARAMETER Experiment Name: At_Open_Flower_P Parameter: Plant Line Value: WS
  misc_feature: MA Experiment 20000265 PARAMETER Experiment Name: At_Open_Flower_P Parameter: Tissue Value: Closed Flower vs. Whole Plant
  misc_feature: MA Experiment ID: 20000439 Result: Up-regulated in Transcription
  misc_feature: MA Experiment 20000439 PARAMETER Experiment Name: At_Roots__P Parameter: Age (day) Value: 14 vs. 21
  misc_feature: MA Experiment 20000439 PARAMETER Experiment Name: At_Roots__P Parameter: Organism Value: A. thaliana
  misc_feature: MA Experiment 20000439 PARAMETER Experiment Name: At_Roots__P Parameter: Tissue Value: Roots vs. Whole Plant
  misc_feature: MA Experiment ID: 20000495 Result: Up-regulated in Transcription
  misc_feature: MA Experiment 20000495 PARAMETER Experiment Name: At_Guard_Cells_P Parameter: Harvest Date Value: 8/2/2002
  misc_feature: MA Experiment 20000495 PARAMETER Experiment Name: At_Guard_Cells_P Parameter: Organism Value: A. thaliana
  misc_feature: MA Experiment 20000495 PARAMETER Experiment Name: At_Guard_Cells_P Parameter: Tissue Value: Guard Cells vs. Leaves
  misc_feature: MA Experiment ID: 20000527 Result: Down-regulated in Transcription
  misc_feature: MA Experiment 20000527 PARAMETER Experiment Name: At_10percent_PEG_P Parameter: Age (day) Value: 20
  misc_feature: MA Experiment 20000527 PARAMETER Experiment Name: At_10percent_PEG_P Parameter: Organism Value: A. thaliana
  misc_feature: MA Experiment 20000527 PARAMETER Experiment Name: At_10percent_PEG_P Parameter: Plant Line Value: WS
  misc_feature: MA Experiment 20000527 PARAMETER Experiment Name: At_10percent_PEG_P Parameter: Timepoint (day) Value: 20
  misc_feature: MA Experiment 20000527 PARAMETER Experiment Name: At_10percent_PEG_P Parameter: Tissue Value: Whole Plant
  misc_feature: MA Experiment 20000527 PARAMETER Experiment Name: At_10percent_PEG_P Parameter: Treatment Value: 10percent PEG vs. No Treatment
  misc_feature: MA Experiment ID: 20000573 Result: Down-regulated in Transcription
  misc_feature: MA Experiment 20000573 PARAMETER Experiment Name: At_100uM_ABA_Mutants__P Parameter: Organism Value: A. thaliana
  misc_feature: MA Experiment 20000573 PARAMETER Experiment Name: At_100uM_ABA_Mutants__P Parameter: Plant Line Value: CS22 vs. Ler wt
  misc_feature: MA Experiment 20000573 PARAMETER Experiment Name: At_100uM_ABA_Mutants__P Parameter: Timepoint (hr) Value: N/A
  misc_feature: MA Experiment 20000573 PARAMETER Experiment Name: At_100uM_ABA_Mutants__P Parameter: Tissue Value: Whole Plant
  misc_feature: MA Experiment 20000573 PARAMETER Experiment Name: At_100uM_ABA_Mutants__P Parameter: Treatment Value: None
  misc_feature: MA Experiment ID: 20001248 Result: Down-regulated in Transcription
  misc_feature: MA Experiment 20001248 PARAMETER Experiment Name: At_Far-red-induction_P Parameter: Age (day) Value: 7
  misc_feature: MA Experiment 20001248 PARAMETER Experiment Name: At_Far-red-induction_P Parameter: Light Value: Far-red vs. White
  misc_feature: MA Experiment 20001248 PARAMETER Experiment Name: At_Far-red-induction_P Parameter: Organism Value: A. thaliana
  misc_feature: MA Experiment 20001248 PARAMETER Experiment Name: At_Far-red-induction_P Parameter: Plant Line Value: Columbia
  misc_feature: MA Experiment 20001248 PARAMETER Experiment Name: At_Far-red-induction_P Parameter: Timepoint (hr) Value: 4
  misc_feature: MA Experiment 20001248 PARAMETER Experiment Name: At_Far-red-induction_P Parameter: Tissue Value: Whole Plant
  misc_feature: MA Experiment ID: 20001450 Result: Down-regulated in Transcription
  misc_feature: MA Experiment 20001450 PARAMETER Experiment Name: At_Far-red-induction_P Parameter: Age (day) Value: 7
  misc_feature: MA Experiment 20001450 PARAMETER Experiment Name: At_Far-red-induction_P Parameter: Light Value: Far-red vs. White
  misc_feature: MA Experiment 20001450 PARAMETER Experiment Name: At_Far-red-induction_P Parameter: Organism Value: A. thaliana
  misc_feature: MA Experiment 20001450 PARAMETER Experiment Name: At_Far-red-induction_P Parameter: Plant Line Value: Columbia
  misc_feature: MA Experiment 20001450 PARAMETER Experiment Name: At_Far-red-induction_P Parameter: Timepoint (hr) Value: 8
  misc_feature: MA Experiment 20001450 PARAMETER Experiment Name: At_Far-red-induction_P Parameter: Tissue Value: Whole Plant
  misc_feature: MA Experiment ID: 20001451 Result: Down-regulated in Transcription
  misc_feature: MA Experiment 20001451 PARAMETER Experiment Name: At_Far-red-induction_P Parameter: Age (day) Value: 7
  misc_feature: MA Experiment 20001451 PARAMETER Experiment Name: At_Far-red-induction_P Parameter: Light Value: Far-red vs. White
  misc_feature: MA Experiment 20001451 PARAMETER Experiment Name: At_Far-red-induction_P Parameter: Organism Value: A. thaliana
  misc_feature: MA Experiment 20001451 PARAMETER Experiment Name: At_Far-red-induction_P Parameter: Plant Line Value: Columbia
  misc_feature: MA Experiment 20001451 PARAMETER Experiment Name: At_Far-red-induction_P Parameter: Timepoint (hr) Value: 24
  misc_feature: MA Experiment 20001451 PARAMETER Experiment Name: At_Far-red-induction_P Parameter: Tissue Value: Whole Plant
cccccgaccacttatgtaaacaaaccaaccatagtaaccaaaaccacaacaaaacacatggctaagctcattttcttcctcgccgtccaaatcctctttctcgccgtggtttcttccgccggagacggtgaagacttcgctagaaccatggaccggaaacttcttggtctccacaaaaaggagaaacttacccatttcaaagtctattggcacgatatcttaagcggtccgaacccaacctccatcatgatacaaccaccggttacaaacagttcctattttggagccatctccatgatcgacaacgctttgacggccaaagttccgatgaactccacggtgttgggtcaggcccaaggattttacgccggagcggcccaaaaggagttgggtttcctgatggcgatgaactttgctttcaagacagggaaatataacggaagcacgatcacgattcttggcaggaacacggcgttgtcggaagtcagagaaatgccgatcgtcggaggaagtgggcttttccgatttgctagaggctatgtggaggctaggacaaagtggattaatctcaagaacggtgatgctactgttgagtatagttgttacgtgttgcattattgaggttaattaatgatatttttgtctttctctatatttaatttgactacgcaataattaataaaacagatttcaa

SEQ ID NO: 37375 - protein, 206 aa, Arabidopsis thaliana
  peptide (1)..(206): Ceres Seq. ID no. 13576732
  misc_feature (33)..(205): Pfam Name: Dirigent-like protein Pfam Description: Dirigent-like protein
  misc_feature (20)..(200): Homolog of NCBI NO: 25412014 NR Description: probable disease resistance response protein
  misc_feature (20)..(205): Homolog of NCBI NO: 30681257 NR Description: disease resistance response protein-related/
  misc_feature (20)..(205): Homolog of NCBI NO: 15218836 NR Description: disease resistance response protein-related/
  misc_feature (84)..(206): Homolog of NCBI NO: 15231315 NR Description: disease resistance response protein-related/
  misc_feature (23)..(206): Homolog of NCBI NO: 15217886 NR Description: disease resistance response protein-related/
  misc_feature (20)..(197): Homolog of NCBI NO: 15231318 NR Description: disease resistance response protein-related/
  misc_feature (20)..(206): Homolog of NCBI NO: 15231302 NR Description: disease resistance response protein-related/
  misc_feature (20)..(206): Homolog of NCBI NO: 15239779 NR Description: disease resistance response protein-related/
  misc_feature (20)..(206): Homolog of NCBI NO: 22135914 NR Description: unknown protein [Arabidopsis thaliana]
  misc_feature (20)..(206): Homolog of NCBI NO: 15222673 NR Description: disease resistance response protein-related/
PPTTYVNKPTIVTKTTTKHMAKLIFFLAVQILFLAVVSSAGDGEDFARTMDRKLLGLHKKEKLTHFKVYWHDILSGPNPTSIMIQPPVTNSSYFGAISMIDNALTAKVPMNSTVLGQAQGFYAGAAQKELGFLMAMNFAFKTGKYNGSTITILGRNTALSEVREMPIVGGSGLFRFARGYVEARTKWINLKNGDATVEYSCYVLHY

SEQ ID NO: 37376 - protein, 187 aa, Arabidopsis thaliana
  peptide (1)..(187): Ceres Seq. ID no. 13576733
  misc_feature (14)..(186): Pfam Name: Dirigent-like protein Pfam Description: Dirigent-like protein
  misc_feature (1)..(181): Homolog of NCBI NO: 25412014 NR Description: probable disease resistance response protein
  misc_feature (1)..(186): Homolog of NCBI NO: 30681257 NR Description: disease resistance response protein-related/
  misc_feature (1)..(186): Homolog of NCBI NO: 15218836 NR Description: disease resistance response protein-related/
  misc_feature (65)..(187): Homolog of NCBI NO: 15231315 NR Description: disease resistance response protein-related/
  misc_feature (4)..(187): Homolog of NCBI NO: 15217886 NR Description: disease resistance response protein-related/
  misc_feature (1)..(178): Homolog of NCBI NO: 15231318 NR Description: disease resistance response protein-related/
  misc_feature (1)..(187): Homolog of NCBI NO: 15231302 NR Description: disease resistance response protein-related/
  misc_feature (1)..(187): Homolog of NCBI NO: 15239779 NR Description: disease resistance response protein-related/
  misc_feature (1)..(187): Homolog of NCBI NO: 22135914 NR Description: unknown protein [Arabidopsis thaliana]
  misc_feature (1)..(187): Homolog of NCBI NO: 15222673 NR Description: disease resistance response protein-related/
MAKLIFFLAVQILFLAVVSSAGDGEDFARTMDRKLLGLHKKEKLTHFKVYWHDILSGPNPTSIMIQPPVTNSSYFGAISMIDNALTAKVPMNSTVLGQAQGFYAGAAQKELGFLMAMNFAFKTGKYNGSTITILGRNTALSEVREMPIVGGSGLFRFARGYVEARTKWINLKNGDATVEYSCYVLHY

SEQ ID NO: 37377 - protein, 157 aa, Arabidopsis thaliana
  peptide (1)..(157): Ceres Seq. ID no. 13576734
  misc_feature (1)..(156): Pfam Name: Dirigent-like protein Pfam Description: Dirigent-like protein
  misc_feature (1)..(151): Homolog of NCBI NO: 25412014 NR Description: probable disease resistance response protein
  misc_feature (1)..(156): Homolog of NCBI NO: 30681257 NR Description: disease resistance response protein-related/
  misc_feature (1)..(156): Homolog of NCBI NO: 15218836 NR Description: disease resistance response protein-related/
  misc_feature (35)..(157): Homolog of NCBI NO: 15231315 NR Description: disease resistance response protein-related/
  misc_feature (1)..(157): Homolog of NCBI NO: 15217886 NR Description: disease resistance response protein-related/
  misc_feature (1)..(148): Homolog of NCBI NO: 15231318 NR Description: disease resistance response protein-related/
  misc_feature (1)..(157): Homolog of NCBI NO: 15231302 NR Description: disease resistance response protein-related/
  misc_feature (1)..(157): Homolog of NCBI NO: 15239779 NR Description: disease resistance response protein-related/
  misc_feature (1)..(157): Homolog of NCBI NO: 22135914 NR Description: unknown protein [Arabidopsis thaliana]
  misc_feature (1)..(157): Homolog of NCBI NO: 15222673 NR Description: disease resistance response protein-related/
MDRKLLGLHKKEKLTHFKVYWHDILSGPNPTSIMIQPPVTNSSYFGAISMIDNALTAKVPMNSTVLGQAQGFYAGAAQKELGFLMAMNFAFKTGKYNGSTITILGRNTALSEVREMPIVGGSGLFRFARGYVEARTKWINLKNGDATVEYSCYVLHY

SEQ ID NO: 37378 - DNA, 576 bp, Arabidopsis thaliana
  misc_feature (1)..(576): Ceres Seq. ID no. 12420816
  misc_feature: MA Experiment ID: 108434 Result: Up-regulated in Transcription
  misc_feature: MA Experiment 108434 PARAMETER Experiment Name: At_Root_Tips_cDNA_P Parameter: Tissue Value: Root Tips
  misc_feature: MA Experiment ID: 20001911 Result: Down-regulated in Transcription
  misc_feature: MA Experiment 20001911 PARAMETER Experiment Name: At_Drought_Reproduction_P Parameter: Age (day) Value: 40
  misc_feature: MA Experiment 20001911 PARAMETER Experiment Name: At_Drought_Reproduction_P Parameter: Organism Value: A. thaliana
  misc_feature: MA Experiment 20001911 PARAMETER Experiment Name: At_Drought_Reproduction_P Parameter: Plant Line Value: WS
  misc_feature: MA Experiment 20001911 PARAMETER Experiment Name: At_Drought_Reproduction_P Parameter: Timepoint (day) Value: 10
  misc_feature: MA Experiment 20001911 PARAMETER Experiment Name: At_Drought_Reproduction_P Parameter: Tissue Value: Flowers
  misc_feature: MA Experiment 20001911 PARAMETER Experiment Name: At_Drought_Reproduction_P Parameter: Treatment Value: Drought vs. No Drought
gtcggactcagtggagaagaaggaagatccaaatcgatccgttgaaaaggaatttcgaatttgctgtgcgatgtcgagtgcggtggacgctacgggaaacccgatccctacttcggcggttttaacggcgtcagcgaagcatataggtatgaggtgtatgccggagaatgttgcgttcctcaaatgcaagaagaatgatccaaacccagagaagtgtctcgacaaaggtcgtgacgtcactcgctgcgtgcttggcttgaaaaggagatgggattatgttgggtgtatgtattactacacaaacgagtttgatctgtgtaggaaagagcaagaagccttcgagaaagtgtgtcccttgaaatgagaatcacaagttcttgtcatgttttgatttgtatctcataataaagcaaaatgttcatttttgaatgagctttactctctccatctcttgtttgttgtcatcccatttatttcctctcagatgctttcgtagtgagttccaaagacaactaaatgactcagttttattgttcgatggttcactaatcagcacagaatggaacaattgttttt

SEQ ID NO: 37379 - protein, 120 aa, Arabidopsis thaliana
  peptide (1)..(120): Ceres Seq. ID no. 12420817
  misc_feature (37)..(119): Homolog of NCBI NO: 7657369 NR Description: NADH dehydrogenase (ubiquinone) 1 alpha
  misc_feature (37)..(119): Homolog of NCBI NO: 37589679 NR Description: Unknown (protein for MGC:73139) [Danio rerio]
  misc_feature (25)..(120): Homolog of NCBI NO: 18397530 NR Description: expressed protein
  misc_feature (24)..(120): Homolog of NCBI NO: 15239564 NR Description: NADH:ubiquinone oxidoreductase - like protein
SDSVEKKEDPNRSVEKEFRICCAMSSAVDATGNPIPTSAVLTASAKHIGMRCMPENVAFLKCKKNDPNPEKCLDKGRDVTRCVLGLKRRWDYVGCMYYYTNEFDLCRKEQEAFEKVCPLK

SEQ ID NO: 37380 - protein, 97 aa, Arabidopsis thaliana
  peptide (1)..(97): Ceres Seq. ID no. 12420818
  misc_feature (14)..(96): Homolog of NCBI NO: 7657369 NR Description: NADH dehydrogenase (ubiquinone) 1 alpha
  misc_feature (14)..(96): Homolog of NCBI NO: 37589679 NR Description: Unknown (protein for MGC:73139) [Danio rerio]
  misc_feature (2)..(97): Homolog of NCBI NO: 18397530 NR Description: expressed protein
  misc_feature (1)..(97): Homolog of NCBI NO: 15239564 NR Description: NADH:ubiquinone oxidoreductase - like protein
MSSAVDATGNPIPTSAVLTASAKHIGMRCMPENVAFLKCKKNDPNPEKCLDKGRDVTRCVLGLKRRWDYVGCMYYYTNEFDLCRKEQEAFEKVCPLK

SEQ ID NO: 37381 - protein, 71 aa, Arabidopsis thaliana
  peptide (1)..(71): Ceres Seq. ID no. 12420819
  misc_feature (1)..(70): Homolog of NCBI NO: 7657369 NR Description: NADH dehydrogenase (ubiquinone) 1 alpha
  misc_feature (1)..(70): Homolog of NCBI NO: 37589679 NR Description: Unknown (protein for MGC:73139) [Danio rerio]
  misc_feature (1)..(71): Homolog of NCBI NO: 18397530 NR Description: expressed protein
  misc_feature (1)..(71): Homolog of NCBI NO: 15239564 NR Description: NADH:ubiquinone oxidoreductase - like protein
MRCMPENVAFLKCKKNDPNPEKCLDKGRDVTRCVLGLKRRWDYVGCMYYYTNEFDLCRKEQEAFEKVCPLK

SEQ ID NO: 37382 - DNA, 2395 bp, Arabidopsis thaliana
  misc_feature (1)..(2395): Ceres Seq. ID no. 13497276
  misc_feature: MA Experiment ID: 108474 Result: Up-regulated in Transcription
  misc_feature: MA Experiment 108474 PARAMETER Experiment Name: At_Drought_Flowers_cDNA_P Parameter: Timepoint (hr) Value: null
  misc_feature: MA Experiment 108474 PARAMETER Experiment Name: At_Drought_Flowers_cDNA_P Parameter: Treatment Value: Drought vs. No Drought
  misc_feature: MA Experiment ID: 108488 Result: Up-regulated in Transcription
  misc_feature: MA Experiment ID: 108576 Result: Down-regulated in Transcription
  misc_feature: MA Experiment 108576 PARAMETER Experiment Name: At_42deg_Heat_cDNA_P Parameter: Temperature (deg C) Value: 42 vs. 22
  misc_feature: MA Experiment 108576 PARAMETER Experiment Name: At_42deg_Heat_cDNA_P Parameter: Timepoint (hr) Value: 1
  misc_feature: MA Experiment 108576 PARAMETER Experiment Name: At_42deg_Heat_cDNA_P Parameter: Tissue Value: Aerial
  misc_feature: MA Experiment ID: 108577 Result: Down-regulated in Transcription
  misc_feature: MA Experiment 108577 PARAMETER Experiment Name: At_42deg_Heat_cDNA_P Parameter: Temperature (deg C) Value: 42 vs. 22
  misc_feature: MA Experiment 108577 PARAMETER Experiment Name: At_42deg_Heat_cDNA_P Parameter: Timepoint (hr) Value: 6
  misc_feature: MA Experiment 108577 PARAMETER Experiment Name: At_42deg_Heat_cDNA_P Parameter: Tissue Value: Aerial
  misc_feature: MA Experiment ID: 108668 Result: Down-regulated in Transcription
  misc_feature: MA Experiment 108668 PARAMETER Experiment Name: At_2mM_SA_cDNA_P Parameter: Plant Line Value: WS
  misc_feature: MA Experiment 108668 PARAMETER Experiment Name: At_2mM_SA_cDNA_P Parameter: Timepoint (hr) Value: 6
  misc_feature: MA Experiment 108668 PARAMETER Experiment Name: At_2mM_SA_cDNA_P Parameter: Treatment Value: 2mM SA vs. No Treatment
  misc_feature: MA Experiment ID: 20000072 Result: Down-regulated in Transcription
  misc_feature: MA Experiment 20000072 PARAMETER Experiment Name: At_100uM_ABA_Mutants_cDNA_P Parameter: Plant Line Value: CS8105
  misc_feature: MA Experiment 20000072 PARAMETER Experiment Name: At_100uM_ABA_Mutants_cDNA_P Parameter: Timepoint (hr) Value: 6
  misc_feature: MA Experiment 20000072 PARAMETER Experiment Name: At_100uM_ABA_Mutants_cDNA_P Parameter: Tissue Value: Aerial
  misc_feature: MA Experiment 20000072 PARAMETER Experiment Name: At_100uM_ABA_Mutants_cDNA_P Parameter: Treatment Value: 100uM ABA vs. No Treatment
  misc_feature: MA Experiment ID: 20000087 Result: Down-regulated in Transcription
  misc_feature: MA Experiment 20000087 PARAMETER Experiment Name: At_100uM_ABA_Mutants_cDNA_P Parameter: Plant Line Value: WS
  misc_feature: MA Experiment 20000087 PARAMETER Experiment Name: At_100uM_ABA_Mutants_cDNA_P Parameter: Timepoint (hr) Value: 6
  misc_feature: MA Experiment 20000087 PARAMETER Experiment Name: At_100uM_ABA_Mutants_cDNA_P Parameter: Tissue Value: Aerial
  misc_feature: MA Experiment 20000087 PARAMETER Experiment Name: At_100uM_ABA_Mutants_cDNA_P Parameter: Treatment Value: 100uM ABA vs. No Treatment
  misc_feature: MA Experiment ID: 20000113 Result: Down-regulated in Transcription
  misc_feature: MA Experiment 20000113 PARAMETER Experiment Name: At_42deg_Heat_cDNA_P Parameter: Temperature (deg C) Value: 42 vs. 22
  misc_feature: MA Experiment 20000113 PARAMETER Experiment Name: At_42deg_Heat_cDNA_P Parameter: Timepoint (hr) Value: 8
  misc_feature: MA Experiment 20000113 PARAMETER Experiment Name: At_42deg_Heat_cDNA_P Parameter: Tissue Value: Aerial
  misc_feature: MA Experiment ID: 20000173 Result: Down-regulated in Transcription
  misc_feature: MA Experiment 20000173 PARAMETER Experiment Name: At_42deg_Heat_P Parameter: Age (day) Value: 14
  misc_feature: MA Experiment 20000173 PARAMETER Experiment Name: At_42deg_Heat_P Parameter: Organism Value: A. thaliana
  misc_feature: MA Experiment 20000173 PARAMETER Experiment Name: At_42deg_Heat_P Parameter: Plant Line Value: WS
  misc_feature: MA Experiment 20000173 PARAMETER Experiment Name: At_42deg_Heat_P Parameter: Temperature (deg C) Value: 42 vs. 22
  misc_feature: MA Experiment 20000173 PARAMETER Experiment Name: At_42deg_Heat_P Parameter: Timepoint (hr) Value: 6
  misc_feature: MA Experiment 20000173 PARAMETER Experiment Name: At_42deg_Heat_P Parameter: Tissue Value: Aerial
  misc_feature: MA Experiment ID: 20000224 Result: Up-regulated in Transcription
  misc_feature: MA Experiment ID: 20000496 Result: Up-regulated in Transcription
  misc_feature: MA Experiment 20000496 PARAMETER Experiment Name: At_Guard_Cells_P Parameter: Harvest Date Value: 7/19/2002
  misc_feature: MA Experiment 20000496 PARAMETER Experiment Name: At_Guard_Cells_P Parameter: Organism Value: Canola
  misc_feature: MA Experiment 20000496 PARAMETER Experiment Name: At_Guard_Cells_P Parameter: Tissue Value: Guard Cells vs. Leaves
  misc_feature: MA Experiment ID: 20000573 Result: Down-regulated in Transcription
  misc_feature: MA Experiment 20000573 PARAMETER Experiment Name: At_100uM_ABA_Mutants__P Parameter: Organism Value: A. thaliana
  misc_feature: MA Experiment 20000573 PARAMETER Experiment Name: At_100uM_ABA_Mutants__P Parameter: Plant Line Value: CS22 vs. Ler wt
  misc_feature: MA Experiment 20000573 PARAMETER Experiment Name: At_100uM_ABA_Mutants__P Parameter: Timepoint (hr) Value: N/A
  misc_feature: MA Experiment 20000573 PARAMETER Experiment Name: At_100uM_ABA_Mutants__P Parameter: Tissue Value: Whole Plant
  misc_feature: MA Experiment 20000573 PARAMETER Experiment Name: At_100uM_ABA_Mutants__P Parameter: Treatment Value: None
  misc_feature: MA Experiment ID: 20001248 Result: Down-regulated in Transcription
  misc_feature: MA Experiment 20001248 PARAMETER Experiment Name: At_Far-red-induction_P Parameter: Age (day) Value: 7
  misc_feature: MA Experiment 20001248 PARAMETER Experiment Name: At_Far-red-induction_P Parameter: Light Value: Far-red vs. White
  misc_feature: MA Experiment 20001248 PARAMETER Experiment Name: At_Far-red-induction_P Parameter: Organism Value: A. thaliana
  misc_feature: MA Experiment 20001248 PARAMETER Experiment Name: At_Far-red-induction_P Parameter: Plant Line Value: Columbia
  misc_feature: MA Experiment 20001248 PARAMETER Experiment Name: At_Far-red-induction_P Parameter: Timepoint (hr) Value: 4
  misc_feature: MA Experiment 20001248 PARAMETER Experiment Name: At_Far-red-induction_P Parameter: Tissue Value: Whole Plant
  misc_feature: MA Experiment ID: 20001905 Result: Down-regulated in Transcription
  misc_feature: MA Experiment 20001905 PARAMETER Experiment Name: At_Drought_Reproduction_P Parameter: Age (day) Value: 40
  misc_feature: MA Experiment 20001905 PARAMETER Experiment Name: At_Drought_Reproduction_P Parameter: Organism Value: A. thaliana
  misc_feature: MA Experiment 20001905 PARAMETER Experiment Name: At_Drought_Reproduction_P Parameter: Plant Line Value: WS
  misc_feature: MA Experiment 20001905 PARAMETER Experiment Name: At_Drought_Reproduction_P Parameter: Timepoint (day) Value: 10
  misc_feature: MA Experiment 20001905 PARAMETER Experiment Name: At_Drought_Reproduction_P Parameter: Tissue Value: Rosettes
  misc_feature: MA Experiment 20001905 PARAMETER Experiment Name: At_Drought_Reproduction_P Parameter: Treatment Value: Drought vs. No Drought
atctctctctttcttcttccactcgtgaaagaaagaccagagagttttctcctgatccacacaacaacaacaacacagagatcccaaatccggaagatatcttcttctctcataactcagtttactcagattcactgaaacatacaattaagtgagcagtaaccgtcagtctctcacctgcagcaaaattcactcttctgctaataatgttctccacagagattcatctattgatcattttgactttttcaggaaccagagatgaaaaattatagttaaggttagtagtagtagataggtttaataaatttgtagttaagtaacccaaaaaaataacattaaactaaaatccaacactagaaaccagagagaccctcttaacgacaacaacctctctgtacacaagacaacaaacactctctacaaaaacactactctttccttcttcttctctctactctattctaattctaaagagagagagaaaagctatggatggatatgaagctactaggattgtgctctctagaatccaaagcttagaccctgaaaacgcatcaaagatcatgggtcttctccttcttcaagatcacggtgaaaaagagatgataaggctagcttttggtccagagactcttgttcactctgttatagtgaaagccaagaaagagttaggtctcatgaactgttcaaggtctccgtggagtcatcaagatgagttgattagccctaagaacaaccgtggctcttcactcaatccagcttctttgcccttttacgctaatggaggaagatcttctagggatttaaccaacgatttcgagctcatggatgatatgaactccagaagtactgattttttgggctctgtgcatgcgagaagcggtagctgcgttttggacggtttagggtatggtggtgattctgatttagggtttggaggtgtgccctgttcttacttcgctagaggcttctgcaaaaacggagctagctgcagattcgtccacagtgatggaggagctgatttggttggctccccaagcagaatcgagcttcttaggtctaactcggtacccccaagacttgctcaccacttcatgactcgctcttctctcccttctttttcaactaaaggtgttaacttgcagcaaaacgatgttcaaagagctgctgctgctttgatgataggagatgaattgcagaagcttggaagatggagacctgaaaggattgatctttctgctatggcttgtccagcttcaagacagatctatctgacattccctgccgacagtaggttcagggaggaagatgtgtccaattacttcagtacttttggaccagttcaagatgtgaggataccatatcagcaaaagagaatgtttggttttgtgacatttgtgtaccctgagactgttaagagcattctcgccaaagggaatcctcactttgtgtgtgattccagagttcttgtcaagccttacaaggagaaaggcaaagtccctgacaaatacagaactaaccaaacaacagagcgagaactgtccccaacaggccttgattctagccctagggacgttctaggagggagagggttttataacaacactcaagatgtgttgtggaggagtaagtttgaagaagagattcttgaacttcagagcagaaggctgatgaatctgcagcttcttgacgtcaagaagcatttccaactcaattcccctaccaacattcactctccgaatcctttcagccaatcacttatatctccacgcccattgtccgtgatcaagagagagtatgatggaggagagaaagggaaaggaagttctaaagaaggatctgatgatgatacaatgaatctaccagagaggttggaggatagcttgccagatagtccgtttgcatcgcccgctcatcatttgcttctgtttgctgattctgctgacaataacggatcggatctgtggtcgccttcttctgataatgatgataattctactccttctacactctccgactccttcaactctttcaactaccaaatgccaaggttaccggcgattggaatgttacccggtaggggtggaccaacctgtcgtgttgggatataaacaggaagtgaagtaagaaaagaaaaaaactgataaaatagagagacccttaataaccaaaaagatgcagaggtgtaaaaaataaaaagcaggaaatttgatgtaagagataggagaagagaaagaaggaagattgttgtaccatttctctagttttaatgtgttatgtgatgatggaccacacaagatgatgtaatatgatatgatatgatatatataatataggacaagaagtgtaatctctctaaagatatacaaaagaaaagagagattatcatttg

SEQ ID NO: 37383 - protein, 540 aa, Arabidopsis thaliana
  peptide (1)..(540): Ceres Seq. ID no. 13497277
  misc_feature (272)..(328): Pfam Name: RNA recognition motif. (a.k.a. RRM, RBD, or RNP domain) Pfam Description: RNA recognition motif. (a.k.a. RRM, RBD, or RNP
  misc_feature (272)..(328): Pfam Name: RNA recognition motif. (a.k.a. RRM, RBD, or RNP domain) Pfam Description: RNA recognition motif. (a.k.a. RRM, RBD, or RNP
  misc_feature (435)..(521): Homolog of NCBI NO: 38230504 NR Description: predicted protein [Populus alba x Populus tremula]
  misc_feature (1)..(147): Homolog of NCBI NO: 38230504 NR Description: predicted protein [Populus alba x Populus tremula]
  misc_feature (176)..(424): Homolog of NCBI NO: 38230504 NR Description: predicted protein [Populus alba x Populus tremula]
  misc_feature (375)..(423): Homolog of NCBI NO: 15229435 NR Description: RNA recognition motif (RRM)-containing protein
  misc_feature (1)..(61): Homolog of NCBI NO: 15229435 NR Description: RNA recognition motif (RRM)-containing protein
  misc_feature (435)..(521): Homolog of NCBI NO: 38230504 NR Description: predicted protein [Populus alba x Populus tremula]
  misc_feature (176)..(424): Homolog of NCBI NO: 38230504 NR Description: predicted protein [Populus alba x Populus tremula]
  misc_feature (1)..(61): Homolog of NCBI NO: 15229435 NR Description: RNA recognition motif (RRM)-containing protein
  misc_feature (1)..(540): Homolog of NCBI NO: 15231090 NR Description: RNA recognition motif (RRM)-containing protein
  misc_feature (1)..(540): Homolog of NCBI NO: 19423979 NR Description: unknown protein [Arabidopsis thaliana]
  misc_feature (1)..(540): Homolog of NCBI NO: 21594547 NR Description: unknown [Arabidopsis thaliana]
  misc_feature (174)..(357): Homolog of NCBI NO: 15229435 NR Description: RNA recognition motif (RRM)-containing protein
  misc_feature (447)..(540): Homolog of NCBI NO: 15229435 NR Description: RNA recognition motif (RRM)-containing protein
  misc_feature (375)..(423): Homolog of NCBI NO: 15229435 NR Description: RNA recognition motif (RRM)-containing protein
  misc_feature (1)..(147): Homolog of NCBI NO: 38230504 NR Description: predicted protein [Populus alba x Populus tremula]
  misc_feature (447)..(540): Homolog of NCBI NO: 15229435 NR Description: RNA recognition motif (RRM)-containing protein
  misc_feature (174)..(357): Homolog of NCBI NO: 15229435 NR Description: RNA recognition motif (RRM)-containing protein
  misc_feature (1)..(540): Homolog of NCBI NO: 21594547 NR Description: unknown [Arabidopsis thaliana]
  misc_feature (1)..(540): Homolog of NCBI NO: 19423979 NR Description: unknown protein [Arabidopsis thaliana]
  misc_feature (1)..(540): Homolog of NCBI NO: 15231090 NR Description: RNA recognition motif (RRM)-containing protein
MDGYEATRIVLSRIQSLDPENASKIMGLLLLQDHGEKEMIRLAFGPETLVHSVIVKAKKELGLMNCSRSPWSHQDELISPKNNRGSSLNPASLPFYANGGRSSRDLTNDFELMDDMNSRSTDFLGSVHARSGSCVLDGLGYGGDSDLGFGGVPCSYFARGFCKNGASCRFVHSDGGADLVGSPSRIELLRSNSVPPRLAHHFMTRSSLPSFSTKGVNLQQNDVQRAAAALMIGDELQKLGRWRPERIDLSAMACPASRQIYLTFPADSRFREEDVSNYFSTFGPVQDVRIPYQQKRMFGFVTFVYPETVKSILAKGNPHFVCDSRVLVKPYKEKGKVPDKYRTNQTTERELSPTGLDSSPRDVLGGRGFYNNTQDVLWRSKFEEEILELQSRRLMNLQLLDVKKHFQLNSPTNIHSPNPFSQSLISPRPLSVIKREYDGGEKGKGSSKEGSDDDTMNLPERLEDSLPDSPFASPAHHLLLFADSADNNGSDLWSPSSDNDDNSTPSTLSDSFNSFNYQMPRLPAIGMLPGRGGPTCRVGI

SEQ ID NO: 37384 - protein, 515 aa, Arabidopsis thaliana
  peptide (1)..(515): Ceres Seq. ID no. 13497278
  misc_feature (247)..(303): Pfam Name: RNA recognition motif. (a.k.a. RRM, RBD, or RNP domain) Pfam Description: RNA recognition motif. (a.k.a. RRM, RBD, or RNP
  misc_feature (247)..(303): Pfam Name: RNA recognition motif. (a.k.a. RRM, RBD, or RNP domain) Pfam Description: RNA recognition motif. (a.k.a. RRM, RBD, or RNP
  misc_feature (410)..(496): Homolog of NCBI NO: 38230504 NR Description: predicted protein [Populus alba x Populus tremula]
  misc_feature (1)..(122): Homolog of NCBI NO: 38230504 NR Description: predicted protein [Populus alba x Populus tremula]
  misc_feature (151)..(399): Homolog of NCBI NO: 38230504 NR Description: predicted protein [Populus alba x Populus tremula]
  misc_feature (350)..(398): Homolog of NCBI NO: 15229435 NR Description: RNA recognition motif (RRM)-containing protein
  misc_feature (1)..(36): Homolog of NCBI NO: 15229435 NR Description: RNA recognition motif (RRM)-containing protein
  misc_feature (410)..(496): Homolog of NCBI NO: 38230504 NR Description: predicted protein [Populus alba x Populus tremula]
  misc_feature (151)..(399): Homolog of NCBI NO: 38230504 NR Description: predicted protein [Populus alba x Populus tremula]
  misc_feature (1)..(36): Homolog of NCBI NO: 15229435 NR Description: RNA recognition motif (RRM)-containing protein
  misc_feature (1)..(515): Homolog of NCBI NO: 15231090 NR Description: RNA recognition motif (RRM)-containing protein
  misc_feature (1)..(515): Homolog of NCBI NO: 19423979 NR Description: unknown protein [Arabidopsis thaliana]
  misc_feature (1)..(515): Homolog of NCBI NO: 21594547 NR Description: unknown [Arabidopsis thaliana]
  misc_feature (149)..(332): Homolog of NCBI NO: 15229435 NR Description: RNA recognition motif (RRM)-containing protein
  misc_feature (422)..(515): Homolog of NCBI NO: 15229435 NR Description: RNA recognition motif (RRM)-containing protein
  misc_feature (350)..(398): Homolog of NCBI NO: 15229435 NR Description: RNA recognition motif (RRM)-containing protein
  misc_feature (1)..(122): Homolog of NCBI NO: 38230504 NR Description: predicted protein [Populus alba x Populus tremula]
  misc_feature (422)..(515): Homolog of NCBI NO: 15229435 NR Description: RNA recognition motif (RRM)-containing protein
  misc_feature (149)..(332): Homolog of NCBI NO: 15229435 NR Description: RNA recognition motif (RRM)-containing protein
  misc_feature (1)..(515): Homolog of NCBI NO: 21594547 NR Description: unknown [Arabidopsis thaliana]
  misc_feature (1)..(515): Homolog of NCBI NO: 19423979 NR Description: unknown protein [Arabidopsis thaliana]
  misc_feature (1)..(515): Homolog of NCBI NO: 15231090 NR Description: RNA recognition motif (RRM)-containing protein
MGLLLLQDHGEKEMIRLAFGPETLVHSVIVKAKKELGLMNCSRSPWSHQDELISPKNNRGSSLNPASLPFYANGGRSSRDLTNDFELMDDMNSRSTDFLGSVHARSGSCVLDGLGYGGDSDLGFGGVPCSYFARGFCKNGASCRFVHSDGGADLVGSPSRIELLRSNSVPPRLAHHFMTRSSLPSFSTKGVNLQQNDVQRAAAALMIGDELQKLGRWRPERIDLSAMACPASRQIYLTFPADSRFREEDVSNYFSTFGPVQDVRIPYQQKRMFGFVTFVYPETVKSILAKGNPHFVCDSRVLVKPYKEKGKVPDKYRTNQTTERELSPTGLDSSPRDVLGGRGFYNNTQDVLWRSKFEEEILELQSRRLMNLQLLDVKKHFQLNSPTNIHSPNPFSQSLISPRPLSVIKREYDGGEKGKGSSKEGSDDDTMNLPERLEDSLPDSPFASPAHHLLLFADSADNNGSDLWSPSSDNDDNSTPSTLSDSFNSFNYQMPRLPAIGMLPGRGGPTCRVGI

SEQ ID NO: 37385 - protein, 502 aa, Arabidopsis thaliana
  peptide (1)..(502): Ceres Seq. ID no. 13497279
  misc_feature (234)..(290): Pfam Name: RNA recognition motif. (a.k.a. RRM, RBD, or RNP domain) Pfam Description: RNA recognition motif. (a.k.a. RRM, RBD, or RNP
  misc_feature (234)..(290): Pfam Name: RNA recognition motif. (a.k.a. RRM, RBD, or RNP domain) Pfam Description: RNA recognition motif. (a.k.a. RRM, RBD, or RNP
  misc_feature (397)..(483): Homolog of NCBI NO: 38230504 NR Description: predicted protein [Populus alba x Populus tremula]
  misc_feature (1)..(109): Homolog of NCBI NO: 38230504 NR Description: predicted protein [Populus alba x Populus tremula]
  misc_feature (138)..(386): Homolog of NCBI NO: 38230504 NR Description: predicted protein [Populus alba x Populus tremula]
  misc_feature (337)..(385): Homolog of NCBI NO: 15229435 NR Description: RNA recognition motif (RRM)-containing protein
  misc_feature (1)..(23): Homolog of NCBI NO: 15229435 NR Description: RNA recognition motif (RRM)-containing protein
  misc_feature (397)..(483): Homolog of NCBI NO: 38230504 NR Description: predicted protein [Populus alba x Populus tremula]
  misc_feature (138)..(386): Homolog of NCBI NO: 38230504 NR Description: predicted protein [Populus alba x Populus tremula]
  misc_feature (1)..(23): Homolog of NCBI NO: 15229435 NR Description: RNA recognition motif (RRM)-containing protein
  misc_feature (1)..(502): Homolog of NCBI NO: 15231090 NR Description: RNA recognition motif (RRM)-containing protein
  misc_feature (1)..(502): Homolog of NCBI NO: 19423979 NR Description: unknown protein [Arabidopsis thaliana]
  misc_feature (1)..(502): Homolog of NCBI NO: 21594547 NR Description: unknown [Arabidopsis thaliana]
  misc_feature (136)..(319): Homolog of NCBI NO: 15229435 NR Description: RNA recognition motif (RRM)-containing protein
  misc_feature (409)..(502): Homolog of NCBI NO: 15229435 NR Description: RNA recognition motif (RRM)-containing protein
  misc_feature (337)..(385): Homolog of NCBI NO: 15229435 NR Description: RNA recognition motif (RRM)-containing protein
  misc_feature (1)..(109): Homolog of NCBI NO: 38230504 NR Description: predicted protein [Populus alba x Populus tremula]
  misc_feature (409)..(502): Homolog of NCBI NO: 15229435 NR Description: RNA recognition motif (RRM)-containing protein
  misc_feature (136)..(319): Homolog of NCBI NO: 15229435 NR Description: RNA recognition motif (RRM)-containing protein
  misc_feature (1)..(502): Homolog of NCBI NO: 21594547 NR Description: unknown [Arabidopsis thaliana]
  misc_feature (1)..(502): Homolog of NCBI NO: 19423979 NR Description: unknown protein [Arabidopsis thaliana]
  misc_feature (1)..(502): Homolog of NCBI NO: 15231090 NR Description: RNA recognition motif (RRM)-containing protein
MIRLAFGPETLVHSVIVKAKKELGLMNCSRSPWSHQDELISPKNNRGSSLNPASLPFYANGGRSSRDLTNDFELMDDMNSRSTDFLGSVHARSGSCVLDGLGYGGDSDLGFGGVPCSYFARGFCKNGASCRFVHSDGGADLVGSPSRIELLRSNSVPPRLAHHFMTRSSLPSFSTKGVNLQQNDVQRAAAALMIGDELQKLGRWRPERIDLSAMACPASRQIYLTFPADSRFREEDVSNYFSTFGPVQDVRIPYQQKRMFGFVTFVYPETVKSILAKGNPHFVCDSRVLVKPYKEKGKVPDKYRTNQTTERELSPTGLDSSPRDVLGGRGFYNNTQDVLWRSKFEEEILELQSRRLMNLQLLDVKKHFQLNSPTNIHSPNPFSQSLISPRPLSVIKREYDGGEKGKGSSKEGSDDDTMNLPERLEDSLPDSPFASPAHHLLLFADSADNNGSDLWSPSSDNDDNSTPSTLSDSFNSFNYQMPRLPAIGMLPGRGGPTCRVGI

SEQ ID NO: 37386 - DNA, 416 bp, Arabidopsis thaliana
  misc_feature (1)..(416): Ceres Seq. ID no. 12580516
  misc_feature: MA Experiment ID: 108434 Result: Up-regulated in Transcription
  misc_feature: MA Experiment 108434 PARAMETER Experiment Name: At_Root_Tips_cDNA_P Parameter: Tissue Value: Root Tips
  misc_feature: MA Experiment ID: 108561 Result: Down-regulated in Transcription
  misc_feature: MA Experiment 108561 PARAMETER Experiment Name: At_100uM_ABA_cDNA_P Parameter: Timepoint (hr) Value: 6
  misc_feature: MA Experiment 108561 PARAMETER Experiment Name: At_100uM_ABA_cDNA_P Parameter: Tissue Value: Aerial
  misc_feature: MA Experiment 108561 PARAMETER Experiment Name: At_100uM_ABA_cDNA_P Parameter: Treatment Value: 100uM ABA vs. No Treatment
  misc_feature: MA Experiment ID: 108573 Result: Down-regulated in Transcription
  misc_feature: MA Experiment 108573 PARAMETER Experiment Name: At_Drought_cDNA_P Parameter: Timepoint (hr) Value: 6
  misc_feature: MA Experiment 108573 PARAMETER Experiment Name: At_Drought_cDNA_P Parameter: Tissue Value: Aerial
  misc_feature: MA Experiment 108573 PARAMETER Experiment Name: At_Drought_cDNA_P Parameter: Treatment Value: Drought vs. No Drought
  misc_feature: MA Experiment ID: 20000071 Result: Down-regulated in Transcription
  misc_feature: MA Experiment 20000071 PARAMETER Experiment Name: At_100uM_ABA_Mutants_cDNA_P Parameter: Plant Line Value: CS8104
  misc_feature: MA Experiment 20000071 PARAMETER Experiment Name: At_100uM_ABA_Mutants_cDNA_P Parameter: Timepoint (hr) Value: 6
  misc_feature: MA Experiment 20000071 PARAMETER Experiment Name: At_100uM_ABA_Mutants_cDNA_P Parameter: Tissue Value: Aerial
  misc_feature: MA Experiment 20000071 PARAMETER Experiment Name: At_100uM_ABA_Mutants_cDNA_P Parameter: Treatment Value: 100uM ABA vs. No Treatment
gctcattagggtttctcatctacgacggcgtggtgttcctccttcctgctctgaaaaatggcgaagagaacgaagaaggttggaatcgtcggcaaatacggaacacgttatggtgcgagtatcaggaagcagattaagaagatggaggtcagccagcacagcaagtacttctgtgagttctgtggcaagtacggagtgaagcgaaaggctgttggtatctggggttgcaaggattgtggcaaggtcaaggcaggtggtgcttacacaatgaacaccgccagtgcggtcactgttagaagcacgatcagaaggttgagggagcagatcgagggttaaaagtctgctggctttttatatttggtttccttgttttgacaatttaagttttgcatcaacagtgagaacatgttttgatt

SEQ ID NO: 37387 - protein, 92 aa, Arabidopsis thaliana [sequence omitted]

SEQ ID NO: 37388 - protein, 65 aa, Arabidopsis thaliana; identical to SEQ ID NO: 30081
  peptide (1)..(65): Ceres Seq. ID no. 12580518

SEQ ID NO: 37389 - protein, 64 aa, Arabidopsis thaliana; identical to SEQ ID NO: 30082
  peptide (1)..(64): Ceres Seq. ID no. 12580519
  misc_feature (1)..(61): Homolog of NCBI NO: 33637090 NR Description: N1 [Toxoplasma gondii]
  misc_feature (1)..(60): Homolog of NCBI NO: 7441206 NR Description: ribosomal protein L37a
  misc_feature (1)..(63): Homolog of NCBI NO: 6093889 NR Description: 60S RIBOSOMAL PROTEIN L37A
  misc_feature (1)..(64): Homolog of NCBI NO: 11358898 NR Description: translation initiation factor eIF-4 gamma homolog
  misc_feature (1)..(63): Homolog of NCBI NO: 15228411 NR Description: putative 60S ribosomal protein L37a; protein id:
  misc_feature (1)..(63): Homolog of NCBI NO: 6831602 NR Description: 60S RIBOSOMAL PROTEIN L37A
  misc_feature (1)..(64): Homolog of NCBI NO: 6831607 NR Description: 60S ribosomal protein L37a
  misc_feature (1)..(63): Homolog of NCBI NO: 34911166 NR Description: putative 60S ribosomal protein L37a
  misc_feature (1)..(64): Homolog of NCBI NO: 1173045 NR Description: 60S RIBOSOMAL PROTEIN L37A
  misc_feature (1)..(64): Homolog of NCBI NO: 18411538 NR Description: Expressed protein

SEQ ID NO: 37390 - DNA, 1290 bp, Arabidopsis thaliana
  misc_feature (1)..(1290): Ceres Seq. ID no. 12393914
  misc_feature: MA Experiment ID: 108434 Result: Up-regulated in Transcription
  misc_feature: MA Experiment 108434 PARAMETER Experiment Name: At_Root_Tips_cDNA_P Parameter: Tissue Value: Root Tips
  misc_feature: MA Experiment ID: 108569 Result: Up-regulated in Transcription
  misc_feature: MA Experiment 108569 PARAMETER Experiment Name: At_0.001%_MeJA__cDNA_P Parameter: Timepoint (hr) Value: 6
  misc_feature: MA Experiment 108569 PARAMETER Experiment Name: At_0.001%_MeJA__cDNA_P Parameter: Tissue Value: Aerial
  misc_feature: MA Experiment 108569 PARAMETER Experiment Name: At_0.001%_MeJA__cDNA_P Parameter: Treatment Value: 0.001% MeJA vs. No Treatment
  misc_feature: MA Experiment ID: 108573 Result: Up-regulated in Transcription
  misc_feature: MA Experiment 108573 PARAMETER Experiment Name: At_Drought_cDNA_P Parameter: Timepoint (hr) Value: 6
  misc_feature: MA Experiment 108573 PARAMETER Experiment Name: At_Drought_cDNA_P Parameter: Tissue Value: Aerial
  misc_feature: MA Experiment 108573 PARAMETER Experiment Name: At_Drought_cDNA_P Parameter: Treatment Value: Drought vs. No Drought
  misc_feature: MA Experiment ID: 108577 Result: Up-regulated in Transcription
  misc_feature: MA Experiment 108577 PARAMETER Experiment Name: At_42deg_Heat_cDNA_P Parameter: Temperature (deg C) Value: 42 vs. 22
  misc_feature: MA Experiment 108577 PARAMETER Experiment Name: At_42deg_Heat_cDNA_P Parameter: Timepoint (hr) Value: 6
  misc_feature: MA Experiment 108577 PARAMETER Experiment Name: At_42deg_Heat_cDNA_P Parameter: Tissue Value: Aerial
  misc_feature: MA Experiment ID: 108594 Result: Down-regulated in Transcription
  misc_feature: MA Experiment 108594 PARAMETER Experiment Name: At_Ler-rhl_Root_cDNA_P Parameter: Plant Line Value: null
  misc_feature: MA Experiment ID: 20000087 Result: Down-regulated in Transcription
  misc_feature: MA Experiment 20000087 PARAMETER Experiment Name: At_100uM_ABA_Mutants_cDNA_P Parameter: Plant Line Value: WS
  misc_feature: MA Experiment 20000087 PARAMETER Experiment Name: At_100uM_ABA_Mutants_cDNA_P Parameter: Timepoint (hr) Value: 6
  misc_feature: MA Experiment 20000087 PARAMETER Experiment Name: At_100uM_ABA_Mutants_cDNA_P Parameter: Tissue Value: Aerial
  misc_feature: MA Experiment 20000087 PARAMETER Experiment Name: At_100uM_ABA_Mutants_cDNA_P Parameter: Treatment Value: 100uM ABA vs. No Treatment
  misc_feature: MA Experiment ID: 20000111 Result: Up-regulated in Transcription
  misc_feature: MA Experiment 20000111 PARAMETER Experiment Name: At_42deg_Heat_cDNA_P Parameter: Temperature (deg C) Value: 42 vs. 22
  misc_feature: MA Experiment 20000111 PARAMETER Experiment Name: At_42deg_Heat_cDNA_P Parameter: Timepoint (hr) Value: 6
  misc_feature: MA Experiment 20000111 PARAMETER Experiment Name: At_42deg_Heat_cDNA_P Parameter: Tissue Value: Aerial
  misc_feature: MA Experiment ID: 20000112 Result: Up-regulated in Transcription
  misc_feature: MA Experiment 20000112 PARAMETER Experiment Name: At_42deg_Heat_cDNA_P Parameter: Temperature (deg C) Value: 42 vs. 22
  misc_feature: MA Experiment 20000112 PARAMETER Experiment Name: At_42deg_Heat_cDNA_P Parameter: Timepoint (hr) Value: 2
  misc_feature: MA Experiment 20000112 PARAMETER Experiment Name: At_42deg_Heat_cDNA_P Parameter: Tissue Value: Aerial
  misc_feature: MA Experiment ID: 20000144 Result: Up-regulated in Transcription
  misc_feature: MA Experiment 20000144 PARAMETER Experiment Name: At_42deg_Heat_cDNA_P Parameter: Temperature (deg C) Value: 42 vs. 22
  misc_feature: MA Experiment 20000144 PARAMETER Experiment Name: At_42deg_Heat_cDNA_P Parameter: Timepoint (hr) Value: 1
  misc_feature: MA Experiment 20000144 PARAMETER Experiment Name: At_42deg_Heat_cDNA_P Parameter: Tissue Value: Aerial
atccgcatccgctgcctccgcctctcgagtctcgtccacccgtcgtcctcctagctcctctactcgccagtcgccatgggcaagattaagatcggaatcaacggcttcggaaggatcggcaggctcgtggccagggtcgccctccagagcgaggatgtcgagctcgtcgccgtcaacgaccccttcatcaccacggactacatgacctacatgttcaagtacgacaccgtccacggccactggaagcacagcgacatcacactcaagaactccaagacccttctcttcggtgacaagccggtcaccgtctttggcatcaggaaccctgaggaaatcccgtggggtgaggctggcgctgagtacgtcgtggagtccaccggcgtcttcactgacaaggacaaggctgctcacatctcaagggtggtgccaagaaggttgttatctctgccccaagcaaagacgcacccatgtttgttgttggtgtcaatgaggacaagtacacctcggatgttaacattgtttccaatgctagctgcaccacaaactgccttgctccccttgctaaggtcattcatgacaacttcggcattgttgagggtttgatgacaactgttcatgccatcactgccacccagaaaactgttgacggaccctcagccaaggactggagaggtggcagggctgccagctttaacatcattcctagcagcaccggtgctgccaaggctgttggtaaagttcttcctgatctgaatggcaagctcactggtatgtccttccgtgttcctactgtggatgtctcggttgttgacctcaccgtcagaatcgagaagggggcctcctatgaggatatcaagaaagctattaaggctgcttccgagggtccactcaagggtatcatgggttatgcggaggaggatctggtttctaccgacttccttggtgacagcaggtcgagcatcttcgacgccaaggccgggatcgctctgaacgaccacttcgtcaagctcgtctcgtggtacgacaacgagtggggctacagcaaccgcgtcgtcgacctgatccgccacatgttcaagacccagtagaggggttttttccccctgcttctcatggatggttgctgcttgtgtatgccgagaataaatgtggatggcgcgtgcctctgggtcgccaggttcatgctgagtctggacatgttttgcacttttgcttcccttcctgctaccatctgtgacagaaccgctcgctaatatgggacctgagattagctttttgctgcttgtggtg

SEQ ID NO: 37391 - protein, 206 aa, Arabidopsis thaliana
  peptide (1)..(206): Ceres Seq. ID no. 12393915
  misc_feature (24)..(185): Pfam Name: Glyceraldehyde 3-phosphate dehydrogenase, Pfam Description: Glyceraldehyde 3-phosphate dehydrogenase,
  misc_feature (1)..(206): Homolog of NCBI NO: 18076094 NR Description: glyceraldehyde-3-phosphate dehydrogenase
  misc_feature (1)..(206): Homolog of NCBI NO: 120669 NR Description: Glyceraldehyde 3-phosphate dehydrogenase,
  misc_feature (1)..(205): Homolog of NCBI NO: 7431535 NR Description: glyceraldehyde-3-phosphate dehydrogenase
  misc_feature (1)..(206): Homolog of NCBI NO: 6166167 NR Description: Glyceraldehyde 3-phosphate dehydrogenase,
  misc_feature (1)..(206): Homolog of NCBI NO: 29150193 NR Description: putative glyceraldehydes 3-phosphate
  misc_feature (1)..(206): Homolog of NCBI NO: 3023816 NR Description: Glyceraldehyde 3-phosphate dehydrogenase,
  misc_feature (1)..(206): Homolog of NCBI NO: 120680 NR Description: Glyceraldehyde 3-phosphate dehydrogenase,
  misc_feature (1)..(206): Homolog of NCBI NO: 6016075 NR Description: Glyceraldehyde 3-phosphate dehydrogenase,
  misc_feature (1)..(206): Homolog of NCBI NO: 66009 NR Description: glyceraldehyde-3-phosphate dehydrogenase
  misc_feature (1)..(206): Homolog of NCBI NO: 120670 NR Description: Glyceraldehyde 3-phosphate dehydrogenase,
MFVVGVNEDKYTSDVNIVSNASCTTNCLAPLAKVIHDNFGIVEGLMTTVHAITATQKTVDGPSAKDWRGGRAASFNIIPSSTGAAKAVGKVLPDLNGKLTGMSFRVPTVDVSVVDLTVRIEKGASYEDIKKAIKAASEGPLKGIMGYAEEDLVSTDFLGDSRSSIFDAKAGIALNDHFVKLVSWYDNEWGYSNRVVDLIRHMFKTQ

SEQ ID NO: 37392 - protein, 175 aa, Arabidopsis thaliana
  peptide (1)..(175): Ceres Seq. ID no. 12393916
  misc_feature (3)..(135): Homolog of NCBI NO: 120669 NR Description: Glyceraldehyde 3-phosphate dehydrogenase,
  misc_feature (1)..(135): Homolog of NCBI NO: 7431535 NR Description: glyceraldehyde-3-phosphate dehydrogenase
  misc_feature (1)..(135): Homolog of NCBI NO: 6166167 NR Description: Glyceraldehyde 3-phosphate dehydrogenase,
  misc_feature (1)..(47): Homolog of NCBI NO: 29150193 NR Description: putative glyceraldehydes 3-phosphate
  misc_feature (43)..(135): Homolog of NCBI NO: 29150193 NR Description: putative glyceraldehydes 3-phosphate
  misc_feature (1)..(131): Homolog of NCBI NO: 3023816 NR Description: Glyceraldehyde 3-phosphate dehydrogenase,
  misc_feature (1)..(135): Homolog of NCBI NO: 120680 NR Description: Glyceraldehyde 3-phosphate dehydrogenase,
  misc_feature (1)..(135): Homolog of NCBI NO: 6016075 NR Description: Glyceraldehyde 3-phosphate dehydrogenase,
  misc_feature (1)..(135): Homolog of NCBI NO: 66009 NR Description: glyceraldehyde-3-phosphate dehydrogenase
  misc_feature (1)..(135): Homolog of NCBI NO: 120670 NR Description: Glyceraldehyde 3-phosphate dehydrogenase,
MGKIKIGINGFGRIGRLVARVALQSEDVELVAVNDPFITTDYMTYMFKYDTVHGHWKHSDITLKNSKTLLFGDKPVTVFGIRNPEEIPWGEAGAEYVVESTGVFTDKDKAAHISRVVPRRLLSLPQAKTHPCLLLVSMRTSTPRMLTLFPMLAAPQTALLPLLRSFMTTSALLRV

SEQ ID NO: 37393 - protein, 161 aa, Arabidopsis thaliana
  peptide (1)..(161): Ceres Seq. ID no. 12393917
  misc_feature (1)..(140): Pfam Name: Glyceraldehyde 3-phosphate dehydrogenase, Pfam Description: Glyceraldehyde 3-phosphate dehydrogenase,
  misc_feature (1)..(161): Homolog of NCBI NO: 18076094 NR Description: glyceraldehyde-3-phosphate dehydrogenase
  misc_feature (1)..(161): Homolog of NCBI NO: 120669 NR Description: Glyceraldehyde 3-phosphate dehydrogenase,
  misc_feature (1)..(160): Homolog of NCBI NO: 7431535 NR Description: glyceraldehyde-3-phosphate dehydrogenase
  misc_feature (1)..(161): Homolog of NCBI NO: 6166167 NR Description: Glyceraldehyde 3-phosphate dehydrogenase,
  misc_feature (1)..(161): Homolog of NCBI NO: 29150193 NR Description: putative glyceraldehydes 3-phosphate
  misc_feature (1)..(161): Homolog of NCBI NO: 3023816 NR Description: Glyceraldehyde 3-phosphate dehydrogenase,
  misc_feature (1)..(161): Homolog of NCBI NO: 120680 NR Description: Glyceraldehyde 3-phosphate dehydrogenase,
  misc_feature (1)..(161): Homolog of NCBI NO: 6016075 NR Description: Glyceraldehyde 3-phosphate dehydrogenase,
  misc_feature (1)..(161): Homolog of NCBI NO: 66009 NR Description: glyceraldehyde-3-phosphate dehydrogenase
  misc_feature (1)..(161): Homolog of NCBI NO: 120670 NR Description: Glyceraldehyde 3-phosphate dehydrogenase,
MTTVHAITATQKTVDGPSAKDWRGGRAASFNIIPSSTGAAKAVGKVLPDLNGKLTGMSFRVPTVDVSVVDLTVRIEKGASYEDIKKAIKAASEGPLKGIMGYAEEDLVSTDFLGDSRSSIFDAKAGIALNDHFVKLVSWYDNEWGYSNRVVDLIRHMFKTQ

SEQ ID NO: 37394 - DNA, 1271 bp, Arabidopsis thaliana
  misc_feature (1)..(1271): Ceres Seq. ID no. 13496930
  misc_feature: MA Experiment ID: 108435 Result: Down-regulated in Transcription
  misc_feature: MA Experiment 108435 PARAMETER Experiment Name: At_stm_Mutants_cDNA_P Parameter: Plant Line Value: wt Landsburg vs stm
  misc_feature: MA Experiment 108435 PARAMETER Experiment Name: At_stm_Mutants_cDNA_P Parameter: Tissue Value: Shoot Apical Meristem Region
  misc_feature: MA Experiment ID: 108461 Result: Up-regulated in Transcription
  misc_feature: MA Experiment 108461 PARAMETER Experiment Name: At_Germinating_Seeds_cDNA_P Parameter: Age (day) Value: 1 vs. 0
  misc_feature: MA Experiment 108461 PARAMETER Experiment Name: At_Germinating_Seeds_cDNA_P Parameter: Tissue Value: Germinating Seeds
  misc_feature: MA Experiment ID: 108462 Result: Up-regulated in Transcription
  misc_feature: MA Experiment 108462 PARAMETER Experiment Name: At_Germinating_Seeds_cDNA_P Parameter: Age (day) Value: 2 vs. 0
  misc_feature: MA Experiment 108462 PARAMETER Experiment Name: At_Germinating_Seeds_cDNA_P Parameter: Tissue Value: Germinating Seeds
  misc_feature: MA Experiment ID: 108463 Result: Up-regulated in Transcription
  misc_feature: MA Experiment 108463 PARAMETER Experiment Name: At_Germinating_Seeds_cDNA_P Parameter: Age (day) Value: 3 vs. 0
  misc_feature: MA Experiment 108463 PARAMETER Experiment Name: At_Germinating_Seeds_cDNA_P Parameter: Tissue Value: Germinating Seeds
  misc_feature: MA Experiment ID: 108464 Result: Up-regulated in Transcription
  misc_feature: MA Experiment 108464 PARAMETER Experiment Name: At_Germinating_Seeds_cDNA_P Parameter: Age (day) Value: 4 vs. 0
  misc_feature: MA Experiment 108464 PARAMETER Experiment Name: At_Germinating_Seeds_cDNA_P Parameter: Tissue Value: Germinating Seeds
  misc_feature: MA Experiment ID: 108488 Result: Up-regulated in Transcription
  misc_feature: MA Experiment ID: 108595 Result: Down-regulated in Transcription
  misc_feature: MA Experiment 108595 PARAMETER Experiment Name: At_Ler-pi_Ovule_cDNA_P Parameter: Plant Line Value: null
  misc_feature: MA Experiment ID: 20000069 Result: Down-regulated in Transcription
  misc_feature: MA Experiment 20000069 PARAMETER Experiment Name: At_100uM_ABA_Mutants_cDNA_P Parameter: Plant Line Value: CS23
  misc_feature: MA Experiment 20000069 PARAMETER Experiment Name: At_100uM_ABA_Mutants_cDNA_P Parameter: Timepoint (hr) Value: 6
  misc_feature: MA Experiment 20000069 PARAMETER Experiment Name: At_100uM_ABA_Mutants_cDNA_P Parameter: Tissue Value: Aerial
  misc_feature: MA Experiment 20000069 PARAMETER Experiment Name: At_100uM_ABA_Mutants_cDNA_P Parameter: Treatment Value: 100uM ABA vs. No Treatment
  misc_feature: MA Experiment ID: 20000070 Result: Down-regulated in Transcription
  misc_feature: MA Experiment 20000070 PARAMETER Experiment Name: At_100uM_ABA_Mutants_cDNA_P Parameter: Plant Line Value: CS24
  misc_feature: MA Experiment 20000070 PARAMETER Experiment Name: At_100uM_ABA_Mutants_cDNA_P Parameter: Timepoint (hr) Value: 6
  misc_feature: MA Experiment 20000070 PARAMETER Experiment Name: At_100uM_ABA_Mutants_cDNA_P Parameter: Tissue Value: Aerial
  misc_feature: MA Experiment 20000070 PARAMETER Experiment Name: At_100uM_ABA_Mutants_cDNA_P Parameter: Treatment Value: 100uM ABA vs. No Treatment
  misc_feature: MA Experiment ID: 20000071 Result: Down-regulated in Transcription
  misc_feature: MA Experiment 20000071 PARAMETER Experiment Name: At_100uM_ABA_Mutants_cDNA_P Parameter: Plant Line Value: CS8104
  misc_feature: MA Experiment 20000071 PARAMETER Experiment Name: At_100uM_ABA_Mutants_cDNA_P Parameter: Timepoint (hr) Value: 6
  misc_feature: MA Experiment 20000071 PARAMETER Experiment Name: At_100uM_ABA_Mutants_cDNA_P Parameter: Tissue Value: Aerial
  misc_feature: MA Experiment 20000071 PARAMETER Experiment Name: At_100uM_ABA_Mutants_cDNA_P Parameter: Treatment Value: 100uM ABA vs. No Treatment
  misc_feature: MA Experiment ID: 20000072 Result: Down-regulated in Transcription
  misc_feature: MA Experiment 20000072 PARAMETER Experiment Name: At_100uM_ABA_Mutants_cDNA_P Parameter: Plant Line Value: CS8105
  misc_feature: MA Experiment 20000072 PARAMETER Experiment Name: At_100uM_ABA_Mutants_cDNA_P Parameter: Timepoint (hr) Value: 6
  misc_feature: MA Experiment 20000072 PARAMETER Experiment Name: At_100uM_ABA_Mutants_cDNA_P Parameter: Tissue Value: Aerial
  misc_feature: MA Experiment 20000072 PARAMETER Experiment Name: At_100uM_ABA_Mutants_cDNA_P Parameter: Treatment Value: 100uM ABA vs. No Treatment
  misc_feature: MA Experiment ID: 20000086 Result: Down-regulated in Transcription
  misc_feature: MA Experiment 20000086 PARAMETER Experiment Name: At_100uM_ABA_Mutants_cDNA_P Parameter: Plant Line Value: CS22
  misc_feature: MA Experiment 20000086 PARAMETER Experiment Name: At_100uM_ABA_Mutants_cDNA_P Parameter: Timepoint (hr) Value: 6
  misc_feature: MA Experiment 20000086 PARAMETER Experiment Name: At_100uM_ABA_Mutants_cDNA_P Parameter: Tissue Value: Aerial
  misc_feature: MA Experiment 20000086 PARAMETER Experiment Name: At_100uM_ABA_Mutants_cDNA_P Parameter: Treatment Value: 100uM ABA vs. No Treatment
  misc_feature: MA Experiment ID: 20000087 Result: Down-regulated in Transcription
  misc_feature: MA Experiment 20000087 PARAMETER Experiment Name: At_100uM_ABA_Mutants_cDNA_P Parameter: Plant Line Value: WS
  misc_feature: MA Experiment 20000087 PARAMETER Experiment Name: At_100uM_ABA_Mutants_cDNA_P Parameter: Timepoint (hr) Value: 6
  misc_feature: MA Experiment 20000087 PARAMETER Experiment Name: At_100uM_ABA_Mutants_cDNA_P Parameter: Tissue Value: Aerial
  misc_feature: MA Experiment 20000087 PARAMETER Experiment Name: At_100uM_ABA_Mutants_cDNA_P Parameter: Treatment Value: 100uM ABA vs. No Treatment
  misc_feature: MA Experiment ID: 20000088 Result: Down-regulated in Transcription
  misc_feature: MA Experiment 20000088 PARAMETER Experiment Name: At_100uM_ABA_Mutants_cDNA_P Parameter: Plant Line Value: Landsberg
  misc_feature: MA Experiment 20000088 PARAMETER Experiment Name: At_100uM_ABA_Mutants_cDNA_P Parameter: Timepoint (hr) Value: 6
  misc_feature: MA Experiment 20000088 PARAMETER Experiment Name: At_100uM_ABA_Mutants_cDNA_P Parameter: Tissue Value: Aerial
  misc_feature: MA Experiment 20000088 PARAMETER Experiment Name: At_100uM_ABA_Mutants_cDNA_P Parameter: Treatment Value: 100uM ABA vs. No Treatment
  misc_feature: MA Experiment ID: 20000089 Result: Down-regulated in Transcription
  misc_feature: MA Experiment ID: 20000090 Result: Down-regulated in Transcription
  misc_feature: MA Experiment ID: 20000117 Result: Down-regulated in Transcription
  misc_feature: MA Experiment 20000117 PARAMETER Experiment Name: At_100uM_ABA_Mutants_cDNA_P Parameter: Plant Line Value: Columbia
  misc_feature: MA Experiment 20000117 PARAMETER Experiment Name: At_100uM_ABA_Mutants_cDNA_P Parameter: Timepoint (hr) Value: 6
  misc_feature: MA Experiment 20000117 PARAMETER Experiment Name: At_100uM_ABA_Mutants_cDNA_P Parameter: Tissue Value: Aerial
  misc_feature: MA Experiment 20000117 PARAMETER Experiment Name: At_100uM_ABA_Mutants_cDNA_P Parameter: Treatment Value: 100uM ABA vs. No Treatment
  misc_feature: MA Experiment ID: 20000180 Result: Up-regulated in Transcription
  misc_feature: MA Experiment 20000180 PARAMETER Experiment Name: At_Germinating_Seeds_P Parameter: Age (hr) Value: 24 vs. 0
  misc_feature: MA Experiment 20000180 PARAMETER Experiment Name: At_Germinating_Seeds_P Parameter: Tissue Value: Germinating Seeds
  misc_feature: MA Experiment ID: 20000185 Result: Down-regulated in Transcription
  misc_feature: MA Experiment 20000185 PARAMETER Experiment Name: At_Roots__P Parameter: Age (day) Value: 7 vs. 21
  misc_feature: MA Experiment 20000185 PARAMETER Experiment Name: At_Roots__P Parameter: Organism Value: A. thaliana
  misc_feature: MA Experiment 20000185 PARAMETER Experiment Name: At_Roots__P Parameter: Tissue Value: Roots vs. Whole Plant
  misc_feature: MA Experiment ID: 20000234 Result: Down-regulated in Transcription
  misc_feature: MA Experiment 20000234 PARAMETER Experiment Name: At_Siliques_P Parameter: Age (day) Value: 21
  misc_feature: MA Experiment 20000234 PARAMETER Experiment Name: At_Siliques_P Parameter: Organism Value: A. thaliana
  misc_feature: MA Experiment 20000234 PARAMETER Experiment Name: At_Siliques_P Parameter: Plant Line Value: WS
  misc_feature: MA Experiment 20000234 PARAMETER Experiment Name: At_Siliques_P Parameter: Tissue Value: Less Than 5mm Siliques vs. Whole Plant
  misc_feature: MA Experiment ID: 20000264 Result: Down-regulated in Transcription
  misc_feature: MA Experiment 20000264 PARAMETER Experiment Name: At_Open_Flower_P Parameter: Age (day) Value: 21
  misc_feature: MA Experiment 20000264 PARAMETER Experiment Name: At_Open_Flower_P Parameter: Plant Line Value: WS
  misc_feature: MA Experiment 20000264 PARAMETER Experiment Name: At_Open_Flower_P Parameter: Tissue Value: Open Flower vs. Whole Plant
  misc_feature: MA Experiment ID: 20000438 Result: Up-regulated in Transcription
  misc_feature: MA Experiment 20000438 PARAMETER Experiment Name: At_Shoots__P Parameter: Age (day) Value: 14
  misc_feature: MA Experiment 20000438 PARAMETER Experiment Name: At_Shoots__P Parameter: Tissue Value: Shoots vs. Whole Plant
  misc_feature: MA Experiment ID: 20000439 Result: Down-regulated in Transcription
  misc_feature: MA Experiment 20000439 PARAMETER Experiment Name: At_Roots__P Parameter: Age (day) Value: 14 vs. 21
  misc_feature: MA Experiment 20000439 PARAMETER Experiment Name: At_Roots__P Parameter: Organism Value: A. thaliana
  misc_feature: MA Experiment 20000439 PARAMETER Experiment Name: At_Roots__P Parameter: Tissue Value: Roots vs. Whole Plant
  misc_feature: MA Experiment ID: 20000495 Result: Down-regulated in Transcription
  misc_feature: MA Experiment 20000495 PARAMETER Experiment Name: At_Guard_Cells_P Parameter: Harvest Date Value: 8/2/2002
  misc_feature: MA Experiment 20000495 PARAMETER Experiment Name: At_Guard_Cells_P Parameter: Organism Value: A. thaliana
  misc_feature: MA Experiment 20000495 PARAMETER Experiment Name: At_Guard_Cells_P Parameter: Tissue Value: Guard Cells vs. Leaves
  misc_feature: MA Experiment ID: 20000496 Result: Down-regulated in Transcription
  misc_feature: MA Experiment 20000496 PARAMETER Experiment Name: At_Guard_Cells_P Parameter: Harvest Date Value: 7/19/2002
  misc_feature: MA Experiment 20000496 PARAMETER Experiment Name: At_Guard_Cells_P Parameter: Organism Value: Canola
  misc_feature: MA Experiment 20000496 PARAMETER Experiment Name: At_Guard_Cells_P Parameter: Tissue Value: Guard Cells vs. Leaves
  misc_feature: MA Experiment ID: 20000794 Result: Down-regulated in Transcription
  misc_feature: MA Experiment 20000794 PARAMETER Experiment Name: At_Petals_P Parameter: Age (day) Value: 23-25 days
  misc_feature: MA Experiment 20000794 PARAMETER Experiment Name: At_Petals_P Parameter: Plant Line Value: WS
  misc_feature: MA Experiment 20000794 PARAMETER Experiment Name: At_Petals_P Parameter: Tissue Value: Petals vs. Whole plant
  misc_feature: MA Experiment ID: 20001451 Result: Down-regulated in Transcription
  misc_feature: MA Experiment 20001451 PARAMETER Experiment Name: At_Far-red-induction_P Parameter: Age (day) Value: 7
  misc_feature: MA Experiment 20001451 PARAMETER Experiment Name: At_Far-red-induction_P Parameter: Light Value: Far-red vs. White
  misc_feature: MA Experiment 20001451 PARAMETER Experiment Name: At_Far-red-induction_P Parameter: Organism Value: A. thaliana
  misc_feature: MA Experiment 20001451 PARAMETER Experiment Name: At_Far-red-induction_P Parameter: Plant Line Value: Columbia
  misc_feature: MA Experiment 20001451 PARAMETER Experiment Name: At_Far-red-induction_P Parameter: Timepoint (hr) Value: 24
  misc_feature: MA Experiment 20001451 PARAMETER Experiment Name: At_Far-red-induction_P Parameter: Tissue Value: Whole Plant
  misc_feature: MA Experiment ID: 20001557 Result: Down-regulated in Transcription
  misc_feature: MA Experiment 20001557 PARAMETER Experiment Name: At_Drought_Soil_Dry_P Parameter: Age (day) Value: 27
  misc_feature: MA Experiment 20001557 PARAMETER Experiment Name: At_Drought_Soil_Dry_P Parameter: Organism Value: A. thaliana
  misc_feature: MA Experiment 20001557 PARAMETER Experiment Name: At_Drought_Soil_Dry_P Parameter: Plant Line Value: WS
  misc_feature: MA Experiment 20001557 PARAMETER Experiment Name: At_Drought_Soil_Dry_P Parameter: Post Timepoint (hr) Value: 3
  misc_feature: MA Experiment 20001557 PARAMETER Experiment Name: At_Drought_Soil_Dry_P Parameter: Post-Treatment Value: Re-Water vs. No Drought
  misc_feature: MA Experiment 20001557 PARAMETER Experiment Name: At_Drought_Soil_Dry_P Parameter: Timepoint (day) Value: 13
  misc_feature: MA Experiment 20001557 PARAMETER Experiment Name: At_Drought_Soil_Dry_P Parameter: Treatment Value: Drought vs. No Drought
  misc_feature: MA Experiment ID: 20001558 Result: Down-regulated in Transcription
  misc_feature: MA Experiment 20001558 PARAMETER Experiment Name: At_Drought_Soil_Dry_P Parameter: Age (day) Value: 27
  misc_feature: MA Experiment 20001558 PARAMETER Experiment Name: At_Drought_Soil_Dry_P Parameter: Organism Value: A. thaliana
  misc_feature: MA Experiment 20001558 PARAMETER Experiment Name: At_Drought_Soil_Dry_P Parameter: Plant Line Value: WS
  misc_feature: MA Experiment 20001558 PARAMETER Experiment Name: At_Drought_Soil_Dry_P Parameter: Post Timepoint (hr) Value: 6
  misc_feature: MA Experiment 20001558 PARAMETER Experiment Name: At_Drought_Soil_Dry_P Parameter: Post-Treatment Value: Re-Water vs. No Drought
  misc_feature: MA Experiment 20001558 PARAMETER Experiment Name: At_Drought_Soil_Dry_P Parameter: Timepoint (day) Value: 13
  misc_feature: MA Experiment 20001558 PARAMETER Experiment Name: At_Drought_Soil_Dry_P Parameter: Treatment Value: Drought vs. No Drought
  misc_feature: MA Experiment ID: 20001560 Result: Down-regulated in Transcription
  misc_feature: MA Experiment 20001560 PARAMETER Experiment Name: At_Drought_Soil_Dry_P Parameter: Age (day) Value: 28
  misc_feature: MA Experiment 20001560 PARAMETER Experiment Name: At_Drought_Soil_Dry_P Parameter: Organism Value: A. thaliana
  misc_feature: MA Experiment 20001560 PARAMETER Experiment Name: At_Drought_Soil_Dry_P Parameter: Plant Line Value: WS
  misc_feature: MA Experiment 20001560 PARAMETER Experiment Name: At_Drought_Soil_Dry_P Parameter: Post Timepoint (hr) Value: None
  misc_feature: MA Experiment 20001560 PARAMETER Experiment Name: At_Drought_Soil_Dry_P Parameter: Post-Treatment Value: None
  misc_feature: MA Experiment 20001560 PARAMETER Experiment Name: At_Drought_Soil_Dry_P Parameter: Timepoint (day) Value: 14
  misc_feature: MA Experiment 20001560 PARAMETER Experiment Name: At_Drought_Soil_Dry_P Parameter: Treatment Value: Drought vs. No Drought
  misc_feature: MA Experiment ID: 20001757 Result: Up-regulated in Transcription
  misc_feature: MA Experiment 20001757 PARAMETER Experiment Name: At_50mM_NH4NO3_L-to-H_P Parameter: Timepoint (hr) Value: 6
  misc_feature: MA Experiment 20001757 PARAMETER Experiment Name: At_50mM_NH4NO3_L-to-H_P Parameter: Tissue Value: Leaf
  misc_feature: MA Experiment 20001757 PARAMETER Experiment Name: At_50mM_NH4NO3_L-to-H_P Parameter: Treatment Value: 50mM NH4NO3 vs 100mM Mannitol
  misc_feature: MA Experiment ID: 20001904 Result: Down-regulated in Transcription
  misc_feature: MA Experiment 20001904 PARAMETER Experiment Name: At_Drought_Reproduction_P Parameter: Age (day) Value: 37
  misc_feature: MA Experiment 20001904 PARAMETER Experiment Name: At_Drought_Reproduction_P Parameter: Organism Value: A. thaliana
  misc_feature: MA Experiment 20001904 PARAMETER Experiment Name: At_Drought_Reproduction_P Parameter: Plant Line Value: WS
  misc_feature: MA Experiment 20001904 PARAMETER Experiment Name: At_Drought_Reproduction_P Parameter: Timepoint (day) Value: 7
  misc_feature: MA Experiment 20001904 PARAMETER Experiment Name: At_Drought_Reproduction_P Parameter: Tissue Value: Rosettes
  misc_feature: MA Experiment 20001904 PARAMETER Experiment Name: At_Drought_Reproduction_P Parameter: Treatment Value: Drought vs. No Drought
  misc_feature: MA Experiment ID: 20001905 Result: Down-regulated in Transcription
  misc_feature: MA Experiment 20001905 PARAMETER Experiment Name: At_Drought_Reproduction_P Parameter: Age (day) Value: 40
  misc_feature: MA Experiment 20001905 PARAMETER Experiment Name: At_Drought_Reproduction_P Parameter: Organism Value: A. thaliana
  misc_feature: MA Experiment 20001905 PARAMETER Experiment Name: At_Drought_Reproduction_P Parameter: Plant Line Value: WS
  misc_feature: MA Experiment 20001905 PARAMETER Experiment Name: At_Drought_Reproduction_P Parameter: Timepoint (day) Value: 10
  misc_feature: MA Experiment 20001905 PARAMETER Experiment Name: At_Drought_Reproduction_P Parameter: Tissue Value: Rosettes
  misc_feature: MA Experiment 20001905 PARAMETER Experiment Name: At_Drought_Reproduction_P Parameter: Treatment Value: Drought vs. No Drought
aaaaaaactcttaaacagcttcctaacgagaggaaactgaggaacacaacaatggagtttcgtggagatgccaaccagaggattgctaggatttcagctcatctcactcctcagatggaggccaagaactctgtaatcggacgggaaaactgcagagctaaaggtggtaatccaggattcaaagtagcaattcttggagctgcaggtggaattggacaatctttatctttgctgatgaagatgaaccctcttgtctctttacttcatctctacgatgttgtcaatgctcctggcgtcactgctgacgtcagtcatatggacactggagctgttgtccgcgggttcttgggagcgaagcagcttgaggacgcgctaacgggtatggatcttgtgatcataccagccggtataccgaggaaaccagggatgacccgcgatgatctgtttaaaatcaatgctgggattgttaaaacactatgtgaaggtgtagcaaaatgttgtcctaatgctattgtcaacttgatcagcaaccctgtgaactctactgtccccattgccgctgaggttttcaagaaagctggaacttatgatcctaagaagctccttggagttactacactcgatgttgctcgtgccaacacatttgtggcagaagttcttggccttgatccaagagaagtcgatgtgccagtagttgggggacacgccggagtcacaatcttgccactactgtcacaggttaaacctcctagcagcttcacacctcaagaaattgagtacctgacaaaccggattcaaaatggtggaactgaagttgtggaggcaaaagctggagctggttctgcaacactttcaatggcatatgctgcagccaagtttgcagatgcttgccttcgcgggttaagaggagatgcgaatgtcgtagaatgctcttttgttgcttcacaggtgacagaattagctttctttgcaacaaaagtgcgccttggccgtacaggagcagaggaagtgtatcagcttggacccttaaacgaatacgaaaggattggtctggagaaagcaaaagatgaattagccggaagtattcagaaaggtgttgaattcatcagaaaatgaaactgagagataatcagagagatacaataagttatttcctcaactatatgatcatgtactcatcatcacatcatgcctatgtctcctctgcttctgatacaactttgtataaatccttatcagtttgtgtacgatatatgtgaccttttcaacgt

SEQ ID NO: 37395 - protein, 371 aa, Arabidopsis thaliana
  peptide (1)..(371): Ceres Seq. ID no. 13496931
  misc_feature (205)..(369): Pfam Name: lactate/malate dehydrogenase, alpha/beta Pfam Description: lactate/malate dehydrogenase, alpha/beta
  misc_feature (23)..(371): Homolog of NCBI NO: 15227752 NR Description: malate dehydrogenase, glyoxysomal, putative
  misc_feature (18)..(371): Homolog of NCBI NO: 1346501 NR Description: MALATE DEHYDROGENASE, GLYOXYSOMAL PRECURSOR
  misc_feature (18)..(371): Homolog of NCBI NO: 3183079 NR Description: MALATE DEHYDROGENASE, GLYOXYSOMAL PRECURSOR
  misc_feature (25)..(371): Homolog of NCBI NO: 7431168 NR Description: probable malate dehydrogenase (EC 1.1.1.37)
  misc_feature (23)..(370): Homolog of NCBI NO: 126894 NR Description: MALATE DEHYDROGENASE, GLYOXYSOMAL PRECURSOR
  misc_feature (23)..(370): Homolog of NCBI NO: 1170897 NR Description: MALATE DEHYDROGENASE, GLYOXYSOMAL PRECURSOR
  misc_feature (18)..(371): Homolog of NCBI NO: 12644436 NR Description: Malate dehydrogenase 1, glyoxysomal precursor
  misc_feature (18)..(371): Homolog of NCBI NO: 11133654 NR Description: Malate dehydrogenase 2, glyoxysomal precursor
  misc_feature (18)..(371): Homolog of NCBI NO: 16323157 NR Description: AT5g09660/F17I14_150 [Arabidopsis thaliana]
  misc_feature (18)..(371): Homolog of NCBI NO: 15242466 NR Description: malate dehydrogenase, glyoxysomal [Arabidopsis
KKTLKQLPNERKLRNTTMEFRGDANQRIARISAHLTPQMEAKNSVIGRENCRAKGGNPGFKVAILGAAGGIGQSLSLLMKMNPLVSLLHLYDVVNAPGVTADVSHMDTGAVVRGFLGAKQLEDALTGMDLVIIPAGIPRKPGMTRDDLFKINAGIVKTLCEGVAKCCPNAIVNLISNPVNSTVPIAAEVFKKAGTYDPKKLLGVTTLDVARANTFVAEVLGLDPREVDVPVVGGHAGVTILPLLSQVKPPSSFTPQEIEYLTNRIQNGGTEVVEAKAGAGSATLSMAYAAAKFADACLRGLRGDANVVECSFVASQVTELAFFATKVRLGRTGAEEVYQLGPLNEYERIGLEKAKDELAGSIQKGVEFIRK

SEQ ID NO: 37396 - protein, 354 aa, Arabidopsis thaliana
  peptide (1)..(354): Ceres Seq. ID no. 13496932
  misc_feature (188)..(352): Pfam Name: lactate/malate dehydrogenase, alpha/beta Pfam Description: lactate/malate dehydrogenase, alpha/beta
  misc_feature (6)..(354): Homolog of NCBI NO: 15227752 NR Description: malate dehydrogenase, glyoxysomal, putative
  misc_feature (1)..(354): Homolog of NCBI NO: 1346501 NR Description: MALATE DEHYDROGENASE, GLYOXYSOMAL PRECURSOR
  misc_feature (1)..(354): Homolog of NCBI NO: 3183079 NR Description: MALATE DEHYDROGENASE, GLYOXYSOMAL PRECURSOR
  misc_feature (8)..(354): Homolog of NCBI NO: 7431168 NR Description: probable malate dehydrogenase (EC 1.1.1.37)
  misc_feature (6)..(353): Homolog of NCBI NO: 126894 NR Description: MALATE DEHYDROGENASE, GLYOXYSOMAL PRECURSOR
  misc_feature (6)..(353): Homolog of NCBI NO: 1170897 NR Description: MALATE DEHYDROGENASE, GLYOXYSOMAL PRECURSOR
  misc_feature (1)..(354): Homolog of NCBI NO: 12644436 NR Description: Malate dehydrogenase 1, glyoxysomal precursor
  misc_feature (1)..(354): Homolog of NCBI NO: 11133654 NR Description: Malate dehydrogenase 2, glyoxysomal precursor
  misc_feature (1)..(354): Homolog of NCBI NO: 16323157 NR Description: AT5g09660/F17I14_150 [Arabidopsis thaliana]
  misc_feature (1)..(354): Homolog of NCBI NO: 15242466 NR Description: malate dehydrogenase, glyoxysomal [Arabidopsis
MEFRGDANQRIARISAHLTPQMEAKNSVIGRENCRAKGGNPGFKVAILGAAGGIGQSLSLLMKMNPLVSLLHLYDVVNAPGVTADVSHMDTGAVVRGFLGAKQLEDALTGMDLVIIPAGIPRKPGMTRDDLFKINAGIVKTLCEGVAKCCPNAIVNLISNPVNSTVPIAAEVFKKAGTYDPKKLLGVTTLDVARANTFVAEVLGLDPREVDVPVVGGHAGVTILPLLSQVKPPSSFTPQEIEYLTNRIQNGGTEVVEAKAGAGSATLSMAYAAAKFADACLRGLRGDANVVECSFVASQVTELAFFATKVRLGRTGAEEVYQLGPLNEYERIGLEKAKDELAGSIQKGVEFIRK

SEQ ID NO: 37397 - protein, 333 aa, Arabidopsis thaliana
  peptide (1)..(333): Ceres Seq. ID no. 13496933
  misc_feature (167)..(331): Pfam Name: lactate/malate dehydrogenase, alpha/beta Pfam Description: lactate/malate dehydrogenase, alpha/beta
  misc_feature (1)..(333): Homolog of NCBI NO: 15227752 NR Description: malate dehydrogenase, glyoxysomal, putative
  misc_feature (1)..(333): Homolog of NCBI NO: 1346501 NR Description: MALATE DEHYDROGENASE, GLYOXYSOMAL PRECURSOR
  misc_feature (1)..(333): Homolog of NCBI NO: 3183079 NR Description: MALATE DEHYDROGENASE, GLYOXYSOMAL PRECURSOR
  misc_feature (1)..(333): Homolog of NCBI NO: 7431168 NR Description: probable malate dehydrogenase (EC 1.1.1.37)
  misc_feature (1)..(332): Homolog of NCBI NO: 126894 NR Description: MALATE DEHYDROGENASE, GLYOXYSOMAL PRECURSOR
  misc_feature (1)..(332): Homolog of NCBI NO: 1170897 NR Description: MALATE DEHYDROGENASE, GLYOXYSOMAL PRECURSOR
  misc_feature (1)..(333): Homolog of NCBI NO: 12644436 NR Description: Malate dehydrogenase 1, glyoxysomal precursor
  misc_feature (1)..(333): Homolog of NCBI NO: 11133654 NR Description: Malate dehydrogenase 2, glyoxysomal precursor
  misc_feature (1)..(333): Homolog of NCBI NO: 16323157 NR Description: AT5g09660/F17I14_150 [Arabidopsis thaliana]
  misc_feature (1)..(333): Homolog of NCBI NO: 15242466 NR Description: malate dehydrogenase, glyoxysomal [Arabidopsis
MEAKNSVIGRENCRAKGGNPGFKVAILGAAGGIGQSLSLLMKMNPLVSLLHLYDVVNAPGVTADVSHMDTGAVVRGFLGAKQLEDALTGMDLVIIPAGIPRKPGMTRDDLFKINAGIVKTLCEGVAKCCPNAIVNLISNPVNSTVPIAAEVFKKAGTYDPKKLLGVTTLDVARANTFVAEVLGLDPREVDVPVVGGHAGVTILPLLSQVKPPSSFTPQEIEYLTNRIQNGGTEVVEAKAGAGSATLSMAYAAAKFADACLRGLRGDANVVECSFVASQVTELAFFATKVRLGRTGAEEVYQLGPLNEYERIGLEKAKDELAGSIQKGVEFIRK

SEQ ID NO: 37398 - DNA, 525 bp, Arabidopsis thaliana
  misc_feature (1)..(525): Ceres Seq. ID no. 12482674
  misc_feature: MA Experiment ID: 108462 Result: Up-regulated in Transcription
  misc_feature: MA Experiment 108462 PARAMETER Experiment Name: At_Germinating_Seeds_cDNA_P Parameter: Age (day) Value: 2 vs. 0
  misc_feature: MA Experiment 108462 PARAMETER Experiment Name: At_Germinating_Seeds_cDNA_P Parameter: Tissue Value: Germinating Seeds
  misc_feature: MA Experiment ID: 108464 Result: Up-regulated in Transcription
  misc_feature: MA Experiment 108464 PARAMETER Experiment Name: At_Germinating_Seeds_cDNA_P Parameter: Age (day) Value: 4 vs. 0
  misc_feature: MA Experiment 108464 PARAMETER Experiment Name: At_Germinating_Seeds_cDNA_P Parameter: Tissue Value: Germinating Seeds
  misc_feature: MA Experiment ID: 20000436 Result: Up-regulated in Transcription
  misc_feature: MA Experiment 20000436 PARAMETER Experiment Name: At_Drought_P Parameter: Age (day) Value: 7
  misc_feature: MA Experiment 20000436 PARAMETER Experiment Name: At_Drought_P Parameter: Organism Value: A. thaliana
  misc_feature: MA Experiment 20000436 PARAMETER Experiment Name: At_Drought_P Parameter: Plant Line Value: WS
  misc_feature: MA Experiment 20000436 PARAMETER Experiment Name: At_Drought_P Parameter: Timepoint (hr) Value: 12
  misc_feature: MA Experiment 20000436 PARAMETER Experiment Name: At_Drought_P Parameter: Tissue Value: Whole Plant
  misc_feature: MA Experiment 20000436 PARAMETER Experiment Name: At_Drought_P Parameter: Treatment Value: Drought vs. No Drought
  misc_feature: MA Experiment ID: 20000437 Result: Up-regulated in Transcription
  misc_feature: MA Experiment 20000437 PARAMETER Experiment Name: At_Drought_P Parameter: Age (day) Value: 8
  misc_feature: MA Experiment 20000437 PARAMETER Experiment Name: At_Drought_P Parameter: Organism Value: A. thaliana
  misc_feature: MA Experiment 20000437 PARAMETER Experiment Name: At_Drought_P Parameter: Plant Line Value: WS
  misc_feature: MA Experiment 20000437 PARAMETER Experiment Name: At_Drought_P Parameter: Timepoint (hr) Value: 24
  misc_feature: MA Experiment 20000437 PARAMETER Experiment Name: At_Drought_P Parameter: Tissue Value: Whole Plant
  misc_feature: MA Experiment 20000437 PARAMETER Experiment Name: At_Drought_P Parameter: Treatment Value: Drought vs. No Drought
  misc_feature: MA Experiment ID: 20001450 Result: Up-regulated in Transcription
  misc_feature: MA Experiment 20001450 PARAMETER Experiment Name: At_Far-red-induction_P Parameter: Age (day) Value: 7
  misc_feature: MA Experiment 20001450 PARAMETER Experiment Name: At_Far-red-induction_P Parameter: Light Value: Far-red vs. White
  misc_feature: MA Experiment 20001450 PARAMETER Experiment Name: At_Far-red-induction_P Parameter: Organism Value: A. thaliana
  misc_feature: MA Experiment 20001450 PARAMETER Experiment Name: At_Far-red-induction_P Parameter: Plant Line Value: Columbia
  misc_feature: MA Experiment 20001450 PARAMETER Experiment Name: At_Far-red-induction_P Parameter: Timepoint (hr) Value: 8
  misc_feature: MA Experiment 20001450 PARAMETER Experiment Name: At_Far-red-induction_P Parameter: Tissue Value: Whole Plant
  misc_feature: MA Experiment ID: 20001557 Result: Down-regulated in Transcription
  misc_feature: MA Experiment 20001557 PARAMETER Experiment Name: At_Drought_Soil_Dry_P Parameter: Age (day) Value: 27
  misc_feature: MA Experiment 20001557 PARAMETER Experiment Name: At_Drought_Soil_Dry_P Parameter: Organism Value: A. thaliana
  misc_feature: MA Experiment 20001557 PARAMETER Experiment Name: At_Drought_Soil_Dry_P Parameter: Plant Line Value: WS
  misc_feature: MA Experiment 20001557 PARAMETER Experiment Name: At_Drought_Soil_Dry_P Parameter: Post Timepoint (hr) Value: 3
  misc_feature: MA Experiment 20001557 PARAMETER Experiment Name: At_Drought_Soil_Dry_P Parameter: Post-Treatment Value: Re-Water vs. No Drought
  misc_feature: MA Experiment 20001557 PARAMETER Experiment Name: At_Drought_Soil_Dry_P Parameter: Timepoint (day) Value: 13
  misc_feature: MA Experiment 20001557 PARAMETER Experiment Name: At_Drought_Soil_Dry_P Parameter: Treatment Value: Drought vs. No Drought
  misc_feature: MA Experiment ID: 20001558 Result: Down-regulated in Transcription
  misc_feature: MA Experiment 20001558 PARAMETER Experiment Name: At_Drought_Soil_Dry_P Parameter: Age (day) Value: 27
  misc_feature: MA Experiment 20001558 PARAMETER Experiment Name: At_Drought_Soil_Dry_P Parameter: Organism Value: A. thaliana
  misc_feature: MA Experiment 20001558 PARAMETER Experiment Name: At_Drought_Soil_Dry_P Parameter: Plant Line Value: WS
  misc_feature: MA Experiment 20001558 PARAMETER Experiment Name: At_Drought_Soil_Dry_P Parameter: Post Timepoint (hr) Value: 6
  misc_feature: MA Experiment 20001558 PARAMETER Experiment Name: At_Drought_Soil_Dry_P Parameter: Post-Treatment Value: Re-Water vs. No Drought
  misc_feature: MA Experiment 20001558 PARAMETER Experiment Name: At_Drought_Soil_Dry_P Parameter: Timepoint (day) Value: 13
  misc_feature: MA Experiment 20001558 PARAMETER Experiment Name: At_Drought_Soil_Dry_P Parameter: Treatment Value: Drought vs. No Drought
  misc_feature: MA Experiment ID: 20001560 Result: Down-regulated in Transcription
  misc_feature: MA Experiment 20001560 PARAMETER Experiment Name: At_Drought_Soil_Dry_P Parameter: Age (day) Value: 28
  misc_feature: MA Experiment 20001560 PARAMETER Experiment Name: At_Drought_Soil_Dry_P Parameter: Organism Value: A. thaliana
  misc_feature: MA Experiment 20001560 PARAMETER Experiment Name: At_Drought_Soil_Dry_P Parameter: Plant Line Value: WS
  misc_feature: MA Experiment 20001560 PARAMETER Experiment Name: At_Drought_Soil_Dry_P Parameter: Post Timepoint (hr) Value: None
  misc_feature: MA Experiment 20001560 PARAMETER Experiment Name: At_Drought_Soil_Dry_P Parameter: Post-Treatment Value: None
  misc_feature: MA Experiment 20001560 PARAMETER Experiment Name: At_Drought_Soil_Dry_P Parameter: Timepoint (day) Value: 14
  misc_feature: MA Experiment 20001560 PARAMETER Experiment Name: At_Drought_Soil_Dry_P Parameter: Treatment Value: Drought vs. No Drought
atttatctgcagttgctggttattgtttgcatgtattcaataatgtttatctggttcactgaaactgttttttttctttggcagtcattgttttacaacgcgcaaacacaactcctttcaagacctgcagttgtggagaaaatagtcgaacttggaacagtctcgttggggaactcatatcaatcggttcttaaatccggcttcagcgacaaaaaatcggatcgtgcaaccagagtttccttcaagtatagcgcttcaagaggggtttatggtacaccaaccttctacgttaacgggtttgtattgtctgatgctgcttccccttcaaattttggaggatggaagaaaatcattgatcctctggttcaagcacatgagatggaagataacttcattcccttcctttgaagattttaagtgcttttgctgtgtcaattgtcatggtataatactatctgtaatgtatagactttctcaaaacctgtatgttgctcattgtaaatttgtaataaaggaaagtgatcc

SEQ ID NO: 37399 - protein, 135 aa, Arabidopsis thaliana
  peptide (1)..(135): Ceres Seq. ID no. 12482675
  misc_feature (24)..(122): Homolog of NCBI NO: 38346025 NR Description: OSJNBb0071D01.2 [Oryza sativa (japonica
  misc_feature (25)..(121): Homolog of NCBI NO: 25518088 NR Description: T20H2.2 protein - Arabidopsis thaliana
  misc_feature (24)..(99): Homolog of NCBI NO: 8778813 NR Description: T4O12.23 [Arabidopsis thaliana]
  misc_feature (25)..(135): Homolog of NCBI NO: 22329686 NR Description: unknown protein
  misc_feature (24)..(135): Homolog of NCBI NO: 15222928 NR Description: unknown protein; protein id: At1g76020.1
IYLQLLVIVCMYSIMFIWFTETVFFLWQSLFYNAQTQLLSRPAVVEKIVELGTVSLGNSYQSVLKSGFSDKKSDRATRVSFKYSASRGVYGTPTFYVNGFVLSDAASPSNFGGWKKIIDPLVQAHEMEDNFIPFL

SEQ ID NO: 37400 - protein, 125 aa, Arabidopsis thaliana
  peptide (1)..(125): Ceres Seq. ID no. 12482676
  misc_feature (14)..(112): Homolog of NCBI NO: 38346025 NR Description: OSJNBb0071D01.2 [Oryza sativa (japonica
  misc_feature (15)..(111): Homolog of NCBI NO: 25518088 NR Description: T20H2.2 protein - Arabidopsis thaliana
  misc_feature (14)..(89): Homolog of NCBI NO: 8778813 NR Description: T4O12.23 [Arabidopsis thaliana]
  misc_feature (15)..(125): Homolog of NCBI NO: 22329686 NR Description: unknown protein
  misc_feature (14)..(125): Homolog of NCBI NO: 15222928 NR Description: unknown protein; protein id: At1g76020.1
MYSIMFIWFTETVFFLWQSLFYNAQTQLLSRPAVVEKIVELGTVSLGNSYQSVLKSGFSDKKSDRATRVSFKYSASRGVYGTPTFYVNGFVLSDAASPSNFGGWKKIIDPLVQAHEMEDNFIPFL

SEQ ID NO: 37401 - protein, 121 aa, Arabidopsis thaliana
  peptide (1)..(121): Ceres Seq. ID no. 12482677
  misc_feature (10)..(108): Homolog of NCBI NO: 38346025 NR Description: OSJNBb0071D01.2 [Oryza sativa (japonica
  misc_feature (11)..(107): Homolog of NCBI NO: 25518088 NR Description: T20H2.2 protein - Arabidopsis thaliana
  misc_feature (10)..(85): Homolog of NCBI NO: 8778813 NR Description: T4O12.23 [Arabidopsis thaliana]
  misc_feature (11)..(121): Homolog of NCBI NO: 22329686 NR Description: unknown protein
  misc_feature (10)..(121): Homolog of NCBI NO: 15222928 NR Description: unknown protein; protein id: At1g76020.1
MFIWFTETVFFLWQSLFYNAQTQLLSRPAVVEKIVELGTVSLGNSYQSVLKSGFSDKKSDRATRVSFKYSASRGVYGTPTFYVNGFVLSDAASPSNFGGWKKIIDPLVQAHEMEDNFIPFL

SEQ ID NO: 37402 - DNA, 1159 bp, Arabidopsis thaliana
  misc_feature (1)..(1159): Ceres Seq. ID no. 12483464
  misc_feature: MA Experiment ID: 108462 Result: Up-regulated in Transcription
  misc_feature: MA Experiment 108462 PARAMETER Experiment Name: At_Germinating_Seeds_cDNA_P Parameter: Age (day) Value: 2 vs. 0
  misc_feature: MA Experiment 108462 PARAMETER Experiment Name: At_Germinating_Seeds_cDNA_P Parameter: Tissue Value: Germinating Seeds
  misc_feature: MA Experiment ID: 108463 Result: Up-regulated in Transcription
  misc_feature: MA Experiment 108463 PARAMETER Experiment Name: At_Germinating_Seeds_cDNA_P Parameter: Age (day) Value: 3 vs. 0
  misc_feature: MA Experiment 108463 PARAMETER Experiment Name: At_Germinating_Seeds_cDNA_P Parameter: Tissue Value: Germinating Seeds
  misc_feature: MA Experiment ID: 108464 Result: Up-regulated in Transcription
  misc_feature: MA Experiment 108464 PARAMETER Experiment Name: At_Germinating_Seeds_cDNA_P Parameter: Age (day) Value: 4 vs. 0
  misc_feature: MA Experiment 108464 PARAMETER Experiment Name: At_Germinating_Seeds_cDNA_P Parameter: Tissue Value: Germinating Seeds
  misc_feature: MA Experiment ID: 108561 Result: Up-regulated in Transcription
  misc_feature: MA Experiment 108561 PARAMETER Experiment Name: At_100uM_ABA_cDNA_P Parameter: Timepoint (hr) Value: 6
  misc_feature: MA Experiment 108561 PARAMETER Experiment Name: At_100uM_ABA_cDNA_P Parameter: Tissue Value: Aerial
  misc_feature: MA Experiment 108561 PARAMETER Experiment Name: At_100uM_ABA_cDNA_P Parameter: Treatment Value: 100uM ABA vs. No Treatment
  misc_feature: MA Experiment ID: 108572 Result: Up-regulated in Transcription
  misc_feature: MA Experiment 108572 PARAMETER Experiment Name: At_Drought_cDNA_P Parameter: Timepoint (hr) Value: 1
  misc_feature: MA Experiment 108572 PARAMETER Experiment Name: At_Drought_cDNA_P Parameter: Tissue Value: Aerial
  misc_feature: MA Experiment 108572 PARAMETER Experiment Name: At_Drought_cDNA_P Parameter: Treatment Value: Drought vs. No Drought
  misc_feature: MA Experiment ID: 108573 Result: Up-regulated in Transcription
  misc_feature: MA Experiment 108573 PARAMETER Experiment Name: At_Drought_cDNA_P Parameter: Timepoint (hr) Value: 6
  misc_feature: MA Experiment 108573 PARAMETER Experiment Name: At_Drought_cDNA_P Parameter: Tissue Value: Aerial
  misc_feature: MA Experiment 108573 PARAMETER Experiment Name: At_Drought_cDNA_P Parameter: Treatment Value: Drought vs. No Drought
  misc_feature: MA Experiment ID: 108576 Result: Up-regulated in Transcription
  misc_feature: MA Experiment 108576 PARAMETER Experiment Name: At_42deg_Heat_cDNA_P Parameter: Temperature (deg C) Value: 42 vs. 22
  misc_feature: MA Experiment 108576 PARAMETER Experiment Name: At_42deg_Heat_cDNA_P Parameter: Timepoint (hr) Value: 1
  misc_feature: MA Experiment 108576 PARAMETER Experiment Name: At_42deg_Heat_cDNA_P Parameter: Tissue Value: Aerial
  misc_feature: MA Experiment ID: 108577 Result: Up-regulated in Transcription
  misc_feature: MA Experiment 108577 PARAMETER Experiment Name: At_42deg_Heat_cDNA_P Parameter: Temperature (deg C) Value: 42 vs. 22
  misc_feature: MA Experiment 108577 PARAMETER Experiment Name: At_42deg_Heat_cDNA_P Parameter: Timepoint (hr) Value: 6
  misc_feature: MA Experiment 108577 PARAMETER Experiment Name: At_42deg_Heat_cDNA_P Parameter: Tissue Value: Aerial
  misc_feature: MA Experiment ID: 108579 Result: Up-regulated in Transcription
  misc_feature: MA Experiment 108579 PARAMETER Experiment Name: At_4deg_Cold_cDNA_P Parameter: Temperature (deg C) Value: 4 vs. 22
  misc_feature: MA Experiment 108579 PARAMETER Experiment Name: At_4deg_Cold_cDNA_P Parameter: Timepoint (hr) Value: 6
  misc_feature: MA Experiment 108579 PARAMETER Experiment Name: At_4deg_Cold_cDNA_P Parameter: Tissue Value: Aerial
  misc_feature: MA Experiment ID: 108594 Result: Down-regulated in Transcription
  misc_feature: MA Experiment 108594 PARAMETER Experiment Name: At_Ler-rhl_Root_cDNA_P Parameter: Plant Line Value: null
  misc_feature: MA Experiment ID: 108605 Result: Up-regulated in Transcription
  misc_feature: MA Experiment 108605 PARAMETER Experiment Name: At_100uM_ABA_cDNA_P Parameter: Timepoint (hr) Value: 6
  misc_feature: MA Experiment 108605 PARAMETER Experiment Name: At_100uM_ABA_cDNA_P Parameter: Tissue Value: Aerial
  misc_feature: MA Experiment 108605 PARAMETER Experiment Name: At_100uM_ABA_cDNA_P Parameter: Treatment Value: 100uM ABA vs. No Treatment
  misc_feature: MA Experiment ID: 108607 Result: Up-regulated in Transcription
  misc_feature: MA Experiment 108607 PARAMETER Experiment Name: At_100uM_ABA_cDNA_P Parameter: Timepoint (hr) Value: 4
  misc_feature: MA Experiment 108607 PARAMETER Experiment Name: At_100uM_ABA_cDNA_P Parameter: Tissue Value: Aerial
  misc_feature: MA Experiment 108607 PARAMETER Experiment Name: At_100uM_ABA_cDNA_P Parameter: Treatment Value: 100uM ABA vs. No Treatment
  misc_feature: MA Experiment ID: 108609 Result: Up-regulated in Transcription
  misc_feature: MA Experiment 108609 PARAMETER Experiment Name: At_100uM_ABA_cDNA_P Parameter: Timepoint (hr) Value: 24
  misc_feature: MA Experiment 108609 PARAMETER Experiment Name: At_100uM_ABA_cDNA_P Parameter: Tissue Value: Aerial
  misc_feature: MA Experiment 108609 PARAMETER Experiment Name: At_100uM_ABA_cDNA_P Parameter: Treatment Value: 100uM ABA vs. No Treatment
  misc_feature: MA Experiment ID: 108668 Result: Up-regulated in Transcription
  misc_feature: MA Experiment 108668 PARAMETER Experiment Name: At_2mM_SA_cDNA_P Parameter: Plant Line Value: WS
  misc_feature: MA Experiment 108668 PARAMETER Experiment Name: At_2mM_SA_cDNA_P Parameter: Timepoint (hr) Value: 6
  misc_feature: MA Experiment 108668 PARAMETER Experiment Name: At_2mM_SA_cDNA_P Parameter: Treatment Value: 2mM SA vs. No Treatment
  misc_feature: MA Experiment ID: 20000069 Result: Up-regulated in Transcription
  misc_feature: MA Experiment 20000069 PARAMETER Experiment Name: At_100uM_ABA_Mutants_cDNA_P Parameter: Plant Line Value: CS23
  misc_feature: MA Experiment 20000069 PARAMETER Experiment Name: At_100uM_ABA_Mutants_cDNA_P Parameter: Timepoint (hr) Value: 6
  misc_feature: MA Experiment 20000069 PARAMETER Experiment Name: At_100uM_ABA_Mutants_cDNA_P Parameter: Tissue Value: Aerial
  misc_feature: MA Experiment 20000069 PARAMETER Experiment Name: At_100uM_ABA_Mutants_cDNA_P Parameter: Treatment Value: 100uM ABA vs. No Treatment
  misc_feature: MA Experiment ID: 20000070 Result: Up-regulated in Transcription
  misc_feature: MA Experiment 20000070 PARAMETER Experiment Name: At_100uM_ABA_Mutants_cDNA_P Parameter: Plant Line Value: CS24
  misc_feature: MA Experiment 20000070 PARAMETER Experiment Name: At_100uM_ABA_Mutants_cDNA_P Parameter: Timepoint (hr) Value: 6
  misc_feature: MA Experiment 20000070 PARAMETER Experiment Name: At_100uM_ABA_Mutants_cDNA_P Parameter: Tissue Value: Aerial
  misc_feature: MA Experiment 20000070 PARAMETER Experiment Name: At_100uM_ABA_Mutants_cDNA_P Parameter: Treatment Value: 100uM ABA vs. No Treatment
  misc_feature: MA Experiment ID: 20000072 Result: Up-regulated in Transcription
  misc_feature: MA Experiment 20000072 PARAMETER Experiment Name: At_100uM_ABA_Mutants_cDNA_P Parameter: Plant Line Value: CS8105
  misc_feature: MA Experiment 20000072 PARAMETER Experiment Name: At_100uM_ABA_Mutants_cDNA_P Parameter: Timepoint (hr) Value: 6
  misc_feature: MA Experiment 20000072 PARAMETER Experiment Name: At_100uM_ABA_Mutants_cDNA_P Parameter: Tissue Value: Aerial
  misc_feature: MA Experiment 20000072 PARAMETER Experiment Name: At_100uM_ABA_Mutants_cDNA_P Parameter: Treatment Value: 100uM ABA vs. No Treatment
  misc_feature: MA Experiment ID: 20000088 Result: Up-regulated in Transcription
  misc_feature: MA Experiment 20000088 PARAMETER Experiment Name: At_100uM_ABA_Mutants_cDNA_P Parameter: Plant Line Value: Landsberg
  misc_feature: MA Experiment 20000088 PARAMETER Experiment Name: At_100uM_ABA_Mutants_cDNA_P Parameter: Timepoint (hr) Value: 6
  misc_feature: MA Experiment 20000088 PARAMETER Experiment Name: At_100uM_ABA_Mutants_cDNA_P Parameter: Tissue Value: Aerial
  misc_feature: MA Experiment 20000088 PARAMETER Experiment Name: At_100uM_ABA_Mutants_cDNA_P Parameter: Treatment Value: 100uM ABA vs. No Treatment
  misc_feature: MA Experiment ID: 20000093 Result: Up-regulated in Transcription
  misc_feature: MA Experiment 20000093 PARAMETER Experiment Name: At_42deg_Heat_cDNA_P Parameter: Temperature (deg C) Value: 42 vs. 22
  misc_feature: MA Experiment 20000093 PARAMETER Experiment Name: At_42deg_Heat_cDNA_P Parameter: Timepoint (hr) Value: 0.5
  misc_feature: MA Experiment 20000093 PARAMETER Experiment Name: At_42deg_Heat_cDNA_P Parameter: Tissue Value: Aerial
  misc_feature: MA Experiment ID: 20000111 Result: Up-regulated in Transcription
  misc_feature: MA Experiment 20000111 PARAMETER Experiment Name: At_42deg_Heat_cDNA_P Parameter: Temperature (deg C) Value: 42 vs. 22
  misc_feature: MA Experiment 20000111 PARAMETER Experiment Name: At_42deg_Heat_cDNA_P Parameter: Timepoint (hr) Value: 6
  misc_feature: MA Experiment 20000111 PARAMETER Experiment Name: At_42deg_Heat_cDNA_P Parameter: Tissue Value: Aerial
  misc_feature: MA Experiment ID: 20000112 Result: Up-regulated in Transcription
  misc_feature: MA Experiment 20000112 PARAMETER Experiment Name: At_42deg_Heat_cDNA_P Parameter: Temperature (deg C) Value: 42 vs. 22
  misc_feature: MA Experiment 20000112 PARAMETER Experiment Name: At_42deg_Heat_cDNA_P Parameter: Timepoint (hr) Value: 2
  misc_feature: MA Experiment 20000112 PARAMETER Experiment Name: At_42deg_Heat_cDNA_P Parameter: Tissue Value: Aerial
  misc_feature: MA Experiment ID: 20000113 Result: Up-regulated in Transcription
  misc_feature: MA Experiment 20000113 PARAMETER Experiment Name: At_42deg_Heat_cDNA_P Parameter: Temperature (deg C) Value: 42 vs. 22
  misc_feature: MA Experiment 20000113 PARAMETER Experiment Name: At_42deg_Heat_cDNA_P Parameter: Timepoint (hr) Value: 8
  misc_feature: MA Experiment 20000113 PARAMETER Experiment Name: At_42deg_Heat_cDNA_P Parameter: Tissue Value: Aerial
  misc_feature: MA Experiment ID: 20000117 Result: Up-regulated in Transcription
  misc_feature: MA Experiment 20000117 PARAMETER Experiment Name: At_100uM_ABA_Mutants_cDNA_P Parameter: Plant Line Value: Columbia
  misc_feature: MA Experiment 20000117 PARAMETER Experiment Name: At_100uM_ABA_Mutants_cDNA_P Parameter: Timepoint (hr) Value: 6
  misc_feature: MA Experiment 20000117 PARAMETER Experiment Name: At_100uM_ABA_Mutants_cDNA_P Parameter: Tissue Value: Aerial
  misc_feature: MA Experiment 20000117 PARAMETER Experiment Name: At_100uM_ABA_Mutants_cDNA_P Parameter: Treatment Value: 100uM ABA vs. No Treatment
  misc_feature: MA Experiment ID: 20000144 Result: Up-regulated in Transcription
  misc_feature: MA Experiment 20000144 PARAMETER Experiment Name: At_42deg_Heat_cDNA_P Parameter: Temperature (deg C) Value: 42 vs. 22
  misc_feature: MA Experiment 20000144 PARAMETER Experiment Name: At_42deg_Heat_cDNA_P Parameter: Timepoint (hr) Value: 1
  misc_feature: MA Experiment 20000144 PARAMETER Experiment Name: At_42deg_Heat_cDNA_P Parameter: Tissue Value: Aerial
  misc_feature: MA Experiment ID: 20000169 Result: Up-regulated in Transcription
  misc_feature: MA Experiment 20000169 PARAMETER Experiment Name: At_100uM_ABA_P Parameter: Age (day) Value: 14
  misc_feature: MA Experiment 20000169 PARAMETER Experiment Name: At_100uM_ABA_P Parameter: Organism Value: A. thaliana
  misc_feature: MA Experiment 20000169 PARAMETER Experiment Name: At_100uM_ABA_P Parameter: Plant Line Value: WS
  misc_feature: MA Experiment 20000169 PARAMETER Experiment Name: At_100uM_ABA_P Parameter: Timepoint (hr) Value: 6
  misc_feature: MA Experiment 20000169 PARAMETER Experiment Name: At_100uM_ABA_P Parameter: Tissue Value: Aerial
  misc_feature: MA Experiment 20000169 PARAMETER Experiment Name: At_100uM_ABA_P Parameter: Treatment Value: 100uM ABA vs. No Treatment
  misc_feature: MA Experiment ID: 20000171 Result: Up-regulated in Transcription
  misc_feature: MA Experiment 20000171 PARAMETER Experiment Name: At_42deg_Heat_P Parameter: Age (day) Value: 14
  misc_feature: MA Experiment 20000171 PARAMETER Experiment Name: At_42deg_Heat_P Parameter: Organism Value: A. thaliana
  misc_feature: MA Experiment 20000171 PARAMETER Experiment Name: At_42deg_Heat_P Parameter: Plant Line Value: WS
  misc_feature: MA Experiment 20000171 PARAMETER Experiment Name: At_42deg_Heat_P Parameter: Temperature (deg C) Value: 42 vs. 22
  misc_feature: MA Experiment 20000171 PARAMETER Experiment Name: At_42deg_Heat_P Parameter: Timepoint (hr) Value: 1
  misc_feature: MA Experiment 20000171 PARAMETER Experiment Name: At_42deg_Heat_P Parameter: Tissue Value: Aerial
  misc_feature: MA Experiment ID: 20000173 Result: Up-regulated in Transcription
  misc_feature: MA Experiment 20000173 PARAMETER Experiment Name: At_42deg_Heat_P Parameter: Age (day) Value: 14
  misc_feature: MA Experiment 20000173 PARAMETER Experiment Name: At_42deg_Heat_P Parameter: Organism Value: A. thaliana
  misc_feature: MA Experiment 20000173 PARAMETER Experiment Name: At_42deg_Heat_P Parameter: Plant Line Value: WS
  misc_feature: MA Experiment 20000173 PARAMETER Experiment Name: At_42deg_Heat_P Parameter: Temperature (deg C) Value: 42 vs. 22
  misc_feature: MA Experiment 20000173 PARAMETER Experiment Name: At_42deg_Heat_P Parameter: Timepoint (hr) Value: 6
  misc_feature: MA Experiment 20000173 PARAMETER Experiment Name: At_42deg_Heat_P Parameter: Tissue Value: Aerial
  misc_feature: MA Experiment ID: 20000180 Result: Up-regulated in Transcription
  misc_feature: MA Experiment 20000180 PARAMETER Experiment Name: At_Germinating_Seeds_P Parameter: Age (hr) Value: 24 vs. 0
  misc_feature: MA Experiment 20000180 PARAMETER Experiment Name: At_Germinating_Seeds_P Parameter: Tissue Value: Germinating Seeds
  misc_feature: MA Experiment ID: 20000185 Result: Down-regulated in Transcription
  misc_feature: MA Experiment 20000185 PARAMETER Experiment Name: At_Roots__P Parameter: Age (day) Value: 7 vs. 21
  misc_feature: MA Experiment 20000185 PARAMETER Experiment Name: At_Roots__P Parameter: Organism Value: A. thaliana
  misc_feature: MA Experiment 20000185 PARAMETER Experiment Name: At_Roots__P Parameter: Tissue Value: Roots vs. Whole Plant
  misc_feature: MA Experiment ID: 20000234 Result: Down-regulated in Transcription
  misc_feature: MA Experiment 20000234 PARAMETER Experiment Name: At_Siliques_P Parameter: Age (day) Value: 21
  misc_feature: MA Experiment 20000234 PARAMETER Experiment Name: At_Siliques_P Parameter: Organism Value: A. thaliana
  misc_feature: MA Experiment 20000234 PARAMETER Experiment Name: At_Siliques_P Parameter: Plant Line Value: WS
  misc_feature: MA Experiment 20000234 PARAMETER Experiment Name: At_Siliques_P Parameter: Tissue Value: Less Than 5mm Siliques vs. Whole Plant
  misc_feature: MA Experiment ID: 20000235 Result: Down-regulated in Transcription
  misc_feature: MA Experiment 20000235 PARAMETER Experiment Name: At_Siliques_P Parameter: Age (day) Value: 21
  misc_feature: MA Experiment 20000235 PARAMETER Experiment Name: At_Siliques_P Parameter: Organism Value: A. thaliana
  misc_feature: MA Experiment 20000235 PARAMETER Experiment Name: At_Siliques_P Parameter: Plant Line Value: WS
  misc_feature: MA Experiment 20000235 PARAMETER Experiment Name: At_Siliques_P Parameter: Tissue Value: 5-10mm Siliques vs. Whole Plant
  misc_feature: MA Experiment ID: 20000264 Result: Up-regulated in Transcription
  misc_feature: MA Experiment 20000264 PARAMETER Experiment Name: At_Open_Flower_P Parameter: Age (day) Value: 21
  misc_feature: MA Experiment 20000264 PARAMETER Experiment Name: At_Open_Flower_P Parameter: Plant Line Value: WS
  misc_feature: MA Experiment 20000264 PARAMETER Experiment Name: At_Open_Flower_P Parameter: Tissue Value: Open Flower vs. Whole Plant
  misc_feature: MA Experiment ID: 20000268 Result: Up-regulated in Transcription
  misc_feature: MA Experiment 20000268 PARAMETER Experiment Name: At_100mM_NaCl__P Parameter: Age (day) Value: 14
  misc_feature: MA Experiment 20000268 PARAMETER Experiment Name: At_100mM_NaCl__P Parameter: Organism Value: A. thaliana
  misc_feature: MA Experiment 20000268 PARAMETER Experiment Name: At_100mM_NaCl__P Parameter: Plant Line Value: WS
  misc_feature: MA Experiment 20000268 PARAMETER Experiment Name: At_100mM_NaCl__P Parameter: Timepoint (hr) Value: 6
  misc_feature: MA Experiment 20000268 PARAMETER Experiment Name: At_100mM_NaCl__P Parameter: Tissue Value: Whole Plant
  misc_feature: MA Experiment 20000268 PARAMETER Experiment Name: At_100mM_NaCl__P Parameter: Treatment Value: 100mM NaCl vs. No Treatment
  misc_feature: MA Experiment ID: 20000436 Result: Up-regulated in Transcription
  misc_feature: MA Experiment 20000436 PARAMETER Experiment Name: At_Drought_P Parameter: Age (day) Value: 7
  misc_feature: MA Experiment 20000436 PARAMETER Experiment Name: At_Drought_P Parameter: Organism Value: A. thaliana
  misc_feature: MA Experiment 20000436 PARAMETER Experiment Name: At_Drought_P Parameter: Plant Line Value: WS
  misc_feature: MA Experiment 20000436 PARAMETER Experiment Name: At_Drought_P Parameter: Timepoint (hr) Value: 12
  misc_feature: MA Experiment 20000436 PARAMETER Experiment Name: At_Drought_P Parameter: Tissue Value: Whole Plant
  misc_feature: MA Experiment 20000436 PARAMETER Experiment Name: At_Drought_P Parameter: Treatment Value: Drought vs. No Drought
  misc_feature: MA Experiment ID: 20000439 Result: Down-regulated in Transcription
  misc_feature: MA Experiment 20000439 PARAMETER Experiment Name: At_Roots__P Parameter: Age (day) Value: 14 vs. 21
  misc_feature: MA Experiment 20000439 PARAMETER Experiment Name: At_Roots__P Parameter: Organism Value: A. thaliana
  misc_feature: MA Experiment 20000439 PARAMETER Experiment Name: At_Roots__P Parameter: Tissue Value: Roots vs. Whole Plant
  misc_feature: MA Experiment ID: 20000453 Result: Up-regulated in Transcription
  misc_feature: MA Experiment 20000453 PARAMETER Experiment Name: At_100uM_ABA_P Parameter: Age (day) Value: 15
  misc_feature: MA Experiment 20000453 PARAMETER Experiment Name: At_100uM_ABA_P Parameter: Organism Value: A. thaliana
  misc_feature: MA Experiment 20000453 PARAMETER Experiment Name: At_100uM_ABA_P Parameter: Plant Line Value: WS
  misc_feature: MA Experiment 20000453 PARAMETER Experiment Name: At_100uM_ABA_P Parameter: Timepoint (hr) Value: 24
  misc_feature: MA Experiment 20000453 PARAMETER Experiment Name: At_100uM_ABA_P Parameter: Tissue Value: Aerial
  misc_feature: MA Experiment 20000453 PARAMETER Experiment Name: At_100uM_ABA_P Parameter: Treatment Value: 100uM ABA vs. No Treatment
  misc_feature: MA Experiment ID: 20000794 Result: Up-regulated in Transcription
  misc_feature: MA Experiment 20000794 PARAMETER Experiment Name: At_Petals_P Parameter: Age (day) Value: 23-25 days
  misc_feature: MA Experiment 20000794 PARAMETER Experiment Name: At_Petals_P Parameter: Plant Line Value: WS
  misc_feature: MA Experiment 20000794 PARAMETER Experiment Name: At_Petals_P Parameter: Tissue Value: Petals vs. Whole plant
  misc_feature: MA Experiment ID: 20001248 Result: Down-regulated in Transcription
  misc_feature: MA Experiment 20001248 PARAMETER Experiment Name: At_Far-red-induction_P Parameter: Age (day) Value: 7
  misc_feature: MA Experiment 20001248 PARAMETER Experiment Name: At_Far-red-induction_P Parameter: Light Value: Far-red vs. White
  misc_feature: MA Experiment 20001248 PARAMETER Experiment Name: At_Far-red-induction_P Parameter: Organism Value: A. thaliana
  misc_feature: MA Experiment 20001248 PARAMETER Experiment Name: At_Far-red-induction_P Parameter: Plant Line Value: Columbia
  misc_feature: MA Experiment 20001248 PARAMETER Experiment Name: At_Far-red-induction_P Parameter: Timepoint (hr) Value: 4
  misc_feature: MA Experiment 20001248 PARAMETER Experiment Name: At_Far-red-induction_P Parameter: Tissue Value: Whole Plant
  misc_feature: MA Experiment ID: 20001451 Result: Down-regulated in Transcription
  misc_feature: MA Experiment 20001451 PARAMETER Experiment Name: At_Far-red-induction_P Parameter: Age (day) Value: 7
  misc_feature: MA Experiment 20001451 PARAMETER Experiment Name: At_Far-red-induction_P Parameter: Light Value: Far-red vs. White
  misc_feature: MA Experiment 20001451 PARAMETER Experiment Name: At_Far-red-induction_P Parameter: Organism Value: A. thaliana
  misc_feature: MA Experiment 20001451 PARAMETER Experiment Name: At_Far-red-induction_P Parameter: Plant Line Value: Columbia
  misc_feature: MA Experiment 20001451 PARAMETER Experiment Name: At_Far-red-induction_P Parameter: Timepoint (hr) Value: 24
  misc_feature: MA Experiment 20001451 PARAMETER Experiment Name: At_Far-red-induction_P Parameter: Tissue Value: Whole Plant
  misc_feature: MA Experiment ID: 20001555 Result: Up-regulated in Transcription
  misc_feature: MA Experiment 20001555 PARAMETER Experiment Name: At_Drought_Soil_Dry_P Parameter: Age (day) Value: 24
  misc_feature: MA Experiment 20001555 PARAMETER Experiment Name: At_Drought_Soil_Dry_P Parameter: Organism Value: A. thaliana
  misc_feature: MA Experiment 20001555 PARAMETER Experiment Name: At_Drought_Soil_Dry_P Parameter: Plant Line Value: WS
  misc_feature: MA Experiment 20001555 PARAMETER Experiment Name: At_Drought_Soil_Dry_P Parameter: Post Timepoint (hr) Value: None
  misc_feature: MA Experiment 20001555 PARAMETER Experiment Name: At_Drought_Soil_Dry_P Parameter: Post-Treatment Value: None
  misc_feature: MA Experiment 20001555 PARAMETER Experiment Name: At_Drought_Soil_Dry_P Parameter: Timepoint (day) Value: 10
  misc_feature: MA Experiment 20001555 PARAMETER Experiment Name: At_Drought_Soil_Dry_P Parameter: Treatment Value: Drought vs. No Drought
  misc_feature: MA Experiment ID: 20001559 Result: Up-regulated in Transcription
  misc_feature: MA Experiment 20001559 PARAMETER Experiment Name: At_Drought_Soil_Dry_P Parameter: Age (day) Value: 28
  misc_feature: MA Experiment 20001559 PARAMETER Experiment Name: At_Drought_Soil_Dry_P Parameter: Organism Value: A. thaliana
  misc_feature: MA Experiment 20001559 PARAMETER Experiment Name: At_Drought_Soil_Dry_P Parameter: Plant Line Value: WS
  misc_feature: MA Experiment 20001559 PARAMETER Experiment Name: At_Drought_Soil_Dry_P Parameter: Post Timepoint (hr) Value: 29
  misc_feature: MA Experiment 20001559 PARAMETER Experiment Name: At_Drought_Soil_Dry_P Parameter: Post-Treatment Value: Re-Water vs. No Drought
  misc_feature: MA Experiment 20001559 PARAMETER Experiment Name: At_Drought_Soil_Dry_P Parameter: Timepoint (day) Value: 14
  misc_feature: MA Experiment 20001559 PARAMETER Experiment Name: At_Drought_Soil_Dry_P Parameter: Treatment Value: Drought vs. No Drought
  misc_feature: MA Experiment ID: 20001904 Result: Up-regulated in Transcription
  misc_feature: MA Experiment 20001904 PARAMETER Experiment Name: At_Drought_Reproduction_P Parameter: Age (day) Value: 37
  misc_feature: MA Experiment 20001904 PARAMETER Experiment Name: At_Drought_Reproduction_P Parameter: Organism Value: A. thaliana
  misc_feature: MA Experiment 20001904 PARAMETER Experiment Name: At_Drought_Reproduction_P Parameter: Plant Line Value: WS
  misc_feature: MA Experiment 20001904 PARAMETER Experiment Name: At_Drought_Reproduction_P Parameter: Timepoint (day) Value: 7
  misc_feature: MA Experiment 20001904 PARAMETER Experiment Name: At_Drought_Reproduction_P Parameter: Tissue Value: Rosettes
  misc_feature: MA Experiment 20001904 PARAMETER Experiment Name: At_Drought_Reproduction_P Parameter: Treatment Value: Drought vs. No Drought
  misc_feature: MA Experiment ID: 20001905 Result: Up-regulated in Transcription
  misc_feature: MA Experiment 20001905 PARAMETER Experiment Name: At_Drought_Reproduction_P Parameter: Age (day) Value: 40
  misc_feature: MA Experiment 20001905 PARAMETER Experiment Name: At_Drought_Reproduction_P Parameter: Organism Value: A. thaliana
  misc_feature: MA Experiment 20001905 PARAMETER Experiment Name: At_Drought_Reproduction_P Parameter: Plant Line Value: WS
  misc_feature: MA Experiment 20001905 PARAMETER Experiment Name: At_Drought_Reproduction_P Parameter: Timepoint (day) Value: 10
  misc_feature: MA Experiment 20001905 PARAMETER Experiment Name: At_Drought_Reproduction_P Parameter: Tissue Value: Rosettes
  misc_feature: MA Experiment 20001905 PARAMETER Experiment Name: At_Drought_Reproduction_P Parameter: Treatment Value: Drought vs. No Drought
gatgaaagcaaaacatttacgtaacaatgtctataaaatcagtacaggtctattcttgttcactagcttcgaaattttagtcgaagaaacaaaaaaaaatggcgacggtacaattgtccacccaatttagctgccaaaccagagtttcaatctcaccgaactctaaatctatctccaagcctccgtttctggtaccggtgacctcaattattcaccgcccgatgatctccaccggaggaatcgctgtttccccccgtagagttttcaaagtccgagccacagatacgggagagataggatcagctctattggcggcggaggaagcaattgaagacgtggaagagacggagcggctaaagagatcgctcgtggattcgttgtacggaacagatcgaggtttaagcgcatcgagcgaaaccagagctgaaatcggagatctaatcacacagctcgagtctaagaaccctactccagctccgacggaagctcttttccttctcaacggcaaatggatcctcgcctacacatcgttcgtgaatttgttcccgttgctatcacgaggaatcgtaccgttaataaaagtcgatgagatctctcaaaccattgattcagataacttcaccgtccagaactctgttcgtttcgctggtcctttaggtacaaactcgattagcaccaacgctaaattcgaaatccgaagccctaaacgcgtccagattaagtttgagcaaggcgtaattgggacgcctcagctaacggattctattgagataccggaatatgtagaggttcttggtcaaaagattgatcttaacccgatcagagggttacttacctcggtgcaagacacagcctcgtctgtggctagaaccatatcaagccaaccaccgttgaaattctctttgccggcggacaatgcgcagtcttggctactcacgacttatctagacaaagacattcggatctctagaggagacggtggaagtgtctttgtgcttatcaaagaaggaagccctctcttgaatccttgaacttggtcaaaatatatgtgtctctcttgtcgttgtgttaagtgagacaaatatatatagtgttgttgtaggtttacttcttaatcgttattatgaacttgatgataatgaatataatgtttttaact

SEQ ID NO: 37403 - protein, 310 aa, Arabidopsis thaliana
  peptide (1)..(310): Ceres Seq. ID no. 12483465
  misc_feature (84)..(301): Pfam Name: PAP_fibrillin Pfam Description: PAP_fibrillin
  misc_feature (1)..(310): Homolog of NCBI NO: 3928760 NR Description: homolog to plastid-lipid-associated protein
  misc_feature (74)..(310): Homolog of NCBI NO: 4139097 NR Description: fibrillin [Brassica napus]
  misc_feature (3)..(310): Homolog of NCBI NO: 14248548 NR Description: plastid-lipid associated protein PAP1 [Brassica
  misc_feature (3)..(310): Homolog of NCBI NO: 14248554 NR Description: plastid-lipid associated protein PAP1 [Brassica
  misc_feature (1)..(310): Homolog of NCBI NO: 15233357 NR Description: putative fibrillin
  misc_feature (1)..(310): Homolog of NCBI NO: 14248550 NR Description: plastid-lipid associated protein PAP2 [Brassica
  misc_feature (1)..(310): Homolog of NCBI NO: 14248556 NR Description: plastid-lipid associated protein PAP2 [Brassica
  misc_feature (1)..(310): Homolog of NCBI NO: 18377868 NR Description: AT4g22240/T10I14_70 [Arabidopsis thaliana]
  misc_feature (1)..(310): Homolog of NCBI NO: 21618237 NR Description: fibrillin precursor-like protein [Arabidopsis
  misc_feature (1)..(310): Homolog of NCBI NO: 15235575 NR Description: fibrillin precursor-like protein
MATVQLSTQFSCQTRVSISPNSKSISKPPFLVPVTSIIHRPMISTGGIAVSPRRVFKVRATDTGEIGSALLAAEEAIEDVEETERLKRSLVDSLYGTDRGLSASSETRAEIGDLITQLESKNPTPAPTEALFLLNGKWILAYTSFVNLFPLLSRGIVPLIKVDEISQTIDSDNFTVQNSVRFAGPLGTNSISTNAKFEIRSPKRVQIKFEQGVIGTPQLTDSIEIPEYVEVLGQKIDLNPIRGLLTSVQDTASSVARTISSQPPLKFSLPADNAQSWLLTTYLDKDIRISRGDGGSVFVLIKEGSPLLNP

SEQ ID NO: 37404 - protein, 269 aa, Arabidopsis thaliana
  peptide (1)..(269): Ceres Seq. ID no. 12483466
  misc_feature (43)..(260): Pfam Name: PAP_fibrillin Pfam Description: PAP_fibrillin
  misc_feature (1)..(269): Homolog of NCBI NO: 3928760 NR Description: homolog to plastid-lipid-associated protein
  misc_feature (33)..(269): Homolog of NCBI NO: 4139097 NR Description: fibrillin [Brassica napus]
  misc_feature (1)..(269): Homolog of NCBI NO: 14248548 NR Description: plastid-lipid associated protein PAP1 [Brassica
  misc_feature (1)..(269): Homolog of NCBI NO: 14248554 NR Description: plastid-lipid associated protein PAP1 [Brassica
  misc_feature (1)..(269): Homolog of NCBI NO: 15233357 NR Description: putative fibrillin
  misc_feature (1)..(269): Homolog of NCBI NO: 14248550 NR Description: plastid-lipid associated protein PAP2 [Brassica
  misc_feature (1)..(269): Homolog of NCBI NO: 14248556 NR Description: plastid-lipid associated protein PAP2 [Brassica
  misc_feature (1)..(269): Homolog of NCBI NO: 18377868 NR Description: AT4g22240/T10I14_70 [Arabidopsis thaliana]
  misc_feature (1)..(269): Homolog of NCBI NO: 21618237 NR Description: fibrillin precursor-like protein [Arabidopsis
  misc_feature (1)..(269): Homolog of NCBI NO: 15235575 NR Description: fibrillin precursor-like protein
MISTGGIAVSPRRVFKVRATDTGEIGSALLAAEEAIEDVEETERLKRSLVDSLYGTDRGLSASSETRAEIGDLITQLESKNPTPAPTEALFLLNGKWILAYTSFVNLFPLLSRGIVPLIKVDEISQTIDSDNFTVQNSVRFAGPLGTNSISTNAKFEIRSPKRVQIKFEQGVIGTPQLTDSIEIPEYVEVLGQKIDLNPIRGLLTSVQDTASSVARTISSQPPLKFSLPADNAQSWLLTTYLDKDIRISRGDGGSVFVLIKEGSPLLNP

SEQ ID NO: 37405 - DNA, 941 bp, Arabidopsis thaliana
  misc_feature (1)..(941): Ceres Seq. ID no. 12322149
  misc_feature: MA Experiment ID: 108434 Result: Up-regulated in Transcription
  misc_feature: MA Experiment 108434 PARAMETER Experiment Name: At_Root_Tips_cDNA_P Parameter: Tissue Value: Root Tips
  misc_feature: MA Experiment ID: 108461 Result: Down-regulated in Transcription
  misc_feature: MA Experiment 108461 PARAMETER Experiment Name: At_Germinating_Seeds_cDNA_P Parameter: Age (day) Value: 1 vs. 0
  misc_feature: MA Experiment 108461 PARAMETER Experiment Name: At_Germinating_Seeds_cDNA_P Parameter: Tissue Value: Germinating Seeds
  misc_feature: MA Experiment ID: 108462 Result: Down-regulated in Transcription
  misc_feature: MA Experiment 108462 PARAMETER Experiment Name: At_Germinating_Seeds_cDNA_P Parameter: Age (day) Value: 2 vs. 0
  misc_feature: MA Experiment 108462 PARAMETER Experiment Name: At_Germinating_Seeds_cDNA_P Parameter: Tissue Value: Germinating Seeds
  misc_feature: MA Experiment ID: 108463 Result: Down-regulated in Transcription
  misc_feature: MA Experiment 108463 PARAMETER Experiment Name: At_Germinating_Seeds_cDNA_P Parameter: Age (day) Value: 3 vs. 0
  misc_feature: MA Experiment 108463 PARAMETER Experiment Name: At_Germinating_Seeds_cDNA_P Parameter: Tissue Value: Germinating Seeds
  misc_feature: MA Experiment ID: 108464 Result: Down-regulated in Transcription
  misc_feature: MA Experiment 108464 PARAMETER Experiment Name: At_Germinating_Seeds_cDNA_P Parameter: Age (day) Value: 4 vs. 0
  misc_feature: MA Experiment 108464 PARAMETER Experiment Name: At_Germinating_Seeds_cDNA_P Parameter: Tissue Value: Germinating Seeds
  misc_feature: MA Experiment ID: 20000179 Result: Down-regulated in Transcription
  misc_feature: MA Experiment 20000179 PARAMETER Experiment Name: At_Germinating_Seeds_P Parameter: Age (hr) Value: 6 vs. 0
  misc_feature: MA Experiment 20000179 PARAMETER Experiment Name: At_Germinating_Seeds_P Parameter: Tissue Value: Germinating Seeds
  misc_feature: MA Experiment ID: 20000180 Result: Down-regulated in Transcription
  misc_feature: MA Experiment 20000180 PARAMETER Experiment Name: At_Germinating_Seeds_P Parameter: Age (hr) Value: 24 vs. 0
  misc_feature: MA Experiment 20000180 PARAMETER Experiment Name: At_Germinating_Seeds_P Parameter: Tissue Value: Germinating Seeds
ccaaaagttttatcgattccaccaaattagggcgaacgcgaaatctgggtattgtaatttgaagcgatggcgacgactggaactgctgcggttgcgacgggaacttcgacggtgaagagaaaaccggtgtttgtgaaggtggaacagctaaagcctggaacgactggtcacacgttgactgttaaagtcattgaggctaatatcgtggttcctgttacccggaagactcgtccagcgagttctctgagtcgtccttctcagcctagtcgaatcgttgagtgtctcatcggtgacgaaactgggtgtatcctcttcactgctcgtaacgatcaagttgatcttatgaagccgggtgctacggtgatactgcgcaattcaaggatagacatgttcaagggtacaatgaggctaggagttgataaatggggacgcatcgaagccactggagccgcgtctttcactgtcaaggaggataacaatctgtctctcgttgagtatgaactgatcaatgttggtggtgatcagtgatcttttagtatgtttatggaggttaacccctgagagtgttgggttctgatttttctaccgtgaaggtctttgatttagatgatgaagattgtatgactggtccagagttgcttgtaggaatatgcttcttcttttttaccctaaaatatgcggtcatgatcttgctctggagaactattgagcctgcggtaatggcgtaatgcaattgttccttttaatttgtgttgatgtaagttaaagaccattgagagcttgcttgtgcactatctaatacagtaaaaataagtttttctttcttaaactttactaatgtctttgttttttcattaattactatttgatgtacactattgtaccctctcggttacagagagttttgcccaactttttacatcgaaagcatctcatccttg

SEQ ID NO: 37406 - protein, 153 aa, Arabidopsis thaliana
  peptide (1)..(153): Ceres Seq. ID no. 12322150
  misc_feature (45)..(123): Pfam Name: OB-fold nucleic acid binding domain Pfam Description: OB-fold nucleic acid binding domain
  misc_feature (9)..(89): Homolog of NCBI NO: 6573753 NR Description: F20B24.1 [Arabidopsis thaliana]
  misc_feature (9)..(149): Homolog of NCBI NO: 30681801 NR Description: expressed protein [Arabidopsis thaliana]
  misc_feature (9)..(149): Homolog of NCBI NO: 18391179 NR Description: expressed protein
  misc_feature (18)..(149): Homolog of NCBI NO: 24413970 NR Description: contains EST AU181579(C50456)~similar to Oryza
  misc_feature (9)..(149): Homolog of NCBI NO: 18395285 NR Description: expressed protein
  misc_feature (6)..(147): Homolog of NCBI NO: 15219562 NR Description: hypothetical protein; protein id: At1g03810.1
  misc_feature (13)..(149): Homolog of NCBI NO: 18403397 NR Description: Expressed protein
  misc_feature (9)..(151): Homolog of NCBI NO: 34909622 NR Description: P0435B05.31 [Oryza sativa (japonica
  misc_feature (10)..(149): Homolog of NCBI NO: 34904470 NR Description: OSJNBa0086P08.14 [Oryza sativa (japonica
  misc_feature (1)..(153): Homolog of NCBI NO: 15235304 NR Description: putative protein
MATTGTAAVATGTSTVKRKPVFVKVEQLKPGTTGHTLTVKVIEANIVVPVTRKTRPASSLSRPSQPSRIVECLIGDETGCILFTARNDQVDLMKPGATVILRNSRIDMFKGTMRLGVDKWGRIEATGAASFTVKEDNNLSLVEYELINVGGDQ

SEQ ID NO: 37407 - DNA, 738 bp, Arabidopsis thaliana
  misc_feature (1)..(738): Ceres Seq. ID no. 13592500
  misc_feature: MA Experiment ID: 108462 Result: Up-regulated in Transcription
  misc_feature: MA Experiment 108462 PARAMETER Experiment Name: At_Germinating_Seeds_cDNA_P Parameter: Age (day) Value: 2 vs. 0
  misc_feature: MA Experiment 108462 PARAMETER Experiment Name: At_Germinating_Seeds_cDNA_P Parameter: Tissue Value: Germinating Seeds
  misc_feature: MA Experiment ID: 108463 Result: Up-regulated in Transcription
  misc_feature: MA Experiment 108463 PARAMETER Experiment Name: At_Germinating_Seeds_cDNA_P Parameter: Age (day) Value: 3 vs. 0
  misc_feature: MA Experiment 108463 PARAMETER Experiment Name: At_Germinating_Seeds_cDNA_P Parameter: Tissue Value: Germinating Seeds
  misc_feature: MA Experiment ID: 108464 Result: Up-regulated in Transcription
  misc_feature: MA Experiment 108464 PARAMETER Experiment Name: At_Germinating_Seeds_cDNA_P Parameter: Age (day) Value: 4 vs. 0
  misc_feature: MA Experiment 108464 PARAMETER Experiment Name: At_Germinating_Seeds_cDNA_P Parameter: Tissue Value: Germinating Seeds
  misc_feature: MA Experiment ID: 108577 Result: Down-regulated in Transcription
  misc_feature: MA Experiment 108577 PARAMETER Experiment Name: At_42deg_Heat_cDNA_P Parameter: Temperature (deg C) Value: 42 vs. 22
  misc_feature: MA Experiment 108577 PARAMETER Experiment Name: At_42deg_Heat_cDNA_P Parameter: Timepoint (hr) Value: 6
  misc_feature: MA Experiment 108577 PARAMETER Experiment Name: At_42deg_Heat_cDNA_P Parameter: Tissue Value: Aerial
  misc_feature: MA Experiment ID: 108595 Result: Down-regulated in Transcription
  misc_feature: MA Experiment 108595 PARAMETER Experiment Name: At_Ler-pi_Ovule_cDNA_P Parameter: Plant Line Value: null
  misc_feature: MA Experiment ID: 108668 Result: Down-regulated in Transcription
  misc_feature: MA Experiment 108668 PARAMETER Experiment Name: At_2mM_SA_cDNA_P Parameter: Plant Line Value: WS
  misc_feature: MA Experiment 108668 PARAMETER Experiment Name: At_2mM_SA_cDNA_P Parameter: Timepoint (hr) Value: 6
  misc_feature: MA Experiment 108668 PARAMETER Experiment Name: At_2mM_SA_cDNA_P Parameter: Treatment Value: 2mM SA vs. No Treatment
  misc_feature: MA Experiment ID: 20000069 Result: Down-regulated in Transcription
  misc_feature: MA Experiment 20000069 PARAMETER Experiment Name: At_100uM_ABA_Mutants_cDNA_P Parameter: Plant Line Value: CS23
  misc_feature: MA Experiment 20000069 PARAMETER Experiment Name: At_100uM_ABA_Mutants_cDNA_P Parameter: Timepoint (hr) Value: 6
  misc_feature: MA Experiment 20000069 PARAMETER Experiment Name: At_100uM_ABA_Mutants_cDNA_P Parameter: Tissue Value: Aerial
  misc_feature: MA Experiment 20000069 PARAMETER Experiment Name: At_100uM_ABA_Mutants_cDNA_P Parameter: Treatment Value: 100uM ABA vs. No Treatment
  misc_feature: MA Experiment ID: 20000070 Result: Down-regulated in Transcription
  misc_feature: MA Experiment 20000070 PARAMETER Experiment Name: At_100uM_ABA_Mutants_cDNA_P Parameter: Plant Line Value: CS24
  misc_feature: MA Experiment 20000070 PARAMETER Experiment Name: At_100uM_ABA_Mutants_cDNA_P Parameter: Timepoint (hr) Value: 6
  misc_feature: MA Experiment 20000070 PARAMETER Experiment Name: At_100uM_ABA_Mutants_cDNA_P Parameter: Tissue Value: Aerial
  misc_feature: MA Experiment 20000070 PARAMETER Experiment Name: At_100uM_ABA_Mutants_cDNA_P Parameter: Treatment Value: 100uM ABA vs. No Treatment
  misc_feature: MA Experiment ID: 20000071 Result: Down-regulated in Transcription
  misc_feature: MA Experiment 20000071 PARAMETER Experiment Name: At_100uM_ABA_Mutants_cDNA_P Parameter: Plant Line Value: CS8104
  misc_feature: MA Experiment 20000071 PARAMETER Experiment Name: At_100uM_ABA_Mutants_cDNA_P Parameter: Timepoint (hr) Value: 6
  misc_feature: MA Experiment 20000071 PARAMETER Experiment Name: At_100uM_ABA_Mutants_cDNA_P Parameter: Tissue Value: Aerial
  misc_feature: MA Experiment 20000071 PARAMETER Experiment Name: At_100uM_ABA_Mutants_cDNA_P Parameter: Treatment Value: 100uM ABA vs. No Treatment
  misc_feature: MA Experiment ID: 20000072 Result: Down-regulated in Transcription
  misc_feature: MA Experiment 20000072 PARAMETER Experiment Name: At_100uM_ABA_Mutants_cDNA_P Parameter: Plant Line Value: CS8105
  misc_feature: MA Experiment 20000072 PARAMETER Experiment Name: At_100uM_ABA_Mutants_cDNA_P Parameter: Timepoint (hr) Value: 6
  misc_feature: MA Experiment 20000072 PARAMETER Experiment Name: At_100uM_ABA_Mutants_cDNA_P Parameter: Tissue Value: Aerial
  misc_feature: MA Experiment 20000072 PARAMETER Experiment Name: At_100uM_ABA_Mutants_cDNA_P Parameter: Treatment Value: 100uM ABA vs. No Treatment
  misc_feature: MA Experiment ID: 20000086 Result: Down-regulated in Transcription
  misc_feature: MA Experiment 20000086 PARAMETER Experiment Name: At_100uM_ABA_Mutants_cDNA_P Parameter: Plant Line Value: CS22
  misc_feature: MA Experiment 20000086 PARAMETER Experiment Name: At_100uM_ABA_Mutants_cDNA_P Parameter: Timepoint (hr) Value: 6
  misc_feature: MA Experiment 20000086 PARAMETER Experiment Name: At_100uM_ABA_Mutants_cDNA_P Parameter: Tissue Value: Aerial
  misc_feature: MA Experiment 20000086 PARAMETER Experiment Name: At_100uM_ABA_Mutants_cDNA_P Parameter: Treatment Value: 100uM ABA vs. No Treatment
  misc_feature: MA Experiment ID: 20000087 Result: Down-regulated in Transcription
  misc_feature: MA Experiment 20000087 PARAMETER Experiment Name: At_100uM_ABA_Mutants_cDNA_P Parameter: Plant Line Value: WS
  misc_feature: MA Experiment 20000087 PARAMETER Experiment Name: At_100uM_ABA_Mutants_cDNA_P Parameter: Timepoint (hr) Value: 6
  misc_feature: MA Experiment 20000087 PARAMETER Experiment Name: At_100uM_ABA_Mutants_cDNA_P Parameter: Tissue Value: Aerial
  misc_feature: MA Experiment 20000087 PARAMETER Experiment Name: At_100uM_ABA_Mutants_cDNA_P Parameter: Treatment Value: 100uM ABA vs. No Treatment
  misc_feature: MA Experiment ID: 20000088 Result: Down-regulated in Transcription
  misc_feature: MA Experiment 20000088 PARAMETER Experiment Name: At_100uM_ABA_Mutants_cDNA_P Parameter: Plant Line Value: Landsberg
  misc_feature: MA Experiment 20000088 PARAMETER Experiment Name: At_100uM_ABA_Mutants_cDNA_P Parameter: Timepoint (hr) Value: 6
  misc_feature: MA Experiment 20000088 PARAMETER Experiment Name: At_100uM_ABA_Mutants_cDNA_P Parameter: Tissue Value: Aerial
  misc_feature: MA Experiment 20000088 PARAMETER Experiment Name: At_100uM_ABA_Mutants_cDNA_P Parameter: Treatment Value: 100uM ABA vs. No Treatment
  misc_feature: MA Experiment ID: 20000090 Result: Down-regulated in Transcription
  misc_feature: MA Experiment ID: 20000111 Result: Down-regulated in Transcription
  misc_feature: MA Experiment 20000111 PARAMETER Experiment Name: At_42deg_Heat_cDNA_P Parameter: Temperature (deg C) Value: 42 vs. 22
  misc_feature: MA Experiment 20000111 PARAMETER Experiment Name: At_42deg_Heat_cDNA_P Parameter: Timepoint (hr) Value: 6
  misc_feature: MA Experiment 20000111 PARAMETER Experiment Name: At_42deg_Heat_cDNA_P Parameter: Tissue Value: Aerial
  misc_feature: MA Experiment ID: 20000117 Result: Down-regulated in Transcription
  misc_feature: MA Experiment 20000117 PARAMETER Experiment Name: At_100uM_ABA_Mutants_cDNA_P Parameter: Plant Line Value: Columbia
  misc_feature: MA Experiment 20000117 PARAMETER Experiment Name: At_100uM_ABA_Mutants_cDNA_P Parameter: Timepoint (hr) Value: 6
  misc_feature: MA Experiment 20000117 PARAMETER Experiment Name: At_100uM_ABA_Mutants_cDNA_P Parameter: Tissue Value: Aerial
  misc_feature: MA Experiment 20000117 PARAMETER Experiment Name: At_100uM_ABA_Mutants_cDNA_P Parameter: Treatment Value: 100uM ABA vs. No Treatment
  misc_feature: MA Experiment ID: 20000173 Result: Down-regulated in Transcription
  misc_feature: MA Experiment 20000173 PARAMETER Experiment Name: At_42deg_Heat_P Parameter: Age (day) Value: 14
  misc_feature: MA Experiment 20000173 PARAMETER Experiment Name: At_42deg_Heat_P Parameter: Organism Value: A. thaliana
  misc_feature: MA Experiment 20000173 PARAMETER Experiment Name: At_42deg_Heat_P Parameter: Plant Line Value: WS
  misc_feature: MA Experiment 20000173 PARAMETER Experiment Name: At_42deg_Heat_P Parameter: Temperature (deg C) Value: 42 vs. 22
  misc_feature: MA Experiment 20000173 PARAMETER Experiment Name: At_42deg_Heat_P Parameter: Timepoint (hr) Value: 6
  misc_feature: MA Experiment 20000173 PARAMETER Experiment Name: At_42deg_Heat_P Parameter: Tissue Value: Aerial
  misc_feature: MA Experiment ID: 20000182 Result: Down-regulated in Transcription
  misc_feature: MA Experiment 20000182 PARAMETER Experiment Name: At_2mM_SA_P Parameter: Age (day) Value: 14
  misc_feature: MA Experiment 20000182 PARAMETER Experiment Name: At_2mM_SA_P Parameter: Organism Value: A. thaliana
  misc_feature: MA Experiment 20000182 PARAMETER Experiment Name: At_2mM_SA_P Parameter: Plant Line Value: WS
  misc_feature: MA Experiment 20000182 PARAMETER Experiment Name: At_2mM_SA_P Parameter: Timepoint (hr) Value: 6
  misc_feature: MA Experiment 20000182 PARAMETER Experiment Name: At_2mM_SA_P Parameter: Tissue Value: Aerial
  misc_feature: MA Experiment 20000182 PARAMETER Experiment Name: At_2mM_SA_P Parameter: Treatment Value: 2mM SA vs. No Treatment
  misc_feature: MA Experiment ID: 20000185 Result: Down-regulated in Transcription
  misc_feature: MA Experiment 20000185 PARAMETER Experiment Name: At_Roots__P Parameter: Age (day) Value: 7 vs. 21
  misc_feature: MA Experiment 20000185 PARAMETER Experiment Name: At_Roots__P Parameter: Organism Value: A. thaliana
  misc_feature: MA Experiment 20000185 PARAMETER Experiment Name: At_Roots__P Parameter: Tissue Value: Roots vs. Whole Plant
  misc_feature: MA Experiment ID: 20000264 Result: Down-regulated in Transcription
  misc_feature: MA Experiment 20000264 PARAMETER Experiment Name: At_Open_Flower_P Parameter: Age (day) Value: 21
  misc_feature: MA Experiment 20000264 PARAMETER Experiment Name: At_Open_Flower_P Parameter: Plant Line Value: WS
  misc_feature: MA Experiment 20000264 PARAMETER Experiment Name: At_Open_Flower_P Parameter: Tissue Value: Open Flower vs. Whole Plant
  misc_feature: MA Experiment ID: 20000286 Result: Down-regulated in Transcription
  misc_feature: MA Experiment 20000286 PARAMETER Experiment Name: At_Open_Flower_P Parameter: Age (day) Value: 21
  misc_feature: MA Experiment 20000286 PARAMETER Experiment Name: At_Open_Flower_P Parameter: Plant Line Value: WS
  misc_feature: MA Experiment 20000286 PARAMETER Experiment Name: At_Open_Flower_P Parameter: Tissue Value: Half Open vs. Whole Plant
  misc_feature: MA Experiment ID: 20000436 Result: Down-regulated in Transcription
  misc_feature: MA Experiment 20000436 PARAMETER Experiment Name: At_Drought_P Parameter: Age (day) Value: 7
  misc_feature: MA Experiment 20000436 PARAMETER Experiment Name: At_Drought_P Parameter: Organism Value: A. thaliana
  misc_feature: MA Experiment 20000436 PARAMETER Experiment Name: At_Drought_P Parameter: Plant Line Value: WS
  misc_feature: MA Experiment 20000436 PARAMETER Experiment Name: At_Drought_P Parameter: Timepoint (hr) Value: 12
  misc_feature: MA Experiment 20000436 PARAMETER Experiment Name: At_Drought_P Parameter: Tissue Value: Whole Plant
  misc_feature: MA Experiment 20000436 PARAMETER Experiment Name: At_Drought_P Parameter: Treatment Value: Drought vs. No Drought
  misc_feature: MA Experiment ID: 20000438 Result: Up-regulated in Transcription
  misc_feature: MA Experiment 20000438 PARAMETER Experiment Name: At_Shoots__P Parameter: Age (day) Value: 14
  misc_feature: MA Experiment 20000438 PARAMETER Experiment Name: At_Shoots__P Parameter: Tissue Value: Shoots vs. Whole Plant
  misc_feature: MA Experiment ID: 20000439 Result: Down-regulated in Transcription
  misc_feature: MA Experiment 20000439 PARAMETER Experiment Name: At_Roots__P Parameter: Age (day) Value: 14 vs. 21
  misc_feature: MA Experiment 20000439 PARAMETER Experiment Name: At_Roots__P Parameter: Organism Value: A. thaliana
  misc_feature: MA Experiment 20000439 PARAMETER Experiment Name: At_Roots__P Parameter: Tissue Value: Roots vs. Whole Plant
  misc_feature: MA Experiment ID: 20000460 Result: Down-regulated in Transcription
  misc_feature: MA Experiment 20000460 PARAMETER Experiment Name: At_10percent_PEG_P Parameter: Age (day) Value: 12
  misc_feature: MA Experiment 20000460 PARAMETER Experiment Name: At_10percent_PEG_P Parameter: Organism Value: A. thaliana
  misc_feature: MA Experiment 20000460 PARAMETER Experiment Name: At_10percent_PEG_P Parameter: Plant Line Value: WS
  misc_feature: MA Experiment 20000460 PARAMETER Experiment Name: At_10percent_PEG_P Parameter: Timepoint (day) Value: 12
  misc_feature: MA Experiment 20000460 PARAMETER Experiment Name: At_10percent_PEG_P Parameter: Tissue Value: Whole Plant
  misc_feature: MA Experiment 20000460 PARAMETER Experiment Name: At_10percent_PEG_P Parameter: Treatment Value: 10percent PEG vs. No Treatment
  misc_feature: MA Experiment ID: 20000495 Result: Down-regulated in Transcription
  misc_feature: MA Experiment 20000495 PARAMETER Experiment Name: At_Guard_Cells_P Parameter: Harvest Date Value: 8/2/2002
  misc_feature: MA Experiment 20000495 PARAMETER Experiment Name: At_Guard_Cells_P Parameter: Organism Value: A. thaliana
  misc_feature: MA Experiment 20000495 PARAMETER Experiment Name: At_Guard_Cells_P Parameter: Tissue Value: Guard Cells vs. Leaves
  misc_feature: MA Experiment ID: 20000496 Result: Down-regulated in Transcription
  misc_feature: MA Experiment 20000496 PARAMETER Experiment Name: At_Guard_Cells_P Parameter: Harvest Date Value: 7/19/2002
  misc_feature: MA Experiment 20000496 PARAMETER Experiment Name: At_Guard_Cells_P Parameter: Organism Value: Canola
  misc_feature: MA Experiment 20000496 PARAMETER Experiment Name: At_Guard_Cells_P Parameter: Tissue Value: Guard Cells vs. Leaves
  misc_feature: MA Experiment ID: 20000527 Result: Down-regulated in Transcription
  misc_feature: MA Experiment 20000527 PARAMETER Experiment Name: At_10percent_PEG_P Parameter: Age (day) Value: 20
  misc_feature: MA Experiment 20000527 PARAMETER Experiment Name: At_10percent_PEG_P Parameter: Organism Value: A. thaliana
  misc_feature: MA Experiment 20000527 PARAMETER Experiment Name: At_10percent_PEG_P Parameter: Plant Line Value: WS
  misc_feature: MA Experiment 20000527 PARAMETER Experiment Name: At_10percent_PEG_P Parameter: Timepoint (day) Value: 20
  misc_feature: MA Experiment 20000527 PARAMETER Experiment Name: At_10percent_PEG_P Parameter: Tissue Value: Whole Plant
  misc_feature: MA Experiment 20000527 PARAMETER Experiment Name: At_10percent_PEG_P Parameter: Treatment Value: 10percent PEG vs. No Treatment
  misc_feature: MA Experiment ID: 20000794 Result: Down-regulated in Transcription
  misc_feature: MA Experiment 20000794 PARAMETER Experiment Name: At_Petals_P Parameter: Age (day) Value: 23-25 days
  misc_feature: MA Experiment 20000794 PARAMETER Experiment Name: At_Petals_P Parameter: Plant Line Value: WS
  misc_feature: MA Experiment 20000794 PARAMETER Experiment Name: At_Petals_P Parameter: Tissue Value: Petals vs. Whole plant
  misc_feature: MA Experiment ID: 20001248 Result: Down-regulated in Transcription
  misc_feature: MA Experiment 20001248 PARAMETER Experiment Name: At_Far-red-induction_P Parameter: Age (day) Value: 7
  misc_feature: MA Experiment 20001248 PARAMETER Experiment Name: At_Far-red-induction_P Parameter: Light Value: Far-red vs. White
  misc_feature: MA Experiment 20001248 PARAMETER Experiment Name: At_Far-red-induction_P Parameter: Organism Value: A. thaliana
  misc_feature: MA Experiment 20001248 PARAMETER Experiment Name: At_Far-red-induction_P Parameter: Plant Line Value: Columbia
  misc_feature: MA Experiment 20001248 PARAMETER Experiment Name: At_Far-red-induction_P Parameter: Timepoint (hr) Value: 4
  misc_feature: MA Experiment 20001248 PARAMETER Experiment Name: At_Far-red-induction_P Parameter: Tissue Value: Whole Plant
  misc_feature: MA Experiment ID: 20001503 Result: Down-regulated in Transcription
  misc_feature: MA Experiment 20001503 PARAMETER Experiment Name: At_Far-red-enriched_P Parameter: Age (day) Value: 7
  misc_feature: MA Experiment 20001503 PARAMETER Experiment Name: At_Far-red-enriched_P Parameter: Light Value: Far-red enriched vs. White
  misc_feature: MA Experiment 20001503 PARAMETER Experiment Name: At_Far-red-enriched_P Parameter: Organism Value: A. thaliana
  misc_feature: MA Experiment 20001503 PARAMETER Experiment Name: At_Far-red-enriched_P Parameter: Plant Line Value: Columbia
  misc_feature: MA Experiment 20001503 PARAMETER Experiment Name: At_Far-red-enriched_P Parameter: Timepoint (day) Value: 3
  misc_feature: MA Experiment 20001503 PARAMETER Experiment Name: At_Far-red-enriched_P Parameter: Tissue Value: Whole Plant
  misc_feature: MA Experiment ID: 20001556 Result: Down-regulated in Transcription
  misc_feature: MA Experiment 20001556 PARAMETER Experiment Name: At_Drought_Soil_Dry_P Parameter: Age (day) Value: 26
  misc_feature: MA Experiment 20001556 PARAMETER Experiment Name: At_Drought_Soil_Dry_P Parameter: Organism Value: A. thaliana
  misc_feature: MA Experiment 20001556 PARAMETER Experiment Name: At_Drought_Soil_Dry_P Parameter: Plant Line Value: WS
  misc_feature: MA Experiment 20001556 PARAMETER Experiment Name: At_Drought_Soil_Dry_P Parameter: Post Timepoint (hr) Value: None
  misc_feature: MA Experiment 20001556 PARAMETER Experiment Name: At_Drought_Soil_Dry_P Parameter: Post-Treatment Value: None
  misc_feature: MA Experiment 20001556 PARAMETER Experiment Name: At_Drought_Soil_Dry_P Parameter: Timepoint (day) Value: 12
  misc_feature: MA Experiment 20001556 PARAMETER Experiment Name: At_Drought_Soil_Dry_P Parameter: Treatment Value: Drought vs. No Drought
  misc_feature: MA Experiment ID: 20001557 Result: Down-regulated in Transcription
  misc_feature: MA Experiment 20001557 PARAMETER Experiment Name: At_Drought_Soil_Dry_P Parameter: Age (day) Value: 27
  misc_feature: MA Experiment 20001557 PARAMETER Experiment Name: At_Drought_Soil_Dry_P Parameter: Organism Value: A. thaliana
  misc_feature: MA Experiment 20001557 PARAMETER Experiment Name: At_Drought_Soil_Dry_P Parameter: Plant Line Value: WS
  misc_feature: MA Experiment 20001557 PARAMETER Experiment Name: At_Drought_Soil_Dry_P Parameter: Post Timepoint (hr) Value: 3
  misc_feature: MA Experiment 20001557 PARAMETER Experiment Name: At_Drought_Soil_Dry_P Parameter: Post-Treatment Value: Re-Water vs. No Drought
  misc_feature: MA Experiment 20001557 PARAMETER Experiment Name: At_Drought_Soil_Dry_P Parameter: Timepoint (day) Value: 13
  misc_feature: MA Experiment 20001557 PARAMETER Experiment Name: At_Drought_Soil_Dry_P Parameter: Treatment Value: Drought vs. No Drought
  misc_feature: MA Experiment ID: 20001558 Result: Down-regulated in Transcription
  misc_feature: MA Experiment 20001558 PARAMETER Experiment Name: At_Drought_Soil_Dry_P Parameter: Age (day) Value: 27
  misc_feature: MA Experiment 20001558 PARAMETER Experiment Name: At_Drought_Soil_Dry_P Parameter: Organism Value: A. thaliana
  misc_feature: MA Experiment 20001558 PARAMETER Experiment Name: At_Drought_Soil_Dry_P Parameter: Plant Line Value: WS
  misc_feature: MA Experiment 20001558 PARAMETER Experiment Name: At_Drought_Soil_Dry_P Parameter: Post Timepoint (hr) Value: 6
  misc_feature: MA Experiment 20001558 PARAMETER Experiment Name: At_Drought_Soil_Dry_P Parameter: Post-Treatment Value: Re-Water vs. No Drought
  misc_feature: MA Experiment 20001558 PARAMETER Experiment Name: At_Drought_Soil_Dry_P Parameter: Timepoint (day) Value: 13
  misc_feature: MA Experiment 20001558 PARAMETER Experiment Name: At_Drought_Soil_Dry_P Parameter: Treatment Value: Drought vs. No Drought
  misc_feature: MA Experiment ID: 20001559 Result: Down-regulated in Transcription
  misc_feature: MA Experiment 20001559 PARAMETER Experiment Name: At_Drought_Soil_Dry_P Parameter: Age (day) Value: 28
  misc_feature: MA Experiment 20001559 PARAMETER Experiment Name: At_Drought_Soil_Dry_P Parameter: Organism Value: A. thaliana
  misc_feature: MA Experiment 20001559 PARAMETER Experiment Name: At_Drought_Soil_Dry_P Parameter: Plant Line Value: WS
  misc_feature: MA Experiment 20001559 PARAMETER Experiment Name: At_Drought_Soil_Dry_P Parameter: Post Timepoint (hr) Value: 29
  misc_feature: MA Experiment 20001559 PARAMETER Experiment Name: At_Drought_Soil_Dry_P Parameter: Post-Treatment Value: Re-Water vs. No Drought
  misc_feature: MA Experiment 20001559 PARAMETER Experiment Name: At_Drought_Soil_Dry_P Parameter: Timepoint (day) Value: 14
  misc_feature: MA Experiment 20001559 PARAMETER Experiment Name: At_Drought_Soil_Dry_P Parameter: Treatment Value: Drought vs. No Drought
  misc_feature: MA Experiment ID: 20001560 Result: Down-regulated in Transcription
  misc_feature: MA Experiment 20001560 PARAMETER Experiment Name: At_Drought_Soil_Dry_P Parameter: Age (day) Value: 28
  misc_feature: MA Experiment 20001560 PARAMETER Experiment Name: At_Drought_Soil_Dry_P Parameter: Organism Value: A. thaliana
  misc_feature: MA Experiment 20001560 PARAMETER Experiment Name: At_Drought_Soil_Dry_P Parameter: Plant Line Value: WS
  misc_feature: MA Experiment 20001560 PARAMETER Experiment Name: At_Drought_Soil_Dry_P Parameter: Post Timepoint (hr) Value: None
  misc_feature: MA Experiment 20001560 PARAMETER Experiment Name: At_Drought_Soil_Dry_P Parameter: Post-Treatment Value: None
  misc_feature: MA Experiment 20001560 PARAMETER Experiment Name: At_Drought_Soil_Dry_P Parameter: Timepoint (day) Value: 14
  misc_feature: MA Experiment 20001560 PARAMETER Experiment Name: At_Drought_Soil_Dry_P Parameter: Treatment Value: Drought vs. No Drought
  misc_feature: MA Experiment ID: 20001756 Result: Down-regulated in Transcription
  misc_feature: MA Experiment 20001756 PARAMETER Experiment Name: At_50mM_NH4NO3_L-to-H_P Parameter: Timepoint (hr) Value: 4
  misc_feature: MA Experiment 20001756 PARAMETER Experiment Name: At_50mM_NH4NO3_L-to-H_P Parameter: Tissue Value: Leaf
  misc_feature: MA Experiment 20001756 PARAMETER Experiment Name: At_50mM_NH4NO3_L-to-H_P Parameter: Treatment Value: 50mM NH4NO3 vs 100mM Mannitol
  misc_feature: MA Experiment ID: 20001757 Result: Up-regulated in Transcription
  misc_feature: MA Experiment 20001757 PARAMETER Experiment Name: At_50mM_NH4NO3_L-to-H_P Parameter: Timepoint (hr) Value: 6
  misc_feature: MA Experiment 20001757 PARAMETER Experiment Name: At_50mM_NH4NO3_L-to-H_P Parameter: Tissue Value: Leaf
  misc_feature: MA Experiment 20001757 PARAMETER Experiment Name: At_50mM_NH4NO3_L-to-H_P Parameter: Treatment Value: 50mM NH4NO3 vs 100mM Mannitol
  misc_feature: MA Experiment ID: 20001761 Result: Up-regulated in Transcription
  misc_feature: MA Experiment 20001761 PARAMETER Experiment Name: At_50mM_NH4NO3_L-to-H_P Parameter: Timepoint (hr) Value: 4
  misc_feature: MA Experiment 20001761 PARAMETER Experiment Name: At_50mM_NH4NO3_L-to-H_P Parameter: Tissue Value: Siliques
  misc_feature: MA Experiment 20001761 PARAMETER Experiment Name: At_50mM_NH4NO3_L-to-H_P Parameter: Treatment Value: 50mM NH4NO3 vs 100mM Mannitol
  misc_feature: MA Experiment ID: 20001903 Result: Up-regulated in Transcription
  misc_feature: MA Experiment 20001903 PARAMETER Experiment Name: At_Drought_Reproduction_P Parameter: Age (day) Value: 35
  misc_feature: MA Experiment 20001903 PARAMETER Experiment Name: At_Drought_Reproduction_P Parameter: Organism Value: A. thaliana
  misc_feature: MA Experiment 20001903 PARAMETER Experiment Name: At_Drought_Reproduction_P Parameter: Plant Line Value: WS
  misc_feature: MA Experiment 20001903 PARAMETER Experiment Name: At_Drought_Reproduction_P Parameter: Timepoint (day) Value: 5
  misc_feature: MA Experiment 20001903 PARAMETER Experiment Name: At_Drought_Reproduction_P Parameter: Tissue Value: Rosettes
  misc_feature: MA Experiment 20001903 PARAMETER Experiment Name: At_Drought_Reproduction_P Parameter: Treatment Value: Drought vs. No Drought
  misc_feature: MA Experiment ID: 20001904 Result: Down-regulated in Transcription
  misc_feature: MA Experiment 20001904 PARAMETER Experiment Name: At_Drought_Reproduction_P Parameter: Age (day) Value: 37
  misc_feature: MA Experiment 20001904 PARAMETER Experiment Name: At_Drought_Reproduction_P Parameter: Organism Value: A. thaliana
  misc_feature: MA Experiment 20001904 PARAMETER Experiment Name: At_Drought_Reproduction_P Parameter: Plant Line Value: WS
  misc_feature: MA Experiment 20001904 PARAMETER Experiment Name: At_Drought_Reproduction_P Parameter: Timepoint (day) Value: 7
  misc_feature: MA Experiment 20001904 PARAMETER Experiment Name: At_Drought_Reproduction_P Parameter: Tissue Value: Rosettes
  misc_feature: MA Experiment 20001904 PARAMETER Experiment Name: At_Drought_Reproduction_P Parameter: Treatment Value: Drought vs. No Drought
  misc_feature: MA Experiment ID: 20001905 Result: Down-regulated in Transcription
  misc_feature: MA Experiment 20001905 PARAMETER Experiment Name: At_Drought_Reproduction_P Parameter: Age (day) Value: 40
  misc_feature: MA Experiment 20001905 PARAMETER Experiment Name: At_Drought_Reproduction_P Parameter: Organism Value: A. thaliana
  misc_feature: MA Experiment 20001905 PARAMETER Experiment Name: At_Drought_Reproduction_P Parameter: Plant Line Value: WS
  misc_feature: MA Experiment 20001905 PARAMETER Experiment Name: At_Drought_Reproduction_P Parameter: Timepoint (day) Value: 10
  misc_feature: MA Experiment 20001905 PARAMETER Experiment Name: At_Drought_Reproduction_P Parameter: Tissue Value: Rosettes
  misc_feature: MA Experiment 20001905 PARAMETER Experiment Name: At_Drought_Reproduction_P Parameter: Treatment Value: Drought vs. No Drought
  misc_feature: MA Experiment ID: 20001906 Result: Down-regulated in Transcription
  misc_feature: MA Experiment 20001906 PARAMETER Experiment Name: At_Drought_Reproduction_P Parameter: Age (day) Value: 35
  misc_feature: MA Experiment 20001906 PARAMETER Experiment Name: At_Drought_Reproduction_P Parameter: Organism Value: A. thaliana
  misc_feature: MA Experiment 20001906 PARAMETER Experiment Name: At_Drought_Reproduction_P Parameter: Plant Line Value: WS
  misc_feature: MA Experiment 20001906 PARAMETER Experiment Name: At_Drought_Reproduction_P Parameter: Timepoint (day) Value: 5
  misc_feature: MA Experiment 20001906 PARAMETER Experiment Name: At_Drought_Reproduction_P Parameter: Tissue Value: Siliques
  misc_feature: MA Experiment 20001906 PARAMETER Experiment Name: At_Drought_Reproduction_P Parameter: Treatment Value: Drought vs. No Drought
  misc_feature: MA Experiment ID: 20001908 Result: Down-regulated in Transcription
  misc_feature: MA Experiment 20001908 PARAMETER Experiment Name: At_Drought_Reproduction_P Parameter: Age (day) Value: 40
  misc_feature: MA Experiment 20001908 PARAMETER Experiment Name: At_Drought_Reproduction_P Parameter: Organism Value: A. thaliana
  misc_feature: MA Experiment 20001908 PARAMETER Experiment Name: At_Drought_Reproduction_P Parameter: Plant Line Value: WS
  misc_feature: MA Experiment 20001908 PARAMETER Experiment Name: At_Drought_Reproduction_P Parameter: Timepoint (day) Value: 10
  misc_feature: MA Experiment 20001908 PARAMETER Experiment Name: At_Drought_Reproduction_P Parameter: Tissue Value: Siliques
  misc_feature: MA Experiment 20001908 PARAMETER Experiment Name: At_Drought_Reproduction_P Parameter: Treatment Value: Drought vs. No Drought
  misc_feature: MA Experiment ID: 20001910 Result: Down-regulated in Transcription
  misc_feature: MA Experiment 20001910 PARAMETER Experiment Name: At_Drought_Reproduction_P Parameter: Age (day) Value: 37
  misc_feature: MA Experiment 20001910 PARAMETER Experiment Name: At_Drought_Reproduction_P Parameter: Organism Value: A. thaliana
  misc_feature: MA Experiment 20001910 PARAMETER Experiment Name: At_Drought_Reproduction_P Parameter: Plant Line Value: WS
  misc_feature: MA Experiment 20001910 PARAMETER Experiment Name: At_Drought_Reproduction_P Parameter: Timepoint (day) Value: 7
  misc_feature: MA Experiment 20001910 PARAMETER Experiment Name: At_Drought_Reproduction_P Parameter: Tissue Value: Flowers
  misc_feature: MA Experiment 20001910 PARAMETER Experiment Name: At_Drought_Reproduction_P Parameter: Treatment Value: Drought vs. No Drought
  misc_feature: MA Experiment ID: 20001911 Result: Down-regulated in Transcription
  misc_feature: MA Experiment 20001911 PARAMETER Experiment Name: At_Drought_Reproduction_P Parameter: Age (day) Value: 40
  misc_feature: MA Experiment 20001911 PARAMETER Experiment Name: At_Drought_Reproduction_P Parameter: Organism Value: A. thaliana
  misc_feature: MA Experiment 20001911 PARAMETER Experiment Name: At_Drought_Reproduction_P Parameter: Plant Line Value: WS
  misc_feature: MA Experiment 20001911 PARAMETER Experiment Name: At_Drought_Reproduction_P Parameter: Timepoint (day) Value: 10
  misc_feature: MA Experiment 20001911 PARAMETER Experiment Name: At_Drought_Reproduction_P Parameter: Tissue Value: Flowers
  misc_feature: MA Experiment 20001911 PARAMETER Experiment Name: At_Drought_Reproduction_P Parameter: Treatment Value: Drought vs. No Drought
gatcctcattcatctctaatactaaaatctaatctcttccttgctcactcaccaatcaaactcaaaaaactcttgaatttttcaagaacaaaagaaaaagacatctttaatggcggccatgaactcgagtgttctcacttgcagctacgcaattgctggctctggctcggtagagcttaaccagaaagttggtttggtgaattcatcagttgggtttggtcagaagaaacagatgattatgcctgtgatcaaagctcaacgcgttgttggtgatgatgttgatggatctaatggaagacgatcagccatggttttcttagcagctacactcttctccactgctgctgtttctgcttctgctaatgctggcgtcattgacgaatacctcgagaggagcaaaaccaacaaagaacttaatgataagaagagattggcaacaagtggagcaaactttgcgagagcattcactgttcaattcggaagctgcaagttccctgagaatttcactggctgccaagatcttgccaagcaaaagaaagttccatttatctcagaagatattgctttggaatgcgaaggcaaggacaagtacaagtgtggttccaatgttttctggaaatggtgaagaactttgtttgttttcatctattcttatataaatccaacaatgtatctatctctctctattcatgaaagttctcgcatccatttgaatctatcaagctaaaactctattga

SEQ ID NO: 37408 - protein, 171 aa, Arabidopsis thaliana
  peptide (1)..(171): Ceres Seq. ID no. 13592501
  misc_feature (34)..(171): Pfam Name: Photosystem I reaction centre subunit N (PSAN or PSI-N) Pfam Description: Photosystem I reaction centre subunit N (PSAN
  misc_feature (34)..(171): Pfam Name: Photosystem I reaction centre subunit N (PSAN or PSI-N) Pfam Description: Photosystem I reaction centre subunit N (PSAN
  misc_feature (34)..(171): Pfam Name: Photosystem I reaction centre subunit N (PSAN or PSI-N) Pfam Description: Photosystem I reaction centre subunit N (PSAN
  misc_feature (87)..(136): Homolog of NCBI NO: 485082 NR Description: photosystem I 9K protein - rice (strain
  misc_feature (74)..(165): Homolog of NCBI NO: 11134150 NR Description: Photosystem I reaction centre subunit N,
  misc_feature (39)..(165): Homolog of NCBI NO: 12744797 NR Description: PsaN precursor [Chlamydomonas reinhardtii]
  misc_feature (81)..(171): Homolog of NCBI NO: 3914466 NR Description: Photosystem I reaction centre subunit N,
  misc_feature (74)..(165): Homolog of NCBI NO: 11134150 NR Description: Photosystem I reaction centre subunit N,
  misc_feature (81)..(171): Homolog of NCBI NO: 3914466 NR Description: Photosystem I reaction centre subunit N,
  misc_feature (1)..(171): Homolog of NCBI NO: 28629385 NR Description: photosystem I-N subunit [Phaseolus vulgaris]
  misc_feature (1)..(171): Homolog of NCBI NO: 15237593 NR Description: photosystem I reaction center subunit PSI-N
  misc_feature (1)..(171): Homolog of NCBI NO: 28629385 NR Description: photosystem I-N subunit [Phaseolus vulgaris]
  misc_feature (30)..(171): Homolog of NCBI NO: 400879 NR Description: Photosystem I reaction centre subunit N,
  misc_feature (81)..(171): Homolog of NCBI NO: 3914466 NR Description: Photosystem I reaction centre subunit N,
  misc_feature (39)..(165): Homolog of NCBI NO: 12744797 NR Description: PsaN precursor [Chlamydomonas reinhardtii]
  misc_feature (74)..(165): Homolog of NCBI NO: 11134150 NR Description: Photosystem I reaction centre subunit N,
  misc_feature (87)..(136): Homolog of NCBI NO: 485082 NR Description: photosystem I 9K protein - rice (strain
  misc_feature (1)..(171): Homolog of NCBI NO: 15237593 NR Description: photosystem I reaction center subunit PSI-N
  misc_feature (30)..(171): Homolog of NCBI NO: 400879 NR Description: Photosystem I reaction centre subunit N,
  misc_feature (39)..(165): Homolog of NCBI NO: 12744797 NR Description: PsaN precursor [Chlamydomonas reinhardtii]
  misc_feature (87)..(136): Homolog of NCBI NO: 485082 NR Description: photosystem I 9K protein - rice (strain
  misc_feature (30)..(171): Homolog of NCBI NO: 400879 NR Description: Photosystem I reaction centre subunit N,
  misc_feature (1)..(171): Homolog of NCBI NO: 28629385 NR Description: photosystem I-N subunit [Phaseolus vulgaris]
  misc_feature (1)..(171): Homolog of NCBI NO: 15237593 NR Description: photosystem I reaction center subunit PSI-N
MAAMNSSVLTCSYAIAGSGSVELNQKVGLVNSSVGFGQKKQMIMPVIKAQRVVGDDVDGSNGRRSAMVFLAATLFSTAAVSASANAGVIDEYLERSKTNKELNDKKRLATSGANFARAFTVQFGSCKFPENFTGCQDLAKQKKVPFISEDIALECEGKDKYKCGSNVFWKW

SEQ ID NO: 37409 - protein, 168 aa, Arabidopsis thaliana
  peptide (1)..(168): Ceres Seq. ID no. 13592502
  misc_feature (31)..(168): Pfam Name: Photosystem I reaction centre subunit N (PSAN or PSI-N) Pfam Description: Photosystem I reaction centre subunit N (PSAN
  misc_feature (31)..(168): Pfam Name: Photosystem I reaction centre subunit N (PSAN or PSI-N) Pfam Description: Photosystem I reaction centre subunit N (PSAN
  misc_feature (31)..(168): Pfam Name: Photosystem I reaction centre subunit N (PSAN or PSI-N) Pfam Description: Photosystem I reaction centre subunit N (PSAN
  misc_feature (84)..(133): Homolog of NCBI NO: 485082 NR Description: photosystem I 9K protein - rice (strain
  misc_feature (71)..(162): Homolog of NCBI NO: 11134150 NR Description: Photosystem I reaction centre subunit N,
  misc_feature (36)..(162): Homolog of NCBI NO: 12744797 NR Description: PsaN precursor [Chlamydomonas reinhardtii]
  misc_feature (78)..(168): Homolog of NCBI NO: 3914466 NR Description: Photosystem I reaction centre subunit N,
  misc_feature (71)..(162): Homolog of NCBI NO: 11134150 NR Description: Photosystem I reaction centre subunit N,
  misc_feature (78)..(168): Homolog of NCBI NO: 3914466 NR Description: Photosystem I reaction centre subunit N,
  misc_feature (1)..(168): Homolog of NCBI NO: 28629385 NR Description: photosystem I-N subunit [Phaseolus vulgaris]
  misc_feature (1)..(168): Homolog of NCBI NO: 15237593 NR Description: photosystem I reaction center subunit PSI-N
  misc_feature (1)..(168): Homolog of NCBI NO: 28629385 NR Description: photosystem I-N subunit [Phaseolus vulgaris]
  misc_feature (27)..(168): Homolog of NCBI NO: 400879 NR Description: Photosystem I reaction centre subunit N,
  misc_feature (78)..(168): Homolog of NCBI NO: 3914466 NR Description: Photosystem I reaction centre subunit N,
  misc_feature (36)..(162): Homolog of NCBI NO: 12744797 NR Description: PsaN precursor [Chlamydomonas reinhardtii]
  misc_feature (71)..(162): Homolog of NCBI NO: 11134150 NR Description: Photosystem I reaction centre subunit N,
  misc_feature (84)..(133): Homolog of NCBI NO: 485082 NR Description: photosystem I 9K protein - rice (strain
  misc_feature (1)..(168): Homolog of NCBI NO: 15237593 NR Description: photosystem I reaction center subunit PSI-N
  misc_feature (27)..(168): Homolog of NCBI NO: 400879 NR Description: Photosystem I reaction centre subunit N,
  misc_feature (36)..(162): Homolog of NCBI NO: 12744797 NR Description: PsaN precursor [Chlamydomonas reinhardtii]
  misc_feature (84)..(133): Homolog of NCBI NO: 485082 NR Description: photosystem I 9K protein - rice (strain
  misc_feature (27)..(168): Homolog of NCBI NO: 400879 NR Description: Photosystem I reaction centre subunit N,
  misc_feature (1)..(168): Homolog of NCBI NO: 28629385 NR Description: photosystem I-N subunit [Phaseolus vulgaris]
  misc_feature (1)..(168): Homolog of NCBI NO: 15237593 NR Description: photosystem I reaction center subunit PSI-N
MNSSVLTCSYAIAGSGSVELNQKVGLVNSSVGFGQKKQMIMPVIKAQRVVGDDVDGSNGRRSAMVFLAATLFSTAAVSASANAGVIDEYLERSKTNKELNDKKRLATSGANFARAFTVQFGSCKFPENFTGCQDLAKQKKVPFISEDIALECEGKDKYKCGSNVFWKW

SEQ ID NO: 37410 - protein, 130 aa, Arabidopsis thaliana
  peptide (1)..(130): Ceres Seq. ID no. 13592503
  misc_feature (1)..(130): Pfam Name: Photosystem I reaction centre subunit N (PSAN or PSI-N) Pfam Description: Photosystem I reaction centre subunit N (PSAN
  misc_feature (1)..(130): Pfam Name: Photosystem I reaction centre subunit N (PSAN or PSI-N) Pfam Description: Photosystem I reaction centre subunit N (PSAN
  misc_feature (1)..(130): Pfam Name: Photosystem I reaction centre subunit N (PSAN or PSI-N) Pfam Description: Photosystem I reaction centre subunit N (PSAN
  misc_feature (46)..(95): Homolog of NCBI NO: 485082 NR Description: photosystem I 9K protein - rice (strain
  misc_feature (33)..(124): Homolog of NCBI NO: 11134150 NR Description: Photosystem I reaction centre subunit N,
  misc_feature (1)..(124): Homolog of NCBI NO: 12744797 NR Description: PsaN precursor [Chlamydomonas reinhardtii]
  misc_feature (40)..(130): Homolog of NCBI NO: 3914466 NR Description: Photosystem I reaction centre subunit N,
  misc_feature (33)..(124): Homolog of NCBI NO: 11134150 NR Description: Photosystem I reaction centre subunit N,
  misc_feature (40)..(130): Homolog of NCBI NO: 3914466 NR Description: Photosystem I reaction centre subunit N,
  misc_feature (1)..(130): Homolog of NCBI NO: 28629385 NR Description: photosystem I-N subunit [Phaseolus vulgaris]
  misc_feature (1)..(130): Homolog of NCBI NO: 15237593 NR Description: photosystem I reaction center subunit PSI-N
  misc_feature (1)..(130): Homolog of NCBI NO: 28629385 NR Description: photosystem I-N subunit [Phaseolus vulgaris]
  misc_feature (1)..(130): Homolog of NCBI NO: 400879 NR Description: Photosystem I reaction centre subunit N,
  misc_feature (40)..(130): Homolog of NCBI NO: 3914466 NR Description: Photosystem I reaction centre subunit N,
  misc_feature (1)..(124): Homolog of NCBI NO: 12744797 NR Description: PsaN precursor [Chlamydomonas reinhardtii]
  misc_feature (33)..(124): Homolog of NCBI NO: 11134150 NR Description: Photosystem I reaction centre subunit N,
  misc_feature (46)..(95): Homolog of NCBI NO: 485082 NR Description: photosystem I 9K protein - rice (strain
  misc_feature (1)..(130): Homolog of NCBI NO: 15237593 NR Description: photosystem I reaction center subunit PSI-N
  misc_feature (1)..(130): Homolog of NCBI NO: 400879 NR Description: Photosystem I reaction centre subunit N,
  misc_feature (1)..(124): Homolog of NCBI NO: 12744797 NR Description: PsaN precursor [Chlamydomonas reinhardtii]
  misc_feature (46)..(95): Homolog of NCBI NO: 485082 NR Description: photosystem I 9K protein - rice (strain
  misc_feature (1)..(130): Homolog of NCBI NO: 400879 NR Description: Photosystem I reaction centre subunit N,
  misc_feature (1)..(130): Homolog of NCBI NO: 28629385 NR Description: photosystem I-N subunit [Phaseolus vulgaris]
  misc_feature (1)..(130): Homolog of NCBI NO: 15237593 NR Description: photosystem I reaction center subunit PSI-N
MIMPVIKAQRVVGDDVDGSNGRRSAMVFLAATLFSTAAVSASANAGVIDEYLERSKTNKELNDKKRLATSGANFARAFTVQFGSCKFPENFTGCQDLAKQKKVPFISEDIALECEGKDKYKCGSNVFWKW

SEQ ID NO: 37411 - DNA, 751 bp, Arabidopsis thaliana
  misc_feature (1)..(751): Ceres Seq. ID no. 12580067
  misc_feature: MA Experiment ID: 108433 Result: Up-regulated in Transcription
  misc_feature: MA Experiment 108433 PARAMETER Experiment Name: At_rhl_Mutant2_cDNA_P Parameter: Age (day) Value: 7
  misc_feature: MA Experiment 108433 PARAMETER Experiment Name: At_rhl_Mutant2_cDNA_P Parameter: Organism Value: A. thaliana
  misc_feature: MA Experiment 108433 PARAMETER Experiment Name: At_rhl_Mutant2_cDNA_P Parameter: Plant Line Value: rhl Mutant vs. wt landsburg
  misc_feature: MA Experiment 108433 PARAMETER Experiment Name: At_rhl_Mutant2_cDNA_P Parameter: Tissue Value: Roots
  misc_feature: MA Experiment ID: 108434 Result: Down-regulated in Transcription
  misc_feature: MA Experiment 108434 PARAMETER Experiment Name: At_Root_Tips_cDNA_P Parameter: Tissue Value: Root Tips
  misc_feature: MA Experiment ID: 108461 Result: Up-regulated in Transcription
  misc_feature: MA Experiment 108461 PARAMETER Experiment Name: At_Germinating_Seeds_cDNA_P Parameter: Age (day) Value: 1 vs. 0
  misc_feature: MA Experiment 108461 PARAMETER Experiment Name: At_Germinating_Seeds_cDNA_P Parameter: Tissue Value: Germinating Seeds
  misc_feature: MA Experiment ID: 108463 Result: Up-regulated in Transcription
  misc_feature: MA Experiment 108463 PARAMETER Experiment Name: At_Germinating_Seeds_cDNA_P Parameter: Age (day) Value: 3 vs. 0
  misc_feature: MA Experiment 108463 PARAMETER Experiment Name: At_Germinating_Seeds_cDNA_P Parameter: Tissue Value: Germinating Seeds
  misc_feature: MA Experiment ID: 108464 Result: Up-regulated in Transcription
  misc_feature: MA Experiment 108464 PARAMETER Experiment Name: At_Germinating_Seeds_cDNA_P Parameter: Age (day) Value: 4 vs. 0
  misc_feature: MA Experiment 108464 PARAMETER Experiment Name: At_Germinating_Seeds_cDNA_P Parameter: Tissue Value: Germinating Seeds
  misc_feature: MA Experiment ID: 108569 Result: Up-regulated in Transcription
  misc_feature: MA Experiment 108569 PARAMETER Experiment Name: At_0.001%_MeJA__cDNA_P Parameter: Timepoint (hr) Value: 6
  misc_feature: MA Experiment 108569 PARAMETER Experiment Name: At_0.001%_MeJA__cDNA_P Parameter: Tissue Value: Aerial
  misc_feature: MA Experiment 108569 PARAMETER Experiment Name: At_0.001%_MeJA__cDNA_P Parameter: Treatment Value: 0.001% MeJA vs. No Treatment
  misc_feature: MA Experiment ID: 108573 Result: Up-regulated in Transcription
  misc_feature: MA Experiment 108573 PARAMETER Experiment Name: At_Drought_cDNA_P Parameter: Timepoint (hr) Value: 6
  misc_feature: MA Experiment 108573 PARAMETER Experiment Name: At_Drought_cDNA_P Parameter: Tissue Value: Aerial
  misc_feature: MA Experiment 108573 PARAMETER Experiment Name: At_Drought_cDNA_P Parameter: Treatment Value: Drought vs. No Drought
  misc_feature: MA Experiment ID: 108585 Result: Up-regulated in Transcription
  misc_feature: MA Experiment 108585 PARAMETER Experiment Name: At_5mM_NaNP_cDNA_P Parameter: Timepoint (hr) Value: 6
  misc_feature: MA Experiment 108585 PARAMETER Experiment Name: At_5mM_NaNP_cDNA_P Parameter: Tissue Value: Aerial
  misc_feature: MA Experiment 108585 PARAMETER Experiment Name: At_5mM_NaNP_cDNA_P Parameter: Treatment Value: null
  misc_feature: MA Experiment ID: 108594 Result: Down-regulated in Transcription
  misc_feature: MA Experiment 108594 PARAMETER Experiment Name: At_Ler-rhl_Root_cDNA_P Parameter: Plant Line Value: null
  misc_feature: MA Experiment ID: 108595 Result: Down-regulated in Transcription
  misc_feature: MA Experiment 108595 PARAMETER Experiment Name: At_Ler-pi_Ovule_cDNA_P Parameter: Plant Line Value: null
  misc_feature: MA Experiment ID: 20000087 Result: Down-regulated in Transcription
  misc_feature: MA Experiment 20000087 PARAMETER Experiment Name: At_100uM_ABA_Mutants_cDNA_P Parameter: Plant Line Value: WS
  misc_feature: MA Experiment 20000087 PARAMETER Experiment Name: At_100uM_ABA_Mutants_cDNA_P Parameter: Timepoint (hr) Value: 6
  misc_feature: MA Experiment 20000087 PARAMETER Experiment Name: At_100uM_ABA_Mutants_cDNA_P Parameter: Tissue Value: Aerial
  misc_feature: MA Experiment 20000087 PARAMETER Experiment Name: At_100uM_ABA_Mutants_cDNA_P Parameter: Treatment Value: 100uM ABA vs. No Treatment
  misc_feature: MA Experiment ID: 20000089 Result: Down-regulated in Transcription
  misc_feature: MA Experiment ID: 20000090 Result: Down-regulated in Transcription
  misc_feature: MA Experiment ID: 20000111 Result: Up-regulated in Transcription
  misc_feature: MA Experiment 20000111 PARAMETER Experiment Name: At_42deg_Heat_cDNA_P Parameter: Temperature (deg C) Value: 42 vs. 22
  misc_feature: MA Experiment 20000111 PARAMETER Experiment Name: At_42deg_Heat_cDNA_P Parameter: Timepoint (hr) Value: 6
  misc_feature: MA Experiment 20000111 PARAMETER Experiment Name: At_42deg_Heat_cDNA_P Parameter: Tissue Value: Aerial
agcagcttcttctgctttcaattactctcgccgacgattttctcaccggaaaaaaacaatatcattgcggatacacaaactataatggacctcctcttgctggagaagtctttaatcgccgtcttcgtggcggtgattcttgccacggtgatttcaaagctccgcggcaagaaattgaagctacctccaggtcctataccaattccgatcttcggaaactggcttcaagtcggagatgatctcaaccaccgtaatctcgtcgattacgctaagaaattcggcgatctcttcctcctccgtatgggtcagcgaaacctagtcgtcgtctcctcaccggatctaacaaaggaagtgctcctcactcaaggcgttgagtttggatccagaacgagaaacgtcgtgttcgacattttcaccgggaaaggtcaagatatggtgttcactgtttacggcgagcattggaggaagatgagaagaatcatgacggttcctttcttcaccaacaaagttgttcaacagaatcgtgaaggttgggagtttgaagcagctagtgttgttgaagatgttaagaagaatccagattctgctacgaaaggaatcgtgttgaggaaacgtttgcaattgatgatgtataacaatatgttccgtatcatgttcgatagaagatttgagagtgaggatgatcctcttttccttaggcttaaggctttgaatggtgagagaatcttaaggcatcatcagctttagcttc

SEQ ID NO: 37412 - protein, 248 aa, Arabidopsis thaliana
  peptide (1)..(248): Ceres Seq. ID no. 12580068
  misc_feature (62)..(241): Pfam Name: Cytochrome P450 Pfam Description: Cytochrome P450
  misc_feature (29)..(241): Homolog of NCBI NO: 9965899 NR Description: cinnamate-4-hydroxylase [Gossypium arboreum]
  misc_feature (29)..(241): Homolog of NCBI NO: 9965897 NR Description: cinnamate-4-hydroxylase [Gossypium arboreum]
  misc_feature (29)..(241): Homolog of NCBI NO: 3915089 NR Description: Trans-cinnamate 4-monooxygenase (Cinnamic acid
  misc_feature (29)..(241): Homolog of NCBI NO: 12276037 NR Description: cinnamate 4-hydroxylase
  misc_feature (29)..(241): Homolog of NCBI NO: 1351206 NR Description: Trans-cinnamate 4-monooxygenase (Cinnamic acid
  misc_feature (29)..(241): Homolog of NCBI NO: 16555879 NR Description: cinnamic acid 4-hydroxylase [Lithospermum
  misc_feature (29)..(241): Homolog of NCBI NO: 4096693 NR Description: cinnamate 4-hydroxylase [Arabidopsis thaliana]
  misc_feature (29)..(241): Homolog of NCBI NO: 1773287 NR Description: cinnamate-4-hydroxylase [Arabidopsis thaliana]
  misc_feature (29)..(241): Homolog of NCBI NO: 2780738 NR Description: trans-cinnamate 4-hydroxylase [Arabidopsis
  misc_feature (29)..(241): Homolog of NCBI NO: 15224514 NR Description: cinnamate-4-hydroxylase
SSFFCFQLLSPTIFSPEKNNIIADTQTIMDLLLLEKSLIAVFVAVILATVISKLRGKKLKLPPGPIPIPIFGNWLQVGDDLNHRNLVDYAKKFGDLFLLRMGQRNLVVVSSPDLTKEVLLTQGVEFGSRTRNVVFDIFTGKGQDMVFTVYGEHWRKMRRIMTVPFFTNKVVQQNREGWEFEAASVVEDVKKNPDSATKGIVLRKRLQLMMYNNMFRIMFDRRFESEDDPLFLRLKALNGERILRHHQL

SEQ ID NO: 37413 - protein, 220 aa, Arabidopsis thaliana
  peptide (1)..(220): Ceres Seq. ID no. 12580069
  misc_feature (34)..(213): Pfam Name: Cytochrome P450 Pfam Description: Cytochrome P450
  misc_feature (1)..(213): Homolog of NCBI NO: 9965899 NR Description: cinnamate-4-hydroxylase [Gossypium arboreum]
  misc_feature (1)..(213): Homolog of NCBI NO: 9965897 NR Description: cinnamate-4-hydroxylase [Gossypium arboreum]
  misc_feature (1)..(213): Homolog of NCBI NO: 3915089 NR Description: Trans-cinnamate 4-monooxygenase (Cinnamic acid
  misc_feature (1)..(213): Homolog of NCBI NO: 12276037 NR Description: cinnamate 4-hydroxylase
  misc_feature (1)..(213): Homolog of NCBI NO: 1351206 NR Description: Trans-cinnamate 4-monooxygenase (Cinnamic acid
  misc_feature (1)..(213): Homolog of NCBI NO: 16555879 NR Description: cinnamic acid 4-hydroxylase [Lithospermum
  misc_feature (1)..(213): Homolog of NCBI NO: 4096693 NR Description: cinnamate 4-hydroxylase [Arabidopsis thaliana]
  misc_feature (1)..(213): Homolog of NCBI NO: 1773287 NR Description: cinnamate-4-hydroxylase [Arabidopsis thaliana]
  misc_feature (1)..(213): Homolog of NCBI NO: 2780738 NR Description: trans-cinnamate 4-hydroxylase [Arabidopsis
  misc_feature (1)..(213): Homolog of NCBI NO: 15224514 NR Description: cinnamate-4-hydroxylase
MDLLLLEKSLIAVFVAVILATVISKLRGKKLKLPPGPIPIPIFGNWLQVGDDLNHRNLVDYAKKFGDLFLLRMGQRNLVVVSSPDLTKEVLLTQGVEFGSRTRNVVFDIFTGKGQDMVFTVYGEHWRKMRRIMTVPFFTNKVVQQNREGWEFEAASVVEDVKKNPDSATKGIVLRKRLQLMMYNNMFRIMFDRRFESEDDPLFLRLKALNGERILRHHQL

SEQ ID NO: 37414 - protein, 148 aa, Arabidopsis thaliana
  peptide (1)..(148): Ceres Seq. ID no. 12580070
  misc_feature (1)..(141): Pfam Name: Cytochrome P450 Pfam Description: Cytochrome P450
  misc_feature (1)..(141): Homolog of NCBI NO: 9965899 NR Description: cinnamate-4-hydroxylase [Gossypium arboreum]
  misc_feature (1)..(141): Homolog of NCBI NO: 9965897 NR Description: cinnamate-4-hydroxylase [Gossypium arboreum]
  misc_feature (1)..(141): Homolog of NCBI NO: 3915089 NR Description: Trans-cinnamate 4-monooxygenase (Cinnamic acid
  misc_feature (1)..(141): Homolog of NCBI NO: 12276037 NR Description: cinnamate 4-hydroxylase
  misc_feature (1)..(141): Homolog of NCBI NO: 1351206 NR Description: Trans-cinnamate 4-monooxygenase (Cinnamic acid
  misc_feature (1)..(141): Homolog of NCBI NO: 16555879 NR Description: cinnamic acid 4-hydroxylase [Lithospermum
  misc_feature (1)..(141): Homolog of NCBI NO: 4096693 NR Description: cinnamate 4-hydroxylase [Arabidopsis thaliana]
  misc_feature (1)..(141): Homolog of NCBI NO: 1773287 NR Description: cinnamate-4-hydroxylase [Arabidopsis thaliana]
  misc_feature (1)..(141): Homolog of NCBI NO: 2780738 NR Description: trans-cinnamate 4-hydroxylase [Arabidopsis
  misc_feature (1)..(141): Homolog of NCBI NO: 15224514 NR Description: cinnamate-4-hydroxylase
MGQRNLVVVSSPDLTKEVLLTQGVEFGSRTRNVVFDIFTGKGQDMVFTVYGEHWRKMRRIMTVPFFTNKVVQQNREGWEFEAASVVEDVKKNPDSATKGIVLRKRLQLMMYNNMFRIMFDRRFESEDDPLFLRLKALNGERILRHHQL

SEQ ID NO: 37415 - DNA, 1062 bp, Arabidopsis thaliana
  misc_feature (1)..(1062): Ceres Seq. ID no. 12370347
  misc_feature: MA Experiment ID: 20000180 Result: Down-regulated in Transcription
  misc_feature: MA Experiment 20000180 PARAMETER Experiment Name: At_Germinating_Seeds_P Parameter: Age (hr) Value: 24 vs. 0
  misc_feature: MA Experiment 20000180 PARAMETER Experiment Name: At_Germinating_Seeds_P Parameter: Tissue Value: Germinating Seeds
  misc_feature: MA Experiment ID: 20001557 Result: Up-regulated in Transcription
  misc_feature: MA Experiment 20001557 PARAMETER Experiment Name: At_Drought_Soil_Dry_P Parameter: Age (day) Value: 27
  misc_feature: MA Experiment 20001557 PARAMETER Experiment Name: At_Drought_Soil_Dry_P Parameter: Organism Value: A. thaliana
  misc_feature: MA Experiment 20001557 PARAMETER Experiment Name: At_Drought_Soil_Dry_P Parameter: Plant Line Value: WS
  misc_feature: MA Experiment 20001557 PARAMETER Experiment Name: At_Drought_Soil_Dry_P Parameter: Post Timepoint (hr) Value: 3
  misc_feature: MA Experiment 20001557 PARAMETER Experiment Name: At_Drought_Soil_Dry_P Parameter: Post-Treatment Value: Re-Water vs. No Drought
  misc_feature: MA Experiment 20001557 PARAMETER Experiment Name: At_Drought_Soil_Dry_P Parameter: Timepoint (day) Value: 13
  misc_feature: MA Experiment 20001557 PARAMETER Experiment Name: At_Drought_Soil_Dry_P Parameter: Treatment Value: Drought vs. No Drought
  misc_feature: MA Experiment ID: 20001558 Result: Up-regulated in Transcription
  misc_feature: MA Experiment 20001558 PARAMETER Experiment Name: At_Drought_Soil_Dry_P Parameter: Age (day) Value: 27
  misc_feature: MA Experiment 20001558 PARAMETER Experiment Name: At_Drought_Soil_Dry_P Parameter: Organism Value: A. thaliana
  misc_feature: MA Experiment 20001558 PARAMETER Experiment Name: At_Drought_Soil_Dry_P Parameter: Plant Line Value: WS
  misc_feature: MA Experiment 20001558 PARAMETER Experiment Name: At_Drought_Soil_Dry_P Parameter: Post Timepoint (hr) Value: 6
  misc_feature: MA Experiment 20001558 PARAMETER Experiment Name: At_Drought_Soil_Dry_P Parameter: Post-Treatment Value: Re-Water vs. No Drought
  misc_feature: MA Experiment 20001558 PARAMETER Experiment Name: At_Drought_Soil_Dry_P Parameter: Timepoint (day) Value: 13
  misc_feature: MA Experiment 20001558 PARAMETER Experiment Name: At_Drought_Soil_Dry_P Parameter: Treatment Value: Drought vs. No Drought
aatctctctccgtccaatttccgtctctctctctttttatctcaccgtctgatcgcttagaagcaaccatgcctcagggagattacatagatttgcacaggaagaggaatggatatcgcctcgaccacttcgagagaaagcgcaagaaggaggcgcgtgaagttcacaagcactccaccatggctcaaaagtctctaggtatcaagggtaagatgattgctaagaaaaactatgctgagaaagctctcatgaagaaaacattgaaaatgcatgaagagtcatcatcaaggcgtaaggctgatgagaatgttcaggaaggagctgttcctgcttatcttcttgatcgtgaagacaccactcgtgccaaggttcttagcaacaccattaaacaaaagaggaaagagaaagctggcaaatgggaggtccctcttccaaaggtccgtccagttgctgaagatgaaatgtttagagtgatacgatctggaaaaaggaaaactaaacaatggaagcggatggttacaaaagctacatttgttggacctgctttcacaaggaagcctccaaagtacgagcgtttcatccgcccatctggtcttcgtttcaccaaggcccacgtcactcaccctgaactaaaatgcactttctgtctcgagatcatcgggattaagaagaatcctaacggtcccatgtatacatcactcggtgtgatgaccaggggaacaatcatcgaggtcaatgtgagtgagcttggtcttgttacaccagctggaaaggttgtctggggaaaatacgctcaagtgacaaacaatccagagaacgacggatgtataaatgctgttttacttgtgtaaccaaatgtccggcactgtcgtagaagtatggatagagacgagaggaaggcgagaatcatgttggctagttttattttgttttctcctgaaacaattttgtgttatttcaagtttttttatgaatgtgtggttggtcttctcatcacattaactagctgctatgttagctttataagtatcccacattatgaaatttgttgcttctaatgtt

SEQ ID NO: 37416 - protein, 282 aa, Arabidopsis thaliana
  peptide (1)..(282): Ceres Seq. ID no. 12370348
  misc_feature (23)..(259): Pfam Name: Ribosomal protein S8e Pfam Description: Ribosomal protein S8e
  misc_feature (25)..(282): Homolog of NCBI NO: 34881321 NR Description: similar to TGF beta-inducible nuclear protein 1
  misc_feature (23)..(282): Homolog of NCBI NO: 9438133 NR Description: unknown [Ochlerotatus triseriatus]
  misc_feature (23)..(282): Homolog of NCBI NO: 12856931 NR Description: unnamed protein product [Mus musculus]
  misc_feature (23)..(282): Homolog of NCBI NO: 34924868 NR Description: TGF beta-inducible nuclear protein 1 (CDK105
  misc_feature (23)..(282): Homolog of NCBI NO: 28278483 NR Description: Similar to RIKEN cDNA 5730427N09 gene [Danio
  misc_feature (23)..(282): Homolog of NCBI NO: 34925411 NR Description: TGF beta-inducible nuclear protein 1 (L-name
  misc_feature (23)..(282): Homolog of NCBI NO: 7662677 NR Description: hypothetical protein YR-29
  misc_feature (23)..(282): Homolog of NCBI NO: 33146852 NR Description: putative TGF(transfoming growth factor) beta
  misc_feature (23)..(282): Homolog of NCBI NO: 21553587 NR Description: unknown [Arabidopsis thaliana]
  misc_feature (23)..(282): Homolog of NCBI NO: 15240023 NR Description: putative protein
SLSVQFPSLSLFISPSDRLEATMPQGDYIDLHRKRNGYRLDHFERKRKKEAREVHKHSTMAQKSLGIKGKMIAKKNYAEKALMKKTLKMHEESSSRRKADENVQEGAVPAYLLDREDTTRAKVLSNTIKQKRKEKAGKWEVPLPKVRPVAEDEMFRVIRSGKRKTKQWKRMVTKATFVGPAFTRKPPKYERFIRPSGLRFTKAHVTHPELKCTFCLEIIGIKKNPNGPMYTSLGVMTRGTIIEVNVSELGLVTPAGKVVWGKYAQVTNNPENDGCINAVLLV

SEQ ID NO: 37417 - protein, 260 aa, Arabidopsis thaliana; identical to SEQ ID NO: 29738
  peptide (1)..(260): Ceres Seq. ID no. 12370349
  misc_feature (1)..(237): Pfam Name: Ribosomal protein S8e Pfam Description: Ribosomal protein S8e
  misc_feature (3)..(260): Homolog of NCBI NO: 34881321 NR Description: similar to TGF beta-inducible nuclear protein 1
  misc_feature (1)..(260): Homolog of NCBI NO: 9438133 NR Description: unknown [Ochlerotatus triseriatus]
  misc_feature (1)..(260): Homolog of NCBI NO: 12856931 NR Description: unnamed protein product [Mus musculus]
  misc_feature (1)..(260): Homolog of NCBI NO: 34924868 NR Description: TGF beta-inducible nuclear protein 1 (CDK105
  misc_feature (1)..(260): Homolog of NCBI NO: 28278483 NR Description: Similar to RIKEN cDNA 5730427N09 gene [Danio
  misc_feature (1)..(260): Homolog of NCBI NO: 34925411 NR Description: TGF beta-inducible nuclear protein 1 (L-name
  misc_feature (1)..(260): Homolog of NCBI NO: 7662677 NR Description: hypothetical protein YR-29
  misc_feature (1)..(260): Homolog of NCBI NO: 33146852 NR Description: putative TGF(transfoming growth factor) beta
  misc_feature (1)..(260): Homolog of NCBI NO: 21553587 NR Description: unknown [Arabidopsis thaliana]
  misc_feature (1)..(260): Homolog of NCBI NO: 15240023 NR Description: putative protein

SEQ ID NO: 37418 - protein, 223 aa, Arabidopsis thaliana; identical to SEQ ID NO: 29739
  peptide (1)..(223): Ceres Seq. ID no. 12370350
  misc_feature (1)..(200): Pfam Name: Ribosomal protein S8e Pfam Description: Ribosomal protein S8e
  misc_feature (1)..(223): Homolog of NCBI NO: 34881321 NR Description: similar to TGF beta-inducible nuclear protein 1
  misc_feature (1)..(223): Homolog of NCBI NO: 9438133 NR Description: unknown [Ochlerotatus triseriatus]
  misc_feature (1)..(223): Homolog of NCBI NO: 12856931 NR Description: unnamed protein product [Mus musculus]
  misc_feature (1)..(223): Homolog of NCBI NO: 34924868 NR Description: TGF beta-inducible nuclear protein 1 (CDK105
  misc_feature (1)..(223): Homolog of NCBI NO: 28278483 NR Description: Similar to RIKEN cDNA 5730427N09 gene [Danio
  misc_feature (1)..(223): Homolog of NCBI NO: 34925411 NR Description: TGF beta-inducible nuclear protein 1 (L-name
  misc_feature (1)..(223): Homolog of NCBI NO: 7662677 NR Description: hypothetical protein YR-29
  misc_feature (1)..(223): Homolog of NCBI NO: 33146852 NR Description: putative TGF(transfoming growth factor) beta
  misc_feature (1)..(223): Homolog of NCBI NO: 21553587 NR Description: unknown [Arabidopsis thaliana]
  misc_feature (1)..(223): Homolog of NCBI NO: 15240023 NR Description: putative protein

SEQ ID NO: 37419 - DNA, 1730 bp, Arabidopsis thaliana
  misc_feature (1)..(1730): Ceres Seq. ID no. 12335381
  misc_feature: MA Experiment ID: 108434 Result: Down-regulated in Transcription
  misc_feature: MA Experiment 108434 PARAMETER Experiment Name: At_Root_Tips_cDNA_P Parameter: Tissue Value: Root Tips
  misc_feature: MA Experiment ID: 108461 Result: Up-regulated in Transcription
  misc_feature: MA Experiment 108461 PARAMETER Experiment Name: At_Germinating_Seeds_cDNA_P Parameter: Age (day) Value: 1 vs. 0
  misc_feature: MA Experiment 108461 PARAMETER Experiment Name: At_Germinating_Seeds_cDNA_P Parameter: Tissue Value: Germinating Seeds
  misc_feature: MA Experiment ID: 108462 Result: Up-regulated in Transcription
  misc_feature: MA Experiment 108462 PARAMETER Experiment Name: At_Germinating_Seeds_cDNA_P Parameter: Age (day) Value: 2 vs. 0
  misc_feature: MA Experiment 108462 PARAMETER Experiment Name: At_Germinating_Seeds_cDNA_P Parameter: Tissue Value: Germinating Seeds
  misc_feature: MA Experiment ID: 108463 Result: Up-regulated in Transcription
  misc_feature: MA Experiment 108463 PARAMETER Experiment Name: At_Germinating_Seeds_cDNA_P Parameter: Age (day) Value: 3 vs. 0
  misc_feature: MA Experiment 108463 PARAMETER Experiment Name: At_Germinating_Seeds_cDNA_P Parameter: Tissue Value: Germinating Seeds
  misc_feature: MA Experiment ID: 108464 Result: Up-regulated in Transcription
  misc_feature: MA Experiment 108464 PARAMETER Experiment Name: At_Germinating_Seeds_cDNA_P Parameter: Age (day) Value: 4 vs. 0
  misc_feature: MA Experiment 108464 PARAMETER Experiment Name: At_Germinating_Seeds_cDNA_P Parameter: Tissue Value: Germinating Seeds
  misc_feature: MA Experiment ID: 108569 Result: Up-regulated in Transcription
  misc_feature: MA Experiment 108569 PARAMETER Experiment Name: At_0.001%_MeJA__cDNA_P Parameter: Timepoint (hr) Value: 6
  misc_feature: MA Experiment 108569 PARAMETER Experiment Name: At_0.001%_MeJA__cDNA_P Parameter: Tissue Value: Aerial
  misc_feature: MA Experiment 108569 PARAMETER Experiment Name: At_0.001%_MeJA__cDNA_P Parameter: Treatment Value: 0.001% MeJA vs. No Treatment
  misc_feature: MA Experiment ID: 20000171 Result: Up-regulated in Transcription
  misc_feature: MA Experiment 20000171 PARAMETER Experiment Name: At_42deg_Heat_P Parameter: Age (day) Value: 14
  misc_feature: MA Experiment 20000171 PARAMETER Experiment Name: At_42deg_Heat_P Parameter: Organism Value: A. thaliana
  misc_feature: MA Experiment 20000171 PARAMETER Experiment Name: At_42deg_Heat_P Parameter: Plant Line Value: WS
  misc_feature: MA Experiment 20000171 PARAMETER Experiment Name: At_42deg_Heat_P Parameter: Temperature (deg C) Value: 42 vs. 22
  misc_feature: MA Experiment 20000171 PARAMETER Experiment Name: At_42deg_Heat_P Parameter: Timepoint (hr) Value: 1
  misc_feature: MA Experiment 20000171 PARAMETER Experiment Name: At_42deg_Heat_P Parameter: Tissue Value: Aerial
  misc_feature: MA Experiment ID: 20000179 Result: Up-regulated in Transcription
  misc_feature: MA Experiment 20000179 PARAMETER Experiment Name: At_Germinating_Seeds_P Parameter: Age (hr) Value: 6 vs. 0
  misc_feature: MA Experiment 20000179 PARAMETER Experiment Name: At_Germinating_Seeds_P Parameter: Tissue Value: Germinating Seeds
  misc_feature: MA Experiment ID: 20000180 Result: Up-regulated in Transcription
  misc_feature: MA Experiment 20000180 PARAMETER Experiment Name: At_Germinating_Seeds_P Parameter: Age (hr) Value: 24 vs. 0
  misc_feature: MA Experiment 20000180 PARAMETER Experiment Name: At_Germinating_Seeds_P Parameter: Tissue Value: Germinating Seeds
  misc_feature: MA Experiment ID: 20000184 Result: Up-regulated in Transcription
  misc_feature: MA Experiment 20000184 PARAMETER Experiment Name: At_Shoots__P Parameter: Age (day) Value: 7
  misc_feature: MA Experiment 20000184 PARAMETER Experiment Name: At_Shoots__P Parameter: Tissue Value: Shoots vs. Whole Plant
  misc_feature: MA Experiment ID: 20000185 Result: Up-regulated in Transcription
  misc_feature: MA Experiment 20000185 PARAMETER Experiment Name: At_Roots__P Parameter: Age (day) Value: 7 vs. 21
  misc_feature: MA Experiment 20000185 PARAMETER Experiment Name: At_Roots__P Parameter: Organism Value: A. thaliana
  misc_feature: MA Experiment 20000185 PARAMETER Experiment Name: At_Roots__P Parameter: Tissue Value: Roots vs. Whole Plant
  misc_feature: MA Experiment ID: 20000227 Result: Up-regulated in Transcription
  misc_feature: MA Experiment 20000227 PARAMETER Experiment Name: At_Root-Tips-vs-Tops_P Parameter: Tissue Value: Root Tips vs. Root Tops
  misc_feature: MA Experiment ID: 20000438 Result: Up-regulated in Transcription
  misc_feature: MA Experiment 20000438 PARAMETER Experiment Name: At_Shoots__P Parameter: Age (day) Value: 14
  misc_feature: MA Experiment 20000438 PARAMETER Experiment Name: At_Shoots__P Parameter: Tissue Value: Shoots vs. Whole Plant
  misc_feature: MA Experiment ID: 20000439 Result: Up-regulated in Transcription
  misc_feature: MA Experiment 20000439 PARAMETER Experiment Name: At_Roots__P Parameter: Age (day) Value: 14 vs. 21
  misc_feature: MA Experiment 20000439 PARAMETER Experiment Name: At_Roots__P Parameter: Organism Value: A. thaliana
  misc_feature: MA Experiment 20000439 PARAMETER Experiment Name: At_Roots__P Parameter: Tissue Value: Roots vs. Whole Plant
  misc_feature: MA Experiment ID: 20000527 Result: Down-regulated in Transcription
  misc_feature: MA Experiment 20000527 PARAMETER Experiment Name: At_10percent_PEG_P Parameter: Age (day) Value: 20
  misc_feature: MA Experiment 20000527 PARAMETER Experiment Name: At_10percent_PEG_P Parameter: Organism Value: A. thaliana
  misc_feature: MA Experiment 20000527 PARAMETER Experiment Name: At_10percent_PEG_P Parameter: Plant Line Value: WS
  misc_feature: MA Experiment 20000527 PARAMETER Experiment Name: At_10percent_PEG_P Parameter: Timepoint (day) Value: 20
  misc_feature: MA Experiment 20000527 PARAMETER Experiment Name: At_10percent_PEG_P Parameter: Tissue Value: Whole Plant
  misc_feature: MA Experiment 20000527 PARAMETER Experiment Name: At_10percent_PEG_P Parameter: Treatment Value: 10percent PEG vs. No Treatment
atcataaacttgttctcttccagaagaaactaaaaacaaaaatggcattgcaaaagtttcctctcatggggctgcttttgctcctaaccatcctcgtctctgtgacaacagcggtcgatgatcctgtttgcccggcgacttccaagctaagccgagcaagtttccctaatgggtttttgtttggcacggctactgctgcgtttcaggtcgaaggtgcaattaatgaaacttgtcgtggaccggctctatgggatatctactgtagaagaaatccagagagatgtagtggcgaccacgccgatgtggccgttgatttcttccatcgttataaggaagatattcagctaatgaagaatctaaacacagatgcattcagactctcaatcgcatggtcaagaatatttcctcatgggagaaaggagaagggagtgagtcaagctggtgtgcaattctaccacgagctcatcgatgaactccttaaaaatggtatagttccgtttgtgactgttttccattgggacactccacaagatttggaagacgaatatggcggtttcttaagccaaaacattgtgaaagattttcgagaatatgcagattatgttttcactgaatacggtggaaaagtgaaaaactggatcactttcaacgagccatgggtctttgctcacgcaggttacgacttaggaaagaaggcaccaggacgttgttctcgctacgttccaggttgcgaagaccgagagggacaatcaggtaaagaggcttatctagtcagtcacaatctcctcaacgctcacgcagaagctgttgaagttttccgccaaaaggttaaaggtgggaaaatcggaatcgcacatagtccggcttggttcgaaccacatgatcttaaagattcaaatgacgctccaactgttagccgtgtacttgactttatgttgggatggcatctggagccaactacttcgggagattatccacaaatcatgaaagaccttcttggttacagattgcctcaatttactgctgcacaaaaagcaaaattgaaagattcgaccgatttcgtagggcttaactactatacttcgacattttcaaattataatgagaagccagatccgtctaaaccaagttggaagcaagattctcttgtttcctgggaacctaagaatgtagatcacagcgccattggtagcatgcctcttactgctgcattgcccgtctacgcaggatttagaaagcttttaaagtacatcaaggacaaatacgcaaacccggagattatgataatggaaaatggatatggagataaacttgggaccacagattcggttgacgttggtactgctgatcataacaggaaatattatcttcagaggcatcttctggctatgaacgaggctatttgcatcgataaggtgagagttacgggatactttgtatggtcattgttggataacttcgaatggcaagatggttacaaaaacagattcggactctattacgtcgatttcaaaaataacctcacacgttatgagaaagaatcagccaagtactacaaagatttcctcgctcaaggtgttcgtccatccgcgctcaagagggatgagctttaagttatattttgaggatttggttttctgttcaatgtttctttcctatgttgtagtttgtgattgaccaggatacatgaggtcttggttaataataataaaagtgttttgtttttcttc

SEQ ID NO: 37420 - protein, 536 aa, Arabidopsis thaliana
  peptide (1)..(536): Ceres Seq. ID no. 12335382
  misc_feature (18)..(529): Homolog of NCBI NO: 16604493 NR Description: AT3g21370/MHC9_5 [Arabidopsis thaliana]
  misc_feature (18)..(529): Homolog of NCBI NO: 22331243 NR Description: glycosyl hydrolase family 1
  misc_feature (103)..(536): Homolog of NCBI NO: 1732572 NR Description: beta-glucosidase [Brassica nigra]
  misc_feature (14)..(536): Homolog of NCBI NO: 15241841 NR Description: glycosyl hydrolase family 1; protein id:
  misc_feature (14)..(536): Homolog of NCBI NO: 1732570 NR Description: beta-glucosidase [Arabidopsis thaliana]
  misc_feature (14)..(536): Homolog of NCBI NO: 1363489 NR Description: thioglucosidase (EC 3.2.1.147) 3D precursor -
  misc_feature (14)..(536): Homolog of NCBI NO: 15232626 NR Description: glycosyl hydrolase family 1
  misc_feature (14)..(536): Homolog of NCBI NO: 15219623 NR Description: glycosyl hydrolase family 1
  misc_feature (14)..(536): Homolog of NCBI NO: 2286069 NR Description: beta-glucosidase [Arabidopsis thaliana]
  misc_feature (14)..(536): Homolog of NCBI NO: 15219605 NR Description: glycosyl hydrolase family 1, beta-glucosidase
HKLVLFQKKLKTKMALQKFPLMGLLLLLTILVSVTTAVDDPVCPATSKLSRASFPNGFLFGTATAAFQVEGAINETCRGPALWDIYCRRNPERCSGDHADVAVDFFHRYKEDIQLMKNLNTDAFRLSIAWSRIFPHGRKEKGVSQAGVQFYHELIDELLKNGIVPFVTVFHWDTPQDLEDEYGGFLSQNIVKDFREYADYVFTEYGGKVKNWITFNEPWVFAHAGYDLGKKAPGRCSRYVPGCEDREGQSGKEAYLVSHNLLNAHAEAVEVFRQKVKGGKIGIAHSPAWFEPHDLKDSNDAPTVSRVLDFMLGWHLEPTTSGDYPQIMKDLLGYRLPQFTAAQKAKLKDSTDFVGLNYYTSTFSNYNEKPDPSKPSWKQDSLVSWEPKNVDHSAIGSMPLTAALPVYAGFRKLLKYIKDKYANPEIMIMENGYGDKLGTTDSVDVGTADHNRKYYLQRHLLAMNEAICIDKVRVTGYFVWSLLDNFEWQDGYKNRFGLYYVDFKNNLTRYEKESAKYYKDFLAQGVRPSALKRDEL

SEQ ID NO: 37421 - protein, 523 aa, Arabidopsis thaliana
  peptide (1)..(523): Ceres Seq. ID no. 12335383
  misc_feature (5)..(516): Homolog of NCBI NO: 16604493 NR Description: AT3g21370/MHC9_5 [Arabidopsis thaliana]
  misc_feature (5)..(516): Homolog of NCBI NO: 22331243 NR Description: glycosyl hydrolase family 1
  misc_feature (90)..(523): Homolog of NCBI NO: 1732572 NR Description: beta-glucosidase [Brassica nigra]
  misc_feature (1)..(523): Homolog of NCBI NO: 15241841 NR Description: glycosyl hydrolase family 1; protein id:
  misc_feature (1)..(523): Homolog of NCBI NO: 1732570 NR Description: beta-glucosidase [Arabidopsis thaliana]
  misc_feature (1)..(523): Homolog of NCBI NO: 1363489 NR Description: thioglucosidase (EC 3.2.1.147) 3D precursor -
  misc_feature (1)..(523): Homolog of NCBI NO: 15232626 NR Description: glycosyl hydrolase family 1
  misc_feature (1)..(523): Homolog of NCBI NO: 15219623 NR Description: glycosyl hydrolase family 1
  misc_feature (1)..(523): Homolog of NCBI NO: 2286069 NR Description: beta-glucosidase [Arabidopsis thaliana]
  misc_feature (1)..(523): Homolog of NCBI NO: 15219605 NR Description: glycosyl hydrolase family 1, beta-glucosidase
MALQKFPLMGLLLLLTILVSVTTAVDDPVCPATSKLSRASFPNGFLFGTATAAFQVEGAINETCRGPALWDIYCRRNPERCSGDHADVAVDFFHRYKEDIQLMKNLNTDAFRLSIAWSRIFPHGRKEKGVSQAGVQFYHELIDELLKNGIVPFVTVFHWDTPQDLEDEYGGFLSQNIVKDFREYADYVFTEYGGKVKNWITFNEPWVFAHAGYDLGKKAPGRCSRYVPGCEDREGQSGKEAYLVSHNLLNAHAEAVEVFRQKVKGGKIGIAHSPAWFEPHDLKDSNDAPTVSRVLDFMLGWHLEPTTSGDYPQIMKDLLGYRLPQFTAAQKAKLKDSTDFVGLNYYTSTFSNYNEKPDPSKPSWKQDSLVSWEPKNVDHSAIGSMPLTAALPVYAGFRKLLKYIKDKYANPEIMIMENGYGDKLGTTDSVDVGTADHNRKYYLQRHLLAMNEAICIDKVRVTGYFVWSLLDNFEWQDGYKNRFGLYYVDFKNNLTRYEKESAKYYKDFLAQGVRPSALKRDEL

SEQ ID NO: 37422 - protein, 515 aa, Arabidopsis thaliana
  peptide (1)..(515): Ceres Seq. ID no. 12335384
  misc_feature (1)..(508): Homolog of NCBI NO: 16604493 NR Description: AT3g21370/MHC9_5 [Arabidopsis thaliana]
  misc_feature (1)..(508): Homolog of NCBI NO: 22331243 NR Description: glycosyl hydrolase family 1
  misc_feature (82)..(515): Homolog of NCBI NO: 1732572 NR Description: beta-glucosidase [Brassica nigra]
  misc_feature (1)..(515): Homolog of NCBI NO: 15241841 NR Description: glycosyl hydrolase family 1; protein id:
  misc_feature (1)..(515): Homolog of NCBI NO: 1732570 NR Description: beta-glucosidase [Arabidopsis thaliana]
  misc_feature (1)..(515): Homolog of NCBI NO: 1363489 NR Description: thioglucosidase (EC 3.2.1.147) 3D precursor -
  misc_feature (1)..(515): Homolog of NCBI NO: 15232626 NR Description: glycosyl hydrolase family 1
  misc_feature (1)..(515): Homolog of NCBI NO: 15219623 NR Description: glycosyl hydrolase family 1
  misc_feature (1)..(515): Homolog of NCBI NO: 2286069 NR Description: beta-glucosidase [Arabidopsis thaliana]
  misc_feature (1)..(515): Homolog of NCBI NO: 15219605 NR Description: glycosyl hydrolase family 1, beta-glucosidase
MGLLLLLTILVSVTTAVDDPVCPATSKLSRASFPNGFLFGTATAAFQVEGAINETCRGPALWDIYCRRNPERCSGDHADVAVDFFHRYKEDIQLMKNLNTDAFRLSIAWSRIFPHGRKEKGVSQAGVQFYHELIDELLKNGIVPFVTVFHWDTPQDLEDEYGGFLSQNIVKDFREYADYVFTEYGGKVKNWITFNEPWVFAHAGYDLGKKAPGRCSRYVPGCEDREGQSGKEAYLVSHNLLNAHAEAVEVFRQKVKGGKIGIAHSPAWFEPHDLKDSNDAPTVSRVLDFMLGWHLEPTTSGDYPQIMKDLLGYRLPQFTAAQKAKLKDSTDFVGLNYYTSTFSNYNEKPDPSKPSWKQDSLVSWEPKNVDHSAIGSMPLTAALPVYAGFRKLLKYIKDKYANPEIMIMENGYGDKLGTTDSVDVGTADHNRKYYLQRHLLAMNEAICIDKVRVTGYFVWSLLDNFEWQDGYKNRFGLYYVDFKNNLTRYEKESAKYYKDFLAQGVRPSALKRDEL

SEQ ID NO: 37423 - DNA, 1075 bp, Arabidopsis thaliana
  misc_feature (1)..(1075): Ceres Seq. ID no. 12562413
  misc_feature: MA Experiment ID: 108595 Result: Down-regulated in Transcription
  misc_feature: MA Experiment 108595 PARAMETER Experiment Name: At_Ler-pi_Ovule_cDNA_P Parameter: Plant Line Value: null
aatcgtcatttcctcggtatctcctcctcgaaagaagaatgcctggaattagaggtccttcggaatactcgcaggaaccacctcgtcacccttctctcaaggtcaacgccaaggaacctttcaacgccgagcctccccgctcggccttagtctcatcttatatcactcccgtcgaccttttctacaagaattcttgataggggggcccttataaggcgtcaatcactctaagtcaagccacaaatcctgaagcggatgttctactcgcttatgagatgaatggagagaccctgaacagggatcacggatttccgttaagggtggttgtccctggtgtgattggtgctcgttcggtcaaatggcttgattccatcaatgtcatcgctgaagaaagccagggattcttcatgcaaaaagattacaaaatgtttccaccctctgtcaattgggataatatcaactggtcctctaggagaccgcaaatggatttccctgttcagagtgcaatctgctctgtggaggatgtgcaaatggtgaagcctggaaaggtaagtatcaaaggatatgcggtttcaggaggtggacgcgggatagaaagagtggacatatccctggatggaggcaaaaactgggtggaagcttctagaacgcaggaaccaggaaagcagtacatctcagaacacagctccagtgacaaatgggcatgggtgttgtttgaagccaccattgatgtttcacagactacagaggtcatcgccaaagcggttgattcggcggcgaatgttcaaccggaaaatgtggagtcggtgtggaacctaagaggagttctcaacacttcgtggcaccgtgtccttctccggcttggccactctaacttgtagaccaagttaccactatgcgtctggtctctctttatcttttctttaagaactaaaacatccttgaatatgcttgtccttgtggatctgtgagagcaaaatactgtttatagttaaataaaatgggaaaacccatctgttgtcatgtggtggattataaattatttatttatatgatagaactgttattcactatt

SEQ ID NO: 37424 - protein, 201 aa, Arabidopsis thaliana; identical to SEQ ID NO: 26546
  peptide (1)..(201): Ceres Seq. ID no. 12562414
  misc_feature (66)..(197): Pfam Name: Mo-co oxidoreductase dimerisation domain Pfam Description: Mo-co oxidoreductase dimerisation domain
  misc_feature (1)..(191): Homolog of NCBI NO: 28558813 NR Description: Sulfite oxidase
  misc_feature (1)..(191): Homolog of NCBI NO: 86440 NR Description: sulfite oxidase (EC 1.8.3.1), hepatic - chicken
  misc_feature (1)..(192): Homolog of NCBI NO: 4557867 NR Description: SUOX gene product [Homo sapiens]
  misc_feature (1)..(192): Homolog of NCBI NO: 40254758 NR Description: sulfite oxidase [Rattus norvegicus]
  misc_feature (1)..(192): Homolog of NCBI NO: 586053 NR Description: Sulfite oxidase, mitochondrial precursor
  misc_feature (1)..(192): Homolog of NCBI NO: 30424565 NR Description: sulfite oxidase [Mus musculus]
  misc_feature (1)..(192): Homolog of NCBI NO: 3212610 NR Description: Chain A, Sulfite Oxidase From Chicken Liver
  misc_feature (1)..(195): Homolog of NCBI NO: 22759584 NR Description: Moco containing protein [Oryza sativa (japonica
  misc_feature (1)..(201): Homolog of NCBI NO: 6468008 NR Description: sulfite oxidase [Arabidopsis thaliana]
  misc_feature (1)..(201): Homolog of NCBI NO: 15232230 NR Description: putative sulfite oxidase

SEQ ID NO: 37425 - protein, 157 aa, Arabidopsis thaliana
  peptide (1)..(157): Ceres Seq. ID no. 12562415
  misc_feature (22)..(153): Pfam Name: Mo-co oxidoreductase dimerisation domain Pfam Description: Mo-co oxidoreductase dimerisation domain
  misc_feature (1)..(147): Homolog of NCBI NO: 28558813 NR Description: Sulfite oxidase
  misc_feature (1)..(147): Homolog of NCBI NO: 86440 NR Description: sulfite oxidase (EC 1.8.3.1), hepatic - chicken
  misc_feature (1)..(148): Homolog of NCBI NO: 4557867 NR Description: SUOX gene product [Homo sapiens]
  misc_feature (1)..(148): Homolog of NCBI NO: 40254758 NR Description: sulfite oxidase [Rattus norvegicus]
  misc_feature (1)..(148): Homolog of NCBI NO: 586053 NR Description: Sulfite oxidase, mitochondrial precursor
  misc_feature (1)..(148): Homolog of NCBI NO: 30424565 NR Description: sulfite oxidase [Mus musculus]
  misc_feature (1)..(148): Homolog of NCBI NO: 3212610 NR Description: Chain A, Sulfite Oxidase From Chicken Liver
  misc_feature (1)..(151): Homolog of NCBI NO: 22759584 NR Description: Moco containing protein [Oryza sativa (japonica
  misc_feature (1)..(157): Homolog of NCBI NO: 6468008 NR Description: sulfite oxidase [Arabidopsis thaliana]
  misc_feature (1)..(157): Homolog of NCBI NO: 15232230 NR Description: putative sulfite oxidase
MQKDYKMFPPSVNWDNINWSSRRPQMDFPVQSAICSVEDVQMVKPGKVSIKGYAVSGGGRGIERVDISLDGGKNWVEASRTQEPGKQYISEHSSSDKWAWVLFEATIDVSQTTEVIAKAVDSAANVQPENVESVWNLRGVLNTSWHRVLLRLGHSNL

SEQ ID NO: 37426 - protein, 151 aa, Arabidopsis thaliana
  peptide (1)..(151): Ceres Seq. ID no. 12562416
  misc_feature (16)..(147): Pfam Name: Mo-co oxidoreductase dimerisation domain Pfam Description: Mo-co oxidoreductase dimerisation domain
  misc_feature (1)..(141): Homolog of NCBI NO: 28558813 NR Description: Sulfite oxidase
  misc_feature (1)..(141): Homolog of NCBI NO: 86440 NR Description: sulfite oxidase (EC 1.8.3.1), hepatic - chicken
  misc_feature (1)..(142): Homolog of NCBI NO: 4557867 NR Description: SUOX gene product [Homo sapiens]
  misc_feature (1)..(142): Homolog of NCBI NO: 40254758 NR Description: sulfite oxidase [Rattus norvegicus]
  misc_feature (1)..(142): Homolog of NCBI NO: 586053 NR Description: Sulfite oxidase, mitochondrial precursor
  misc_feature (1)..(142): Homolog of NCBI NO: 30424565 NR Description: sulfite oxidase [Mus musculus]
  misc_feature (1)..(142): Homolog of NCBI NO: 3212610 NR Description: Chain A, Sulfite Oxidase From Chicken Liver
  misc_feature (1)..(145): Homolog of NCBI NO: 22759584 NR Description: Moco containing protein [Oryza sativa (japonica
  misc_feature (1)..(151): Homolog of NCBI NO: 6468008 NR Description: sulfite oxidase [Arabidopsis thaliana]
  misc_feature (1)..(151): Homolog of NCBI NO: 15232230 NR Description: putative sulfite oxidase
MFPPSVNWDNINWSSRRPQMDFPVQSAICSVEDVQMVKPGKVSIKGYAVSGGGRGIERVDISLDGGKNWVEASRTQEPGKQYISEHSSSDKWAWVLFEATIDVSQTTEVIAKAVDSAANVQPENVESVWNLRGVLNTSWHRVLLRLGHSNL

SEQ ID NO: 37427 - DNA, 1842 bp, Arabidopsis thaliana
  misc_feature (1)..(1842): Ceres Seq. ID no. 13509651
  misc_feature: MA Experiment ID: 20000113 Result: Down-regulated in Transcription
  misc_feature: MA Experiment 20000113 PARAMETER Experiment Name: At_42deg_Heat_cDNA_P Parameter: Temperature (deg C) Value: 42 vs. 22
  misc_feature: MA Experiment 20000113 PARAMETER Experiment Name: At_42deg_Heat_cDNA_P Parameter: Timepoint (hr) Value: 8
  misc_feature: MA Experiment 20000113 PARAMETER Experiment Name: At_42deg_Heat_cDNA_P Parameter: Tissue Value: Aerial
  misc_feature: MA Experiment ID: 20000315 Result: Down-regulated in Transcription
  misc_feature: MA Experiment 20000315 PARAMETER Experiment Name: At_14day_Shoots-Roots_Sub_P Parameter: Age (day) Value: 14
  misc_feature: MA Experiment 20000315 PARAMETER Experiment Name: At_14day_Shoots-Roots_Sub_P Parameter: Organism Value: A. thaliana
  misc_feature: MA Experiment 20000315 PARAMETER Experiment Name: At_14day_Shoots-Roots_Sub_P Parameter: Plant Line Value: WS
  misc_feature: MA Experiment 20000315 PARAMETER Experiment Name: At_14day_Shoots-Roots_Sub_P Parameter: Tissue Value: Shoots vs. Whole Plant
  misc_feature: MA Experiment ID: 20000328 Result: Down-regulated in Transcription
  misc_feature: MA Experiment 20000328 PARAMETER Experiment Name: At_42deg_Heat_Sub_P Parameter: Age (day) Value: 14
  misc_feature: MA Experiment 20000328 PARAMETER Experiment Name: At_42deg_Heat_Sub_P Parameter: Organism Value: A. thaliana
  misc_feature: MA Experiment 20000328 PARAMETER Experiment Name: At_42deg_Heat_Sub_P Parameter: Plant Line Value: WS
  misc_feature: MA Experiment 20000328 PARAMETER Experiment Name: At_42deg_Heat_Sub_P Parameter: Temperature (deg C) Value: 42 vs. 22
  misc_feature: MA Experiment 20000328 PARAMETER Experiment Name: At_42deg_Heat_Sub_P Parameter: Timepoint (hr) Value: 6
  misc_feature: MA Experiment 20000328 PARAMETER Experiment Name: At_42deg_Heat_Sub_P Parameter: Tissue Value: Aerial
gcttctaaaattttctggtagatctgagtccacaatcatcagaaatcaactttgtgaattgaaggccgatcactcctttgactttgttcttagggttcatcctcaaaggtgtttaatgagctcttagaagctatgggaatggcgtccatgagctctggtactgaaagccttcgtctttgcgtgtttgacttaagaagaggccaacacgaaggacaggaactggacaagatcttgttcttctatcctcctgatctaaccttctccactcagctatcggttataggtctcagtgaagggcttatcacgttcacgagacttttctccccggaggcagcttgtgaggtaattgaagcagagagacattcccatgttttctatgaggccgagcccgatatctggatggtcatgattgtagagaaaaataaggagattgaagctgtatggaggattgatgcattgcggagagtgcttaaggaagtgcactctctctttgttatgtttcaagggtcaattagggcattgcttgagaaagaaccaactggaggacttgtaagatcgcacttgtatccattcatcacagactatttaaatgatcttttcgttgggaaaaaacatcagttaccttccttccgtgactctttgaaagagcgtggaacagttcagatgctaactttagctagagatgcggcacttgaagttcagtctctcgtcggagtgctagattcgtgtgctgggaccgttcgatgccactctgtgattctatttcatgatctactggtgtcaacaactctctcacctgatgataccgtcgacttgtttgcattttctgtcatgagattaaccacaaacgcgctatcatctggcacaagttcctggtcatatctacgcaagggatccggttcacctcaaatatcttctagatctactacggtgccccctcttggttcaggcggtacattgccttcgggaaatggtagtagcacaggtcgtgttattagacctttgcagcacgataagtggtcaaaggggaaagacgggtttcttgtaactgatatttggggtttagatgccaccccgacaattttgatacagaagacgcaggaaagattttaccttttgacttatcaatacaagagtctcaccttggttcttctcgtgcctatcgctgcaattgttaatggagagctagacatctcattcgtgaagcagcaagttattgaaaacgcatcgaccaaaatcttgaaagtcgaagagaagctatcgaaagggtggggcggtgagaatgcttaccatgtaagcggttaccgttacttactagttgataatgacatggaagtttccagagcttctccaccaggaaaggtagcaacactagcaaaggagtctttgcttgcactaaacaagctaagggaagaagtggatacagaaaaaaaccgctcgaagcaagagaaagacatggaaatatgcattcgagcgaagaacaacacatgggtcatcgcgcgtctaaacagaggtaaagagctttacatggctttagagaaagcaagtgaaactcttcttgatgctacagactctgtccaaagattcagcaacaggtactgcagcggggcattctccatggattagattctgcaattgtttgttttgatagaagttgcaaaggaaagtgtttttgaagtgttttgagatatgttttagattttcaattataagatataaaagaaaccgttacaaagaaagagaatttggtgacttttgtatccacaactaaaagtaaacgtggaacttgacccttgacggtttgaactttgaagaagtcaaataaaaccttcgcttaatctc

SEQ ID NO: 37428 - protein, 497 aa, Arabidopsis thaliana
  peptide (1)..(497): Ceres Seq. ID no. 13509652
  misc_feature (3)..(312): Homolog of NCBI NO: 21618002 NR Description: unknown [Arabidopsis thaliana]
  misc_feature (192)..(497): Homolog of NCBI NO: 18266049 NR Description: myrosinase precursor [Brassica oleracea]
  misc_feature (3)..(312): Homolog of NCBI NO: 18394314 NR Description: expressed protein [Arabidopsis thaliana]
  misc_feature (234)..(488): Homolog of NCBI NO: 14517360 NR Description: At1g80910/F23A5_21 [Arabidopsis thaliana]
  misc_feature (125)..(497): Homolog of NCBI NO: 21618002 NR Description: unknown [Arabidopsis thaliana]
  misc_feature (125)..(497): Homolog of NCBI NO: 18394314 NR Description: expressed protein [Arabidopsis thaliana]
  misc_feature (1)..(497): Homolog of NCBI NO: 38175489 NR Description: putative myrosinase precursor
  misc_feature (3)..(497): Homolog of NCBI NO: 30684673 NR Description: expressed protein [Arabidopsis thaliana]
  misc_feature (1)..(497): Homolog of NCBI NO: 15220866 NR Description: myrosinase precursor -related [Arabidopsis
  misc_feature (1)..(497): Homolog of NCBI NO: 25372816 NR Description: F23A5.27 [imported] - Arabidopsis thaliana
  misc_feature (3)..(312): Homolog of NCBI NO: 21618002 NR Description: unknown [Arabidopsis thaliana]
  misc_feature (192)..(497): Homolog of NCBI NO: 18266049 NR Description: myrosinase precursor [Brassica oleracea]
  misc_feature (3)..(312): Homolog of NCBI NO: 18394314 NR Description: expressed protein [Arabidopsis thaliana]
  misc_feature (234)..(488): Homolog of NCBI NO: 14517360 NR Description: At1g80910/F23A5_21 [Arabidopsis thaliana]
  misc_feature (125)..(497): Homolog of NCBI NO: 21618002 NR Description: unknown [Arabidopsis thaliana]
  misc_feature (125)..(497): Homolog of NCBI NO: 18394314 NR Description: expressed protein [Arabidopsis thaliana]
  misc_feature (1)..(497): Homolog of NCBI NO: 38175489 NR Description: putative myrosinase precursor
  misc_feature (3)..(497): Homolog of NCBI NO: 30684673 NR Description: expressed protein [Arabidopsis thaliana]
  misc_feature (1)..(497): Homolog of NCBI NO: 15220866 NR Description: myrosinase precursor -related [Arabidopsis
  misc_feature (1)..(497): Homolog of NCBI NO: 25372816 NR Description: F23A5.27 [imported] - Arabidopsis thaliana
  misc_feature (3)..(312): Homolog of NCBI NO: 21618002 NR Description: unknown [Arabidopsis thaliana]
  misc_feature (192)..(497): Homolog of NCBI NO: 18266049 NR Description: myrosinase precursor [Brassica oleracea]
  misc_feature (3)..(312): Homolog of NCBI NO: 18394314 NR Description: expressed protein [Arabidopsis thaliana]
  misc_feature (234)..(488): Homolog of NCBI NO: 14517360 NR Description: At1g80910/F23A5_21 [Arabidopsis thaliana]
  misc_feature (125)..(497): Homolog of NCBI NO: 21618002 NR Description: unknown [Arabidopsis thaliana]
  misc_feature (125)..(497): Homolog of NCBI NO: 18394314 NR Description: expressed protein [Arabidopsis thaliana]
  misc_feature (1)..(497): Homolog of NCBI NO: 38175489 NR Description: putative myrosinase precursor
  misc_feature (3)..(497): Homolog of NCBI NO: 30684673 NR Description: expressed protein [Arabidopsis thaliana]
  misc_feature (1)..(497): Homolog of NCBI NO: 15220866 NR Description: myrosinase precursor -related [Arabidopsis
  misc_feature (1)..(497): Homolog of NCBI NO: 25372816 NR Description: F23A5.27 [imported] - Arabidopsis thaliana
MGMASMSSGTESLRLCVFDLRRGQHEGQELDKILFFYPPDLTFSTQLSVIGLSEGLITFTRLFSPEAACEVIEAERHSHVFYEAEPDIWMVMIVEKNKEIEAVWRIDALRRVLKEVHSLFVMFQGSIRALLEKEPTGGLVRSHLYPFITDYLNDLFVGKKHQLPSFRDSLKERGTVQMLTLARDAALEVQSLVGVLDSCAGTVRCHSVILFHDLLVSTTLSPDDTVDLFAFSVMRLTTNALSSGTSSWSYLRKGSGSPQISSRSTTVPPLGSGGTLPSGNGSSTGRVIRPLQHDKWSKGKDGFLVTDIWGLDATPTILIQKTQERFYLLTYQYKSLTLVLLVPIAAIVNGELDISFVKQQVIENASTKILKVEEKLSKGWGGENAYHVSGYRYLLVDNDMEVSRASPPGKVATLAKESLLALNKLREEVDTEKNRSKQEKDMEICIRAKNNTWVIARLNRGKELYMALEKASETLLDATDSVQRFSNRYCSGAFSMD

SEQ ID NO: 37429 - protein, 495 aa, Arabidopsis thaliana
  peptide (1)..(495): Ceres Seq. ID no. 13509653
  misc_feature (1)..(310): Homolog of NCBI NO: 21618002 NR Description: unknown [Arabidopsis thaliana]
  misc_feature (190)..(495): Homolog of NCBI NO: 18266049 NR Description: myrosinase precursor [Brassica oleracea]
  misc_feature (1)..(310): Homolog of NCBI NO: 18394314 NR Description: expressed protein [Arabidopsis thaliana]
  misc_feature (232)..(486): Homolog of NCBI NO: 14517360 NR Description: At1g80910/F23A5_21 [Arabidopsis thaliana]
  misc_feature (123)..(495): Homolog of NCBI NO: 21618002 NR Description: unknown [Arabidopsis thaliana]
  misc_feature (123)..(495): Homolog of NCBI NO: 18394314 NR Description: expressed protein [Arabidopsis thaliana]
  misc_feature (1)..(495): Homolog of NCBI NO: 38175489 NR Description: putative myrosinase precursor
  misc_feature (1)..(495): Homolog of NCBI NO: 30684673 NR Description: expressed protein [Arabidopsis thaliana]
  misc_feature (1)..(495): Homolog of NCBI NO: 15220866 NR Description: myrosinase precursor -related [Arabidopsis
  misc_feature (1)..(495): Homolog of NCBI NO: 25372816 NR Description: F23A5.27 [imported] - Arabidopsis thaliana
  misc_feature (1)..(310): Homolog of NCBI NO: 21618002 NR Description: unknown [Arabidopsis thaliana]
  misc_feature (190)..(495): Homolog of NCBI NO: 18266049 NR Description: myrosinase precursor [Brassica oleracea]
  misc_feature (1)..(310): Homolog of NCBI NO: 18394314 NR Description: expressed protein [Arabidopsis thaliana]
  misc_feature (232)..(486): Homolog of NCBI NO: 14517360 NR Description: At1g80910/F23A5_21 [Arabidopsis thaliana]
  misc_feature (123)..(495): Homolog of NCBI NO: 21618002 NR Description: unknown [Arabidopsis thaliana]
  misc_feature (123)..(495): Homolog of NCBI NO: 18394314 NR Description: expressed protein [Arabidopsis thaliana]
  misc_feature (1)..(495): Homolog of NCBI NO: 38175489 NR Description: putative myrosinase precursor
  misc_feature (1)..(495): Homolog of NCBI NO: 30684673 NR Description: expressed protein [Arabidopsis thaliana]
  misc_feature (1)..(495): Homolog of NCBI NO: 15220866 NR Description: myrosinase precursor -related [Arabidopsis
  misc_feature (1)..(495): Homolog of NCBI NO: 25372816 NR Description: F23A5.27 [imported] - Arabidopsis thaliana
  misc_feature (1)..(310): Homolog of NCBI NO: 21618002 NR Description: unknown [Arabidopsis thaliana]
  misc_feature (190)..(495): Homolog of NCBI NO: 18266049 NR Description: myrosinase precursor [Brassica oleracea]
  misc_feature (1)..(310): Homolog of NCBI NO: 18394314 NR Description: expressed protein [Arabidopsis thaliana]
  misc_feature (232)..(486): Homolog of NCBI NO: 14517360 NR Description: At1g80910/F23A5_21 [Arabidopsis thaliana]
  misc_feature (123)..(495): Homolog of NCBI NO: 21618002 NR Description: unknown [Arabidopsis thaliana]
  misc_feature (123)..(495): Homolog of NCBI NO: 18394314 NR Description: expressed protein [Arabidopsis thaliana]
  misc_feature (1)..(495): Homolog of NCBI NO: 38175489 NR Description: putative myrosinase precursor
  misc_feature (1)..(495): Homolog of NCBI NO: 30684673 NR Description: expressed protein [Arabidopsis thaliana]
  misc_feature (1)..(495): Homolog of NCBI NO: 15220866 NR Description: myrosinase precursor -related [Arabidopsis
  misc_feature (1)..(495): Homolog of NCBI NO: 25372816 NR Description: F23A5.27 [imported] - Arabidopsis thaliana
MASMSSGTESLRLCVFDLRRGQHEGQELDKILFFYPPDLTFSTQLSVIGLSEGLITFTRLFSPEAACEVIEAERHSHVFYEAEPDIWMVMIVEKNKEIEAVWRIDALRRVLKEVHSLFVMFQGSIRALLEKEPTGGLVRSHLYPFITDYLNDLFVGKKHQLPSFRDSLKERGTVQMLTLARDAALEVQSLVGVLDSCAGTVRCHSVILFHDLLVSTTLSPDDTVDLFAFSVMRLTTNALSSGTSSWSYLRKGSGSPQISSRSTTVPPLGSGGTLPSGNGSSTGRVIRPLQHDKWSKGKDGFLVTDIWGLDATPTILIQKTQERFYLLTYQYKSLTLVLLVPIAAIVNGELDISFVKQQVIENASTKILKVEEKLSKGWGGENAYHVSGYRYLLVDNDMEVSRASPPGKVATLAKESLLALNKLREEVDTEKNRSKQEKDMEICIRAKNNTWVIARLNRGKELYMALEKASETLLDATDSVQRFSNRYCSGAFSMD

SEQ ID NO: 37430 - protein, 492 aa, Arabidopsis thaliana
  peptide (1)..(492): Ceres Seq. ID no. 13509654
  misc_feature (1)..(307): Homolog of NCBI NO: 21618002 NR Description: unknown [Arabidopsis thaliana]
  misc_feature (187)..(492): Homolog of NCBI NO: 18266049 NR Description: myrosinase precursor [Brassica oleracea]
  misc_feature (1)..(307): Homolog of NCBI NO: 18394314 NR Description: expressed protein [Arabidopsis thaliana]
  misc_feature (229)..(483): Homolog of NCBI NO: 14517360 NR Description: At1g80910/F23A5_21 [Arabidopsis thaliana]
  misc_feature (120)..(492): Homolog of NCBI NO: 21618002 NR Description: unknown [Arabidopsis thaliana]
  misc_feature (120)..(492): Homolog of NCBI NO: 18394314 NR Description: expressed protein [Arabidopsis thaliana]
  misc_feature (1)..(492): Homolog of NCBI NO: 38175489 NR Description: putative myrosinase precursor
  misc_feature (1)..(492): Homolog of NCBI NO: 30684673 NR Description: expressed protein [Arabidopsis thaliana]
  misc_feature (1)..(492): Homolog of NCBI NO: 15220866 NR Description: myrosinase precursor -related [Arabidopsis
  misc_feature (1)..(492): Homolog of NCBI NO: 25372816 NR Description: F23A5.27 [imported] - Arabidopsis thaliana
  misc_feature (1)..(307): Homolog of NCBI NO: 21618002 NR Description: unknown [Arabidopsis thaliana]
  misc_feature (187)..(492): Homolog of NCBI NO: 18266049 NR Description: myrosinase precursor [Brassica oleracea]
  misc_feature (1)..(307): Homolog of NCBI NO: 18394314 NR Description: expressed protein [Arabidopsis thaliana]
  misc_feature (229)..(483): Homolog of NCBI NO: 14517360 NR Description: At1g80910/F23A5_21 [Arabidopsis thaliana]
  misc_feature (120)..(492): Homolog of NCBI NO: 21618002 NR Description: unknown [Arabidopsis thaliana]
  misc_feature (120)..(492): Homolog of NCBI NO: 18394314 NR Description: expressed protein [Arabidopsis thaliana]
  misc_feature (1)..(492): Homolog of NCBI NO: 38175489 NR Description: putative myrosinase precursor
  misc_feature (1)..(492): Homolog of NCBI NO: 30684673 NR Description: expressed protein [Arabidopsis thaliana]
  misc_feature (1)..(492): Homolog of NCBI NO: 15220866 NR Description: myrosinase precursor -related [Arabidopsis
  misc_feature (1)..(492): Homolog of NCBI NO: 25372816 NR Description: F23A5.27 [imported] - Arabidopsis thaliana
  misc_feature (1)..(307): Homolog of NCBI NO: 21618002 NR Description: unknown [Arabidopsis thaliana]
  misc_feature (187)..(492): Homolog of NCBI NO: 18266049 NR Description: myrosinase precursor [Brassica oleracea]
  misc_feature (1)..(307): Homolog of NCBI NO: 18394314 NR Description: expressed protein [Arabidopsis thaliana]
  misc_feature (229)..(483): Homolog of NCBI NO: 14517360 NR Description: At1g80910/F23A5_21 [Arabidopsis thaliana]
  misc_feature (120)..(492): Homolog of NCBI NO: 21618002 NR Description: unknown [Arabidopsis thaliana]
  misc_feature (120)..(492): Homolog of NCBI NO: 18394314 NR Description: expressed protein [Arabidopsis thaliana]
  misc_feature (1)..(492): Homolog of NCBI NO: 38175489 NR Description: putative myrosinase precursor
  misc_feature (1)..(492): Homolog of NCBI NO: 30684673 NR Description: expressed protein [Arabidopsis thaliana]
  misc_feature (1)..(492): Homolog of NCBI NO: 15220866 NR Description: myrosinase precursor -related [Arabidopsis
  misc_feature (1)..(492): Homolog of NCBI NO: 25372816 NR Description: F23A5.27 [imported] - Arabidopsis thaliana
MSSGTESLRLCVFDLRRGQHEGQELDKILFFYPPDLTFSTQLSVIGLSEGLITFTRLFSPEAACEVIEAERHSHVFYEAEPDIWMVMIVEKNKEIEAVWRIDALRRVLKEVHSLFVMFQGSIRALLEKEPTGGLVRSHLYPFITDYLNDLFVGKKHQLPSFRDSLKERGTVQMLTLARDAALEVQSLVGVLDSCAGTVRCHSVILFHDLLVSTTLSPDDTVDLFAFSVMRLTTNALSSGTSSWSYLRKGSGSPQISSRSTTVPPLGSGGTLPSGNGSSTGRVIRPLQHDKWSKGKDGFLVTDIWGLDATPTILIQKTQERFYLLTYQYKSLTLVLLVPIAAIVNGELDISFVKQQVIENASTKILKVEEKLSKGWGGENAYHVSGYRYLLVDNDMEVSRASPPGKVATLAKESLLALNKLREEVDTEKNRSKQEKDMEICIRAKNNTWVIARLNRGKELYMALEKASETLLDATDSVQRFSNRYCSGAFSMD

SEQ ID NO: 37431 - DNA, 1280 bp, Arabidopsis thaliana
  misc_feature (1)..(1280): Ceres Seq. ID no. 12335829
  misc_feature: MA Experiment ID: 108462 Result: Down-regulated in Transcription
  misc_feature: MA Experiment 108462 PARAMETER Experiment Name: At_Germinating_Seeds_cDNA_P Parameter: Age (day) Value: 2 vs. 0
  misc_feature: MA Experiment 108462 PARAMETER Experiment Name: At_Germinating_Seeds_cDNA_P Parameter: Tissue Value: Germinating Seeds
  misc_feature: MA Experiment ID: 108463 Result: Down-regulated in Transcription
  misc_feature: MA Experiment 108463 PARAMETER Experiment Name: At_Germinating_Seeds_cDNA_P Parameter: Age (day) Value: 3 vs. 0
  misc_feature: MA Experiment 108463 PARAMETER Experiment Name: At_Germinating_Seeds_cDNA_P Parameter: Tissue Value: Germinating Seeds
  misc_feature: MA Experiment ID: 108464 Result: Down-regulated in Transcription
  misc_feature: MA Experiment 108464 PARAMETER Experiment Name: At_Germinating_Seeds_cDNA_P Parameter: Age (day) Value: 4 vs. 0
  misc_feature: MA Experiment 108464 PARAMETER Experiment Name: At_Germinating_Seeds_cDNA_P Parameter: Tissue Value: Germinating Seeds
aaattgtcttttgtctcctttccttttcgtttttagggtttttttttcttagcacagctctctcttctcaatttccccaaatgaaataaattcctccgaaagtttatagatttcactctcccccgaactatacaaatttccctcaaaaggaaaaactaaaaagccgatcttggcttttttgtttctgagtgcatctcgatacttggaagcattctttggtgaggctgattcattctcatctgtgaaagtctttggcttttgaagcaatactatggaaggaattcagcatcctatacctcgcactgtcgaagaggtttttagcgactttcgtggtcgtagagctggtctcatcaaggctctctctactgatgtacagaagttttaccatcagtgtgaccctgagaaggaaaacttgtgtctttatggacttccaaatgagacatgggaggttaatcttcccgttgaggaggtccctcctgagcttcctgaaccagcgttaggcatcaatttcgcaagggacggaatgcaagaaaaagactggatttctttggttgcagttcacagtgattcatggcttatctctgttgcattttactttggtgcacgtttcggatttggcaagaatgagaggaagaggctcttccagatgataaatgatctcccaaccattttcgaggttgtaactggcaatgcaaagcaatccaaggatcaatctgctaaccacaacagtagcagaagcaaatctagtggtggcaagcctcgtcattctgaatctcacactaaggcttcaaagatgtcccctccaccaagaaaagaagatgagagcggagatgaggatgaagatgacgagcaaggtgctgtttgtggtgcgtgtggcgacaactatggaggagatgagttctggatatgttgtgatgcttgcgagaaatggttccatgggaaatgcgtgaagatcacaccagcaaaggctgagcatatcaaacattacaaatgcccaagttgcactaccagcaagaaaatgaaagcctgaaagtgataataacattagagcctgtgaaagaggaaaacgttttcacagtttaagaagacagtacaagagtttagctgtgggaagaagaagaaacaaaaggcttctgattgcgtagttttaatgggattgagacagcttacagttagtaatgtctctttctcttttcttttctttttttttgctgttaatgttaaaatgttatgactaatttgtcttaagtttctgagaaaattctgtcttttaagcactc

SEQ ID NO: 37432 - protein, 252 aa, Arabidopsis thaliana
  peptide (1)..(252): Ceres Seq. ID no. 12335830
  misc_feature (197)..(247): Pfam Name: PHD-finger Pfam Description: PHD-finger
  misc_feature (197)..(247): Pfam Name: PHD-finger Pfam Description: PHD-finger
  misc_feature (9)..(245): Homolog of NCBI NO: 34394182 NR Description: putative nucleic acid binding protein
  misc_feature (9)..(245): Homolog of NCBI NO: 14192880 NR Description: Putative nucleic acid binding protein [Oryza
  misc_feature (9)..(248): Homolog of NCBI NO: 15239624 NR Description: nucleic acid binding protein - like
  misc_feature (9)..(252): Homolog of NCBI NO: 15229157 NR Description: nucleic acid binding protein-like
  misc_feature (1)..(248): Homolog of NCBI NO: 7488751 NR Description: probable zinc finger protein - alfalfa (fragment)
  misc_feature (9)..(245): Homolog of NCBI NO: 34394182 NR Description: putative nucleic acid binding protein
  misc_feature (9)..(248): Homolog of NCBI NO: 15239624 NR Description: nucleic acid binding protein - like
  misc_feature (1)..(248): Homolog of NCBI NO: 7488751 NR Description: probable zinc finger protein - alfalfa (fragment)
  misc_feature (1)..(252): Homolog of NCBI NO: 15223786 NR Description: nucleic acid binding protein (alfin-1), putative
  misc_feature (34)..(252): Homolog of NCBI NO: 25346630 NR Description: F14L17.29 protein - Arabidopsis thaliana
  misc_feature (1)..(32): Homolog of NCBI NO: 25346630 NR Description: F14L17.29 protein - Arabidopsis thaliana
  misc_feature (1)..(248): Homolog of NCBI NO: 21593407 NR Description: putative PHD-type zinc finger protein
  misc_feature (1)..(248): Homolog of NCBI NO: 15226967 NR Description: putative PHD-type zinc finger protein
  misc_feature (9)..(252): Homolog of NCBI NO: 15229157 NR Description: nucleic acid binding protein-like
  misc_feature (9)..(245): Homolog of NCBI NO: 14192880 NR Description: Putative nucleic acid binding protein [Oryza
  misc_feature (1)..(248): Homolog of NCBI NO: 15226967 NR Description: putative PHD-type zinc finger protein
  misc_feature (1)..(248): Homolog of NCBI NO: 21593407 NR Description: putative PHD-type zinc finger protein
  misc_feature (1)..(32): Homolog of NCBI NO: 25346630 NR Description: F14L17.29 protein - Arabidopsis thaliana
  misc_feature (34)..(252): Homolog of NCBI NO: 25346630 NR Description: F14L17.29 protein - Arabidopsis thaliana
  misc_feature (1)..(252): Homolog of NCBI NO: 15223786 NR Description: nucleic acid binding protein (alfin-1), putative
MEGIQHPIPRTVEEVFSDFRGRRAGLIKALSTDVQKFYHQCDPEKENLCLYGLPNETWEVNLPVEEVPPELPEPALGINFARDGMQEKDWISLVAVHSDSWLISVAFYFGARFGFGKNERKRLFQMINDLPTIFEVVTGNAKQSKDQSANHNSSRSKSSGGKPRHSESHTKASKMSPPPRKEDESGDEDEDDEQGAVCGACGDNYGGDEFWICCDACEKWFHGKCVKITPAKAEHIKHYKCPSCTTSKKMKA

SEQ ID NO: 37433 - protein, 168 aa, Arabidopsis thaliana
  peptide (1)..(168): Ceres Seq. ID no. 12335831
  misc_feature (113)..(163): Pfam Name: PHD-finger Pfam Description: PHD-finger
  misc_feature (113)..(163): Pfam Name: PHD-finger Pfam Description: PHD-finger
  misc_feature (1)..(164): Homolog of NCBI NO: 30687843 NR Description: zinc finger protein - like [Arabidopsis thaliana]
  misc_feature (1)..(161): Homolog of NCBI NO: 34394182 NR Description: putative nucleic acid binding protein
  misc_feature (1)..(161): Homolog of NCBI NO: 14192880 NR Description: Putative nucleic acid binding protein [Oryza
  misc_feature (1)..(164): Homolog of NCBI NO: 15239624 NR Description: nucleic acid binding protein - like
  misc_feature (1)..(168): Homolog of NCBI NO: 15229157 NR Description: nucleic acid binding protein-like
  misc_feature (1)..(164): Homolog of NCBI NO: 30687843 NR Description: zinc finger protein - like [Arabidopsis thaliana]
  misc_feature (1)..(161): Homolog of NCBI NO: 14192880 NR Description: Putative nucleic acid binding protein [Oryza
  misc_feature (1)..(168): Homolog of NCBI NO: 15229157 NR Description: nucleic acid binding protein-like
  misc_feature (1)..(168): Homolog of NCBI NO: 15223786 NR Description: nucleic acid binding protein (alfin-1), putative
  misc_feature (1)..(168): Homolog of NCBI NO: 25346630 NR Description: F14L17.29 protein - Arabidopsis thaliana
  misc_feature (1)..(164): Homolog of NCBI NO: 21593407 NR Description: putative PHD-type zinc finger protein
  misc_feature (1)..(164): Homolog of NCBI NO: 15226967 NR Description: putative PHD-type zinc finger protein
  misc_feature (1)..(164): Homolog of NCBI NO: 7488751 NR Description: probable zinc finger protein - alfalfa (fragment)
  misc_feature (1)..(164): Homolog of NCBI NO: 15239624 NR Description: nucleic acid binding protein - like
  misc_feature (1)..(161): Homolog of NCBI NO: 34394182 NR Description: putative nucleic acid binding protein
  misc_feature (1)..(164): Homolog of NCBI NO: 7488751 NR Description: probable zinc finger protein - alfalfa (fragment)
  misc_feature (1)..(164): Homolog of NCBI NO: 15226967 NR Description: putative PHD-type zinc finger protein
  misc_feature (1)..(164): Homolog of NCBI NO: 21593407 NR Description: putative PHD-type zinc finger protein
  misc_feature (1)..(168): Homolog of NCBI NO: 25346630 NR Description: F14L17.29 protein - Arabidopsis thaliana
  misc_feature (1)..(168): Homolog of NCBI NO: 15223786 NR Description: nucleic acid binding protein (alfin-1), putative
MQEKDWISLVAVHSDSWLISVAFYFGARFGFGKNERKRLFQMINDLPTIFEVVTGNAKQSKDQSANHNSSRSKSSGGKPRHSESHTKASKMSPPPRKEDESGDEDEDDEQGAVCGACGDNYGGDEFWICCDACEKWFHGKCVKITPAKAEHIKHYKCPSCTTSKKMKA

SEQ ID NO: 37434 - protein, 127 aa, Arabidopsis thaliana
  peptide (1)..(127): Ceres Seq. ID no. 12335832
  misc_feature (72)..(122): Pfam Name: PHD-finger Pfam Description: PHD-finger
  misc_feature (72)..(122): Pfam Name: PHD-finger Pfam Description: PHD-finger
  misc_feature (1)..(123): Homolog of NCBI NO: 30687843 NR Description: zinc finger protein - like [Arabidopsis thaliana]
  misc_feature (1)..(120): Homolog of NCBI NO: 34394182 NR Description: putative nucleic acid binding protein
  misc_feature (1)..(120): Homolog of NCBI NO: 14192880 NR Description: Putative nucleic acid binding protein [Oryza
  misc_feature (1)..(123): Homolog of NCBI NO: 15239624 NR Description: nucleic acid binding protein - like
  misc_feature (1)..(127): Homolog of NCBI NO: 15229157 NR Description: nucleic acid binding protein-like
  misc_feature (1)..(123): Homolog of NCBI NO: 30687843 NR Description: zinc finger protein - like [Arabidopsis thaliana]
  misc_feature (1)..(120): Homolog of NCBI NO: 14192880 NR Description: Putative nucleic acid binding protein [Oryza
  misc_feature (1)..(127): Homolog of NCBI NO: 15229157 NR Description: nucleic acid binding protein-like
  misc_feature (1)..(127): Homolog of NCBI NO: 15223786 NR Description: nucleic acid binding protein (alfin-1), putative
  misc_feature (1)..(127): Homolog of NCBI NO: 25346630 NR Description: F14L17.29 protein - Arabidopsis thaliana
  misc_feature (1)..(123): Homolog of NCBI NO: 21593407 NR Description: putative PHD-type zinc finger protein
  misc_feature (1)..(123): Homolog of NCBI NO: 15226967 NR Description: putative PHD-type zinc finger protein
  misc_feature (1)..(123): Homolog of NCBI NO: 7488751 NR Description: probable zinc finger protein - alfalfa (fragment)
  misc_feature (1)..(123): Homolog of NCBI NO: 15239624 NR Description: nucleic acid binding protein - like
  misc_feature (1)..(120): Homolog of NCBI NO: 34394182 NR Description: putative nucleic acid binding protein
  misc_feature (1)..(123): Homolog of NCBI NO: 7488751 NR Description: probable zinc finger protein - alfalfa (fragment)
  misc_feature (1)..(123): Homolog of NCBI NO: 15226967 NR Description: putative PHD-type zinc finger protein
  misc_feature (1)..(123): Homolog of NCBI NO: 21593407 NR Description: putative PHD-type zinc finger protein
  misc_feature (1)..(127): Homolog of NCBI NO: 25346630 NR Description: F14L17.29 protein - Arabidopsis thaliana
  misc_feature (1)..(127): Homolog of NCBI NO: 15223786 NR Description: nucleic acid binding protein (alfin-1), putative
MINDLPTIFEVVTGNAKQSKDQSANHNSSRSKSSGGKPRHSESHTKASKMSPPPRKEDESGDEDEDDEQGAVCGACGDNYGGDEFWICCDACEKWFHGKCVKITPAKAEHIKHYKCPSCTTSKKMKA

SEQ ID NO: 37435 - DNA, 1574 bp, Arabidopsis thaliana
  misc_feature (1)..(1574): Ceres Seq. ID no. 12357666
  misc_feature: MA Experiment ID: 108434 Result: Up-regulated in Transcription
  misc_feature: MA Experiment 108434 PARAMETER Experiment Name: At_Root_Tips_cDNA_P Parameter: Tissue Value: Root Tips
  misc_feature: MA Experiment ID: 108595 Result: Up-regulated in Transcription
  misc_feature: MA Experiment 108595 PARAMETER Experiment Name: At_Ler-pi_Ovule_cDNA_P Parameter: Plant Line Value: null
  misc_feature: MA Experiment ID: 20000069 Result: Down-regulated in Transcription
  misc_feature: MA Experiment 20000069 PARAMETER Experiment Name: At_100uM_ABA_Mutants_cDNA_P Parameter: Plant Line Value: CS23
  misc_feature: MA Experiment 20000069 PARAMETER Experiment Name: At_100uM_ABA_Mutants_cDNA_P Parameter: Timepoint (hr) Value: 6
  misc_feature: MA Experiment 20000069 PARAMETER Experiment Name: At_100uM_ABA_Mutants_cDNA_P Parameter: Tissue Value: Aerial
  misc_feature: MA Experiment 20000069 PARAMETER Experiment Name: At_100uM_ABA_Mutants_cDNA_P Parameter: Treatment Value: 100uM ABA vs. No Treatment
  misc_feature: MA Experiment ID: 20000090 Result: Down-regulated in Transcription
  misc_feature: MA Experiment ID: 20000093 Result: Down-regulated in Transcription
  misc_feature: MA Experiment 20000093 PARAMETER Experiment Name: At_42deg_Heat_cDNA_P Parameter: Temperature (deg C) Value: 42 vs. 22
  misc_feature: MA Experiment 20000093 PARAMETER Experiment Name: At_42deg_Heat_cDNA_P Parameter: Timepoint (hr) Value: 0.5
  misc_feature: MA Experiment 20000093 PARAMETER Experiment Name: At_42deg_Heat_cDNA_P Parameter: Tissue Value: Aerial
  misc_feature: MA Experiment ID: 20000111 Result: Down-regulated in Transcription
  misc_feature: MA Experiment 20000111 PARAMETER Experiment Name: At_42deg_Heat_cDNA_P Parameter: Temperature (deg C) Value: 42 vs. 22
  misc_feature: MA Experiment 20000111 PARAMETER Experiment Name: At_42deg_Heat_cDNA_P Parameter: Timepoint (hr) Value: 6
  misc_feature: MA Experiment 20000111 PARAMETER Experiment Name: At_42deg_Heat_cDNA_P Parameter: Tissue Value: Aerial
  misc_feature: MA Experiment ID: 20000113 Result: Down-regulated in Transcription
  misc_feature: MA Experiment 20000113 PARAMETER Experiment Name: At_42deg_Heat_cDNA_P Parameter: Temperature (deg C) Value: 42 vs. 22
  misc_feature: MA Experiment 20000113 PARAMETER Experiment Name: At_42deg_Heat_cDNA_P Parameter: Timepoint (hr) Value: 8
  misc_feature: MA Experiment 20000113 PARAMETER Experiment Name: At_42deg_Heat_cDNA_P Parameter: Tissue Value: Aerial
  misc_feature: MA Experiment ID: 20000144 Result: Down-regulated in Transcription
  misc_feature: MA Experiment 20000144 PARAMETER Experiment Name: At_42deg_Heat_cDNA_P Parameter: Temperature (deg C) Value: 42 vs. 22
  misc_feature: MA Experiment 20000144 PARAMETER Experiment Name: At_42deg_Heat_cDNA_P Parameter: Timepoint (hr) Value: 1
  misc_feature: MA Experiment 20000144 PARAMETER Experiment Name: At_42deg_Heat_cDNA_P Parameter: Tissue Value: Aerial
  misc_feature: MA Experiment ID: 20000185 Result: Down-regulated in Transcription
  misc_feature: MA Experiment 20000185 PARAMETER Experiment Name: At_Roots__P Parameter: Age (day) Value: 7 vs. 21
  misc_feature: MA Experiment 20000185 PARAMETER Experiment Name: At_Roots__P Parameter: Organism Value: A. thaliana
  misc_feature: MA Experiment 20000185 PARAMETER Experiment Name: At_Roots__P Parameter: Tissue Value: Roots vs. Whole Plant
  misc_feature: MA Experiment ID: 20000234 Result: Up-regulated in Transcription
  misc_feature: MA Experiment 20000234 PARAMETER Experiment Name: At_Siliques_P Parameter: Age (day) Value: 21
  misc_feature: MA Experiment 20000234 PARAMETER Experiment Name: At_Siliques_P Parameter: Organism Value: A. thaliana
  misc_feature: MA Experiment 20000234 PARAMETER Experiment Name: At_Siliques_P Parameter: Plant Line Value: WS
  misc_feature: MA Experiment 20000234 PARAMETER Experiment Name: At_Siliques_P Parameter: Tissue Value: Less Than 5mm Siliques vs. Whole Plant
  misc_feature: MA Experiment ID: 20000264 Result: Up-regulated in Transcription
  misc_feature: MA Experiment 20000264 PARAMETER Experiment Name: At_Open_Flower_P Parameter: Age (day) Value: 21
  misc_feature: MA Experiment 20000264 PARAMETER Experiment Name: At_Open_Flower_P Parameter: Plant Line Value: WS
  misc_feature: MA Experiment 20000264 PARAMETER Experiment Name: At_Open_Flower_P Parameter: Tissue Value: Open Flower vs. Whole Plant
  misc_feature: MA Experiment ID: 20000265 Result: Up-regulated in Transcription
  misc_feature: MA Experiment 20000265 PARAMETER Experiment Name: At_Open_Flower_P Parameter: Age (day) Value: 21
  misc_feature: MA Experiment 20000265 PARAMETER Experiment Name: At_Open_Flower_P Parameter: Plant Line Value: WS
  misc_feature: MA Experiment 20000265 PARAMETER Experiment Name: At_Open_Flower_P Parameter: Tissue Value: Closed Flower vs. Whole Plant
  misc_feature: MA Experiment ID: 20000286 Result: Up-regulated in Transcription
  misc_feature: MA Experiment 20000286 PARAMETER Experiment Name: At_Open_Flower_P Parameter: Age (day) Value: 21
  misc_feature: MA Experiment 20000286 PARAMETER Experiment Name: At_Open_Flower_P Parameter: Plant Line Value: WS
  misc_feature: MA Experiment 20000286 PARAMETER Experiment Name: At_Open_Flower_P Parameter: Tissue Value: Half Open vs. Whole Plant
  misc_feature: MA Experiment ID: 20001558 Result: Up-regulated in Transcription
  misc_feature: MA Experiment 20001558 PARAMETER Experiment Name: At_Drought_Soil_Dry_P Parameter: Age (day) Value: 27
  misc_feature: MA Experiment 20001558 PARAMETER Experiment Name: At_Drought_Soil_Dry_P Parameter: Organism Value: A. thaliana
  misc_feature: MA Experiment 20001558 PARAMETER Experiment Name: At_Drought_Soil_Dry_P Parameter: Plant Line Value: WS
  misc_feature: MA Experiment 20001558 PARAMETER Experiment Name: At_Drought_Soil_Dry_P Parameter: Post Timepoint (hr) Value: 6
  misc_feature: MA Experiment 20001558 PARAMETER Experiment Name: At_Drought_Soil_Dry_P Parameter: Post-Treatment Value: Re-Water vs. No Drought
  misc_feature: MA Experiment 20001558 PARAMETER Experiment Name: At_Drought_Soil_Dry_P Parameter: Timepoint (day) Value: 13
  misc_feature: MA Experiment 20001558 PARAMETER Experiment Name: At_Drought_Soil_Dry_P Parameter: Treatment Value: Drought vs. No Drought
  misc_feature: MA Experiment ID: 20001905 Result: Down-regulated in Transcription
  misc_feature: MA Experiment 20001905 PARAMETER Experiment Name: At_Drought_Reproduction_P Parameter: Age (day) Value: 40
  misc_feature: MA Experiment 20001905 PARAMETER Experiment Name: At_Drought_Reproduction_P Parameter: Organism Value: A. thaliana
  misc_feature: MA Experiment 20001905 PARAMETER Experiment Name: At_Drought_Reproduction_P Parameter: Plant Line Value: WS
  misc_feature: MA Experiment 20001905 PARAMETER Experiment Name: At_Drought_Reproduction_P Parameter: Timepoint (day) Value: 10
  misc_feature: MA Experiment 20001905 PARAMETER Experiment Name: At_Drought_Reproduction_P Parameter: Tissue Value: Rosettes
  misc_feature: MA Experiment 20001905 PARAMETER Experiment Name: At_Drought_Reproduction_P Parameter: Treatment Value: Drought vs. No Drought
  misc_feature: MA Experiment ID: 20001906 Result: Down-regulated in Transcription
  misc_feature: MA Experiment 20001906 PARAMETER Experiment Name: At_Drought_Reproduction_P Parameter: Age (day) Value: 35
  misc_feature: MA Experiment 20001906 PARAMETER Experiment Name: At_Drought_Reproduction_P Parameter: Organism Value: A. thaliana
  misc_feature: MA Experiment 20001906 PARAMETER Experiment Name: At_Drought_Reproduction_P Parameter: Plant Line Value: WS
  misc_feature: MA Experiment 20001906 PARAMETER Experiment Name: At_Drought_Reproduction_P Parameter: Timepoint (day) Value: 5
  misc_feature: MA Experiment 20001906 PARAMETER Experiment Name: At_Drought_Reproduction_P Parameter: Tissue Value: Siliques
  misc_feature: MA Experiment 20001906 PARAMETER Experiment Name: At_Drought_Reproduction_P Parameter: Treatment Value: Drought vs. No Drought
actcttaatctttaaaaaaaagaaaaaaaaaacagaacaatttcttcttcctctgggatccataagttttgagattttggtggtcagtgtctgatggagtgtaatgcaaagccaccgtttcaatgggaattggaaaacttgatatcttttggcacttctacagctgaagttcctagaaagctaaagccaatggagtgggaaattgatggatttgattgcacctctctgtattcttcaagctttgatgcagtagcttatggtggtagttcaggttctgatatagctcatgctttctctaaaagctcaaagtcaacttccattagctcttcatcagctgaagttagaacacacaattttacatcagaaactggtgaaagtcttcctggagaatttgcaaaggggattgatacttctccaactcttgaactttcttttggctctggtgatccggttctcggtttaaagcttggtaaacgaacgtactttgaagacttttgggaagtggagaatgctaaaggtttgggacttcccgtgagccttgcttcgtcttctgtttctccggtgaagaaatcgaaatccattcctcagaggttacaaactcctcactgtcaagttgaaggctgtaatcttgatctttcatcagctaaagactatcatcggaaacataggatttgtgaaaaccattcaaagtttcctaaagtcgttgtgagtggcgtagagcgtcggttctgccaacaatgtagcaggttccactgtctctccgagtttgatgagaagaaacgtagctgtcgccgacgtctctcagatcacaatgcaagacgtcgcaagccaaatcctggaaggacatatgatgggaaaccacaggtggattttgtatggaacagatttgcgcttatccatccaagaagtgaggaaaagtttctatggcccagttcaaagcctgtaccatcaagagtcttaatgccgcagcctgcaaagaccgagatttccaataagctgttcaccgagcacagtagatttggattgttggaccccaaaacaaaatccgcaagagcggagttattcagtaaagaaaaggtcacaatctcttcacacatgggtgcttctcaagatcttgatggtgctctctctcttctgtcaaattcaacaacatgggtttcttcctctgaccaaccaagacgttttacccttgatcaccatccctcaagcaacctccaacccgtagctaaccggtctgcggctcaactcagttcagtgtccggctattggcagccggacccacccgcagttgaaggcccgaccgctctgcatagaaatggggcaggccagtttaatgaaaactacttcagcttgaaccagttttataactgaaagctgtatgcctttaaatcctatttaggatcaagcaagctagtgataagttaagataggagctgtgaaacttgcaagacaccaaatcctctcttatttctttgtccaaatattttcatgggttagagagctttgacaattgtctttaatatcaactttatcgtgttatacattaggattataaatcttgatggtgtactacg

SEQ ID NO: 37436 - protein, 425 aa, Arabidopsis thaliana
  peptide (1)..(425): Ceres Seq. ID no. 12357667
  misc_feature (171)..(249): Pfam Name: SBP domain Pfam Description: SBP domain
  misc_feature (156)..(425): Homolog of NCBI NO: 13877707 NR Description: similar to squamosa-promoter binding protein 1
  misc_feature (98)..(256): Homolog of NCBI NO: 5931778 NR Description: SBP-domain protein 1 [Zea mays]
  misc_feature (116)..(356): Homolog of NCBI NO: 25352584 NR Description: squamosa promoter binding protein-homolog 4
  misc_feature (10)..(352): Homolog of NCBI NO: 25403307 NR Description: protein F17L21.14 [imported] - Arabidopsis
  misc_feature (1)..(352): Homolog of NCBI NO: 18396302 NR Description: putative squamosa-promoter binding protein 2
  misc_feature (9)..(352): Homolog of NCBI NO: 9802546 NR Description: F17L21.15 [Arabidopsis thaliana]
  misc_feature (1)..(352): Homolog of NCBI NO: 18650611 NR Description: At1g27370/F17L21_16 [Arabidopsis thaliana]
  misc_feature (1)..(352): Homolog of NCBI NO: 22329813 NR Description: putative squamosa-promoter binding protein 2
  misc_feature (1)..(425): Homolog of NCBI NO: 15239820 NR Description: squamosa promoter binding protein-like 2
  misc_feature (1)..(425): Homolog of NCBI NO: 25456646 NR Description: squamosa promoter binding protein 2
MECNAKPPFQWELENLISFGTSTAEVPRKLKPMEWEIDGFDCTSLYSSSFDAVAYGGSSGSDIAHAFSKSSKSTSISSSSAEVRTHNFTSETGESLPGEFAKGIDTSPTLELSFGSGDPVLGLKLGKRTYFEDFWEVENAKGLGLPVSLASSSVSPVKKSKSIPQRLQTPHCQVEGCNLDLSSAKDYHRKHRICENHSKFPKVVVSGVERRFCQQCSRFHCLSEFDEKKRSCRRRLSDHNARRRKPNPGRTYDGKPQVDFVWNRFALIHPRSEEKFLWPSSKPVPSRVLMPQPAKTEISNKLFTEHSRFGLLDPKTKSARAELFSKEKVTISSHMGASQDLDGALSLLSNSTTWVSSSDQPRRFTLDHHPSSNLQPVANRSAAQLSSVSGYWQPDPPAVEGPTALHRNGAGQFNENYFSLNQFYN

SEQ ID NO: 37437 - protein, 393 aa, Arabidopsis thaliana
  peptide (1)..(393): Ceres Seq. ID no. 12357668
  misc_feature (139)..(217): Pfam Name: SBP domain Pfam Description: SBP domain
  misc_feature (124)..(393): Homolog of NCBI NO: 13877707 NR Description: similar to squamosa-promoter binding protein 1
  misc_feature (66)..(224): Homolog of NCBI NO: 5931778 NR Description: SBP-domain protein 1 [Zea mays]
  misc_feature (84)..(324): Homolog of NCBI NO: 25352584 NR Description: squamosa promoter binding protein-homolog 4
  misc_feature (1)..(320): Homolog of NCBI NO: 25403307 NR Description: protein F17L21.14 [imported] - Arabidopsis
  misc_feature (1)..(320): Homolog of NCBI NO: 18396302 NR Description: putative squamosa-promoter binding protein 2
  misc_feature (1)..(320): Homolog of NCBI NO: 9802546 NR Description: F17L21.15 [Arabidopsis thaliana]
  misc_feature (1)..(320): Homolog of NCBI NO: 18650611 NR Description: At1g27370/F17L21_16 [Arabidopsis thaliana]
  misc_feature (1)..(320): Homolog of NCBI NO: 22329813 NR Description: putative squamosa-promoter binding protein 2
  misc_feature (1)..(393): Homolog of NCBI NO: 15239820 NR Description: squamosa promoter binding protein-like 2
  misc_feature (1)..(393): Homolog of NCBI NO: 25456646 NR Description: squamosa promoter binding protein 2
MEWEIDGFDCTSLYSSSFDAVAYGGSSGSDIAHAFSKSSKSTSISSSSAEVRTHNFTSETGESLPGEFAKGIDTSPTLELSFGSGDPVLGLKLGKRTYFEDFWEVENAKGLGLPVSLASSSVSPVKKSKSIPQRLQTPHCQVEGCNLDLSSAKDYHRKHRICENHSKFPKVVVSGVERRFCQQCSRFHCLSEFDEKKRSCRRRLSDHNARRRKPNPGRTYDGKPQVDFVWNRFALIHPRSEEKFLWPSSKPVPSRVLMPQPAKTEISNKLFTEHSRFGLLDPKTKSARAELFSKEKVTISSHMGASQDLDGALSLLSNSTTWVSSSDQPRRFTLDHHPSSNLQPVANRSAAQLSSVSGYWQPDPPAVEGPTALHRNGAGQFNENYFSLNQFYN

SEQ ID NO: 37438 - DNA, 1264 bp, Arabidopsis thaliana
  misc_feature (1)..(1264): Ceres Seq. ID no. 12423107
  misc_feature: MA Experiment ID: 108501 Result: Up-regulated in Transcription
  misc_feature: MA Experiment 108501 PARAMETER Experiment Name: At_ap2_floral_buds_cDNA_P Parameter: Plant Line Value: ap2 (Ler.)
  misc_feature: MA Experiment 108501 PARAMETER Experiment Name: At_ap2_floral_buds_cDNA_P Parameter: Tissue Value: Closed Flower
  misc_feature: MA Experiment ID: 108607 Result: Up-regulated in Transcription
  misc_feature: MA Experiment 108607 PARAMETER Experiment Name: At_100uM_ABA_cDNA_P Parameter: Timepoint (hr) Value: 4
  misc_feature: MA Experiment 108607 PARAMETER Experiment Name: At_100uM_ABA_cDNA_P Parameter: Tissue Value: Aerial
  misc_feature: MA Experiment 108607 PARAMETER Experiment Name: At_100uM_ABA_cDNA_P Parameter: Treatment Value: 100uM ABA vs. No Treatment
  misc_feature: MA Experiment ID: 20000112 Result: Down-regulated in Transcription
  misc_feature: MA Experiment 20000112 PARAMETER Experiment Name: At_42deg_Heat_cDNA_P Parameter: Temperature (deg C) Value: 42 vs. 22
  misc_feature: MA Experiment 20000112 PARAMETER Experiment Name: At_42deg_Heat_cDNA_P Parameter: Timepoint (hr) Value: 2
  misc_feature: MA Experiment 20000112 PARAMETER Experiment Name: At_42deg_Heat_cDNA_P Parameter: Tissue Value: Aerial
  misc_feature: MA Experiment ID: 20000144 Result: Down-regulated in Transcription
  misc_feature: MA Experiment 20000144 PARAMETER Experiment Name: At_42deg_Heat_cDNA_P Parameter: Temperature (deg C) Value: 42 vs. 22
  misc_feature: MA Experiment 20000144 PARAMETER Experiment Name: At_42deg_Heat_cDNA_P Parameter: Timepoint (hr) Value: 1
  misc_feature: MA Experiment 20000144 PARAMETER Experiment Name: At_42deg_Heat_cDNA_P Parameter: Tissue Value: Aerial
  misc_feature: MA Experiment ID: 20000171 Result: Down-regulated in Transcription
  misc_feature: MA Experiment 20000171 PARAMETER Experiment Name: At_42deg_Heat_P Parameter: Age (day) Value: 14
  misc_feature: MA Experiment 20000171 PARAMETER Experiment Name: At_42deg_Heat_P Parameter: Organism Value: A. thaliana
  misc_feature: MA Experiment 20000171 PARAMETER Experiment Name: At_42deg_Heat_P Parameter: Plant Line Value: WS
  misc_feature: MA Experiment 20000171 PARAMETER Experiment Name: At_42deg_Heat_P Parameter: Temperature (deg C) Value: 42 vs. 22
  misc_feature: MA Experiment 20000171 PARAMETER Experiment Name: At_42deg_Heat_P Parameter: Timepoint (hr) Value: 1
  misc_feature: MA Experiment 20000171 PARAMETER Experiment Name: At_42deg_Heat_P Parameter: Tissue Value: Aerial
  misc_feature: MA Experiment ID: 20000173 Result: Down-regulated in Transcription
  misc_feature: MA Experiment 20000173 PARAMETER Experiment Name: At_42deg_Heat_P Parameter: Age (day) Value: 14
  misc_feature: MA Experiment 20000173 PARAMETER Experiment Name: At_42deg_Heat_P Parameter: Organism Value: A. thaliana
  misc_feature: MA Experiment 20000173 PARAMETER Experiment Name: At_42deg_Heat_P Parameter: Plant Line Value: WS
  misc_feature: MA Experiment 20000173 PARAMETER Experiment Name: At_42deg_Heat_P Parameter: Temperature (deg C) Value: 42 vs. 22
  misc_feature: MA Experiment 20000173 PARAMETER Experiment Name: At_42deg_Heat_P Parameter: Timepoint (hr) Value: 6
  misc_feature: MA Experiment 20000173 PARAMETER Experiment Name: At_42deg_Heat_P Parameter: Tissue Value: Aerial
  misc_feature: MA Experiment ID: 20000185 Result: Down-regulated in Transcription
  misc_feature: MA Experiment 20000185 PARAMETER Experiment Name: At_Roots__P Parameter: Age (day) Value: 7 vs. 21
  misc_feature: MA Experiment 20000185 PARAMETER Experiment Name: At_Roots__P Parameter: Organism Value: A. thaliana
  misc_feature: MA Experiment 20000185 PARAMETER Experiment Name: At_Roots__P Parameter: Tissue Value: Roots vs. Whole Plant
  misc_feature: MA Experiment ID: 20000235 Result: Down-regulated in Transcription
  misc_feature: MA Experiment 20000235 PARAMETER Experiment Name: At_Siliques_P Parameter: Age (day) Value: 21
  misc_feature: MA Experiment 20000235 PARAMETER Experiment Name: At_Siliques_P Parameter: Organism Value: A. thaliana
  misc_feature: MA Experiment 20000235 PARAMETER Experiment Name: At_Siliques_P Parameter: Plant Line Value: WS
  misc_feature: MA Experiment 20000235 PARAMETER Experiment Name: At_Siliques_P Parameter: Tissue Value: 5-10mm Siliques vs. Whole Plant
  misc_feature: MA Experiment ID: 20000439 Result: Down-regulated in Transcription
  misc_feature: MA Experiment 20000439 PARAMETER Experiment Name: At_Roots__P Parameter: Age (day) Value: 14 vs. 21
  misc_feature: MA Experiment 20000439 PARAMETER Experiment Name: At_Roots__P Parameter: Organism Value: A. thaliana
  misc_feature: MA Experiment 20000439 PARAMETER Experiment Name: At_Roots__P Parameter: Tissue Value: Roots vs. Whole Plant
  misc_feature: MA Experiment ID: 20000451 Result: Up-regulated in Transcription
  misc_feature: MA Experiment 20000451 PARAMETER Experiment Name: At_CS6879_Shoots-Roots_P Parameter: Age (day) Value: 14
  misc_feature: MA Experiment 20000451 PARAMETER Experiment Name: At_CS6879_Shoots-Roots_P Parameter: Organism Value: A. thaliana
  misc_feature: MA Experiment 20000451 PARAMETER Experiment Name: At_CS6879_Shoots-Roots_P Parameter: Plant Line Value: CS6879 vs. WS
  misc_feature: MA Experiment 20000451 PARAMETER Experiment Name: At_CS6879_Shoots-Roots_P Parameter: Tissue Value: Roots
  misc_feature: MA Experiment ID: 20000495 Result: Down-regulated in Transcription
  misc_feature: MA Experiment 20000495 PARAMETER Experiment Name: At_Guard_Cells_P Parameter: Harvest Date Value: 8/2/2002
  misc_feature: MA Experiment 20000495 PARAMETER Experiment Name: At_Guard_Cells_P Parameter: Organism Value: A. thaliana
  misc_feature: MA Experiment 20000495 PARAMETER Experiment Name: At_Guard_Cells_P Parameter: Tissue Value: Guard Cells vs. Leaves
  misc_feature: MA Experiment ID: 20000573 Result: Down-regulated in Transcription
  misc_feature: MA Experiment 20000573 PARAMETER Experiment Name: At_100uM_ABA_Mutants__P Parameter: Organism Value: A. thaliana
  misc_feature: MA Experiment 20000573 PARAMETER Experiment Name: At_100uM_ABA_Mutants__P Parameter: Plant Line Value: CS22 vs. Ler wt
  misc_feature: MA Experiment 20000573 PARAMETER Experiment Name: At_100uM_ABA_Mutants__P Parameter: Timepoint (hr) Value: N/A
  misc_feature: MA Experiment 20000573 PARAMETER Experiment Name: At_100uM_ABA_Mutants__P Parameter: Tissue Value: Whole Plant
  misc_feature: MA Experiment 20000573 PARAMETER Experiment Name: At_100uM_ABA_Mutants__P Parameter: Treatment Value: None
  misc_feature: MA Experiment ID: 20000574 Result: Down-regulated in Transcription
  misc_feature: MA Experiment 20000574 PARAMETER Experiment Name: At_100uM_ABA_Mutants__P Parameter: Organism Value: A. thaliana
  misc_feature: MA Experiment 20000574 PARAMETER Experiment Name: At_100uM_ABA_Mutants__P Parameter: Plant Line Value: CS23 vs. Ler wt
  misc_feature: MA Experiment 20000574 PARAMETER Experiment Name: At_100uM_ABA_Mutants__P Parameter: Timepoint (hr) Value: N/A
  misc_feature: MA Experiment 20000574 PARAMETER Experiment Name: At_100uM_ABA_Mutants__P Parameter: Tissue Value: Whole Plant
  misc_feature: MA Experiment 20000574 PARAMETER Experiment Name: At_100uM_ABA_Mutants__P Parameter: Treatment Value: None
  misc_feature: MA Experiment ID: 20001910 Result: Up-regulated in Transcription
  misc_feature: MA Experiment 20001910 PARAMETER Experiment Name: At_Drought_Reproduction_P Parameter: Age (day) Value: 37
  misc_feature: MA Experiment 20001910 PARAMETER Experiment Name: At_Drought_Reproduction_P Parameter: Organism Value: A. thaliana
  misc_feature: MA Experiment 20001910 PARAMETER Experiment Name: At_Drought_Reproduction_P Parameter: Plant Line Value: WS
  misc_feature: MA Experiment 20001910 PARAMETER Experiment Name: At_Drought_Reproduction_P Parameter: Timepoint (day) Value: 7
  misc_feature: MA Experiment 20001910 PARAMETER Experiment Name: At_Drought_Reproduction_P Parameter: Tissue Value: Flowers
  misc_feature: MA Experiment 20001910 PARAMETER Experiment Name: At_Drought_Reproduction_P Parameter: Treatment Value: Drought vs. No Drought
aatttgcagggttcttcttcttcttcttcttttttctctaaactggaaaataaagaagaaaagaacatggatttgcattcttgtctaaactcatactttcttttgctcctcctctgtcttcttattaccaccattaactcaacgaagccattagaacaagaaacagtgctttttggcggcaactttccggctttttatgttattggagattcattggttgattcaggaaacaataatcatcttacaacgatggtcaaatcgaattttccaccttatggttcggactttgaaggtggcaaagccaccggccgtttcagcaatggcaaaacaattgctgattacattgctatctactatggtcttcctttggttcctgcttatttgggattatctcaagaagaaaagaatagtatctcaactggtattaactatgcttctgctggctgtgggattcttcctcagacaggaaggcaaataggaacatgtctctcgttaagtgtccaagtcgatatgttccaggagaccatcacaaacaatctgaagaagaacttcaagaagtccgagctccgtgaacacttggctgaatcgttgtttatgatcgccattggggttaacgactacacattcttatttaatgaaacaaccgatgcgaatgagtttgcaaacaagcttcttcatgattacttgcttcaaatagaaagattgcacaagttaggagcaaggaagttcttcatcaacaacattaaaccattaggatgttacccaaatgttgtagctaagaccgtgccacgtggaagctgcaacgatgctttgaactttgcggtcagcattttcaacactaagcttagaaaaagtctgtctcgtatgacgcaaaaattcatcaaaacgtcctttttatactcggattactacaactacatgttgggactaagaggaccttcaagcaatcaagttggttcgagtctattgaacgtgacaagcccatgttgtcctaacgtttatgatggaggtcaattgacaagttgcaagcctggttcgatcgcgtgtaaggcacccgatactcatattttctttgatccgtttcatccgactcaattggcgaattacatgtatgcgattgcgtgtttccacgagagaagtatttgccatgtgatattggaagattaacttttgtcggcaacaatcttttttgtttgttttaaacaccaatttggttgttgtttgttgctttcaacttttcaatatcatcagaacttttaagatt

SEQ ID NO: 37439 - protein, 388 aa, Arabidopsis thaliana
  peptide (1)..(388): Ceres Seq. ID no. 12423108
  misc_feature (65)..(375): Pfam Name: GDSL-like Lipase/Acylhydrolase Pfam Description: GDSL-like Lipase/Acylhydrolase
  misc_feature (32)..(385): Homolog of NCBI NO: 18398991 NR Description: unknown protein
  misc_feature (17)..(377): Homolog of NCBI NO: 15224005 NR Description: putative GDSL-motif lipase/acylhydrolase; protein
  misc_feature (63)..(380): Homolog of NCBI NO: 21592417 NR Description: lipase/hydrolase, putative [Arabidopsis thaliana]
  misc_feature (63)..(380): Homolog of NCBI NO: 15220514 NR Description: lipase/hydrolase, putative
  misc_feature (60)..(385): Homolog of NCBI NO: 18409881 NR Description: hypothetical protein; protein id: At1g71691.1
  misc_feature (63)..(372): Homolog of NCBI NO: 11280578 NR Description: hypothetical protein F14F8_100 - Arabidopsis
  misc_feature (63)..(372): Homolog of NCBI NO: 18417760 NR Description: putative protein
  misc_feature (21)..(385): Homolog of NCBI NO: 15241626 NR Description: GDSL-motif lipase acylhydrolase-like protein
  misc_feature (23)..(266): Homolog of NCBI NO: 15228057 NR Description: putative GDSL-motif lipase/hydrolase; protein id:
  misc_feature (23)..(388): Homolog of NCBI NO: 15228051 NR Description: putative GDSL-motif lipase/hydrolase
NLQGSSSSSSFFSKLENKEEKNMDLHSCLNSYFLLLLLCLLITTINSTKPLEQETVLFGGNFPAFYVIGDSLVDSGNNNHLTTMVKSNFPPYGSDFEGGKATGRFSNGKTIADYIAIYYGLPLVPAYLGLSQEEKNSISTGINYASAGCGILPQTGRQIGTCLSLSVQVDMFQETITNNLKKNFKKSELREHLAESLFMIAIGVNDYTFLFNETTDANEFANKLLHDYLLQIERLHKLGARKFFINNIKPLGCYPNVVAKTVPRGSCNDALNFAVSIFNTKLRKSLSRMTQKFIKTSFLYSDYYNYMLGLRGPSSNQVGSSLLNVTSPCCPNVYDGGQLTSCKPGSIACKAPDTHIFFDPFHPTQLANYMYAIACFHERSICHVILED

SEQ ID NO: 37440 - protein, 366 aa, Arabidopsis thaliana
  peptide (1)..(366): Ceres Seq. ID no. 12423109
  misc_feature (43)..(353): Pfam Name: GDSL-like Lipase/Acylhydrolase Pfam Description: GDSL-like Lipase/Acylhydrolase
  misc_feature (10)..(363): Homolog of NCBI NO: 18398991 NR Description: unknown protein
  misc_feature (1)..(355): Homolog of NCBI NO: 15224005 NR Description: putative GDSL-motif lipase/acylhydrolase; protein
  misc_feature (41)..(358): Homolog of NCBI NO: 21592417 NR Description: lipase/hydrolase, putative [Arabidopsis thaliana]
  misc_feature (41)..(358): Homolog of NCBI NO: 15220514 NR Description: lipase/hydrolase, putative
  misc_feature (38)..(363): Homolog of NCBI NO: 18409881 NR Description: hypothetical protein; protein id: At1g71691.1
  misc_feature (41)..(350): Homolog of NCBI NO: 11280578 NR Description: hypothetical protein F14F8_100 - Arabidopsis
  misc_feature (41)..(350): Homolog of NCBI NO: 18417760 NR Description: putative protein
  misc_feature (1)..(363): Homolog of NCBI NO: 15241626 NR Description: GDSL-motif lipase acylhydrolase-like protein
  misc_feature (1)..(244): Homolog of NCBI NO: 15228057 NR Description: putative GDSL-motif lipase/hydrolase; protein id:
  misc_feature (1)..(366): Homolog of NCBI NO: 15228051 NR Description: putative GDSL-motif lipase/hydrolase
MDLHSCLNSYFLLLLLCLLITTINSTKPLEQETVLFGGNFPAFYVIGDSLVDSGNNNHLTTMVKSNFPPYGSDFEGGKATGRFSNGKTIADYIAIYYGLPLVPAYLGLSQEEKNSISTGINYASAGCGILPQTGRQIGTCLSLSVQVDMFQETITNNLKKNFKKSELREHLAESLFMIAIGVNDYTFLFNETTDANEFANKLLHDYLLQIERLHKLGARKFFINNIKPLGCYPNVVAKTVPRGSCNDALNFAVSIFNTKLRKSLSRMTQKFIKTSFLYSDYYNYMLGLRGPSSNQVGSSLLNVTSPCCPNVYDGGQLTSCKPGSIACKAPDTHIFFDPFHPTQLANYMYAIACFHERSICHVILED

SEQ ID NO: 37441 - protein, 305 aa, Arabidopsis thaliana
  peptide (1)..(305): Ceres Seq. ID no. 12423110
  misc_feature (1)..(292): Pfam Name: GDSL-like Lipase/Acylhydrolase Pfam Description: GDSL-like Lipase/Acylhydrolase
  misc_feature (1)..(302): Homolog of NCBI NO: 18398991 NR Description: unknown protein
  misc_feature (1)..(294): Homolog of NCBI NO: 15224005 NR Description: putative GDSL-motif lipase/acylhydrolase; protein
  misc_feature (1)..(297): Homolog of NCBI NO: 21592417 NR Description: lipase/hydrolase, putative [Arabidopsis thaliana]
  misc_feature (1)..(297): Homolog of NCBI NO: 15220514 NR Description: lipase/hydrolase, putative
  misc_feature (1)..(302): Homolog of NCBI NO: 18409881 NR Description: hypothetical protein; protein id: At1g71691.1
  misc_feature (1)..(289): Homolog of NCBI NO: 11280578 NR Description: hypothetical protein F14F8_100 - Arabidopsis
  misc_feature (1)..(289): Homolog of NCBI NO: 18417760 NR Description: putative protein
  misc_feature (1)..(302): Homolog of NCBI NO: 15241626 NR Description: GDSL-motif lipase acylhydrolase-like protein
  misc_feature (1)..(183): Homolog of NCBI NO: 15228057 NR Description: putative GDSL-motif lipase/hydrolase; protein id:
  misc_feature (1)..(305): Homolog of NCBI NO: 15228051 NR Description: putative GDSL-motif lipase/hydrolase
MVKSNFPPYGSDFEGGKATGRFSNGKTIADYIAIYYGLPLVPAYLGLSQEEKNSISTGINYASAGCGILPQTGRQIGTCLSLSVQVDMFQETITNNLKKNFKKSELREHLAESLFMIAIGVNDYTFLFNETTDANEFANKLLHDYLLQIERLHKLGARKFFINNIKPLGCYPNVVAKTVPRGSCNDALNFAVSIFNTKLRKSLSRMTQKFIKTSFLYSDYYNYMLGLRGPSSNQVGSSLLNVTSPCCPNVYDGGQLTSCKPGSIACKAPDTHIFFDPFHPTQLANYMYAIACFHERSICHVILED

SEQ ID NO: 37442 - DNA, 424 bp, Arabidopsis thaliana
  misc_feature (1)..(424): Ceres Seq. ID no. 12738873
  misc_feature: MA Experiment ID: 108434 Result: Up-regulated in Transcription
  misc_feature: MA Experiment 108434 PARAMETER Experiment Name: At_Root_Tips_cDNA_P Parameter: Tissue Value: Root Tips
  misc_feature: MA Experiment ID: 108462 Result: Down-regulated in Transcription
  misc_feature: MA Experiment 108462 PARAMETER Experiment Name: At_Germinating_Seeds_cDNA_P Parameter: Age (day) Value: 2 vs. 0
  misc_feature: MA Experiment 108462 PARAMETER Experiment Name: At_Germinating_Seeds_cDNA_P Parameter: Tissue Value: Germinating Seeds
  misc_feature: MA Experiment ID: 108463 Result: Down-regulated in Transcription
  misc_feature: MA Experiment 108463 PARAMETER Experiment Name: At_Germinating_Seeds_cDNA_P Parameter: Age (day) Value: 3 vs. 0
  misc_feature: MA Experiment 108463 PARAMETER Experiment Name: At_Germinating_Seeds_cDNA_P Parameter: Tissue Value: Germinating Seeds
  misc_feature: MA Experiment ID: 108573 Result: Down-regulated in Transcription
  misc_feature: MA Experiment 108573 PARAMETER Experiment Name: At_Drought_cDNA_P Parameter: Timepoint (hr) Value: 6
  misc_feature: MA Experiment 108573 PARAMETER Experiment Name: At_Drought_cDNA_P Parameter: Tissue Value: Aerial
  misc_feature: MA Experiment 108573 PARAMETER Experiment Name: At_Drought_cDNA_P Parameter: Treatment Value: Drought vs. No Drought
  misc_feature: MA Experiment ID: 20000090 Result: Up-regulated in Transcription
atttcccatcaacgcctccatcggcggtgacggaaagtctatcgagatccgtaacttccttggcgagaagaaggtgaggaaggtagagatgttggatggtgtaaccattgttcgatctgagaaggtgaaggatgagattgttcttgacggtaacgatatcgagcttgtttcaaggtcgtgcgctctgatcaaccagaaatgtcacgtgaagaagaaggatatcaggaagttccttgacggtatctatgttagcgagaaaagcaagatcgtagaggaagaatgaatactcatattcccctcttagctcatatttcttgtgtttggaatgttgttagttttgttttatggaccaaatccaccggtgatgtaaaccttgccttttttttgttcgagaatttattaacttatgcaacaagttttggag

SEQ ID NO: 37443 - protein, 93 aa, Arabidopsis thaliana
  peptide (1)..(93): Ceres Seq. ID no. 12738874
  misc_feature (1)..(80): Pfam Name: Ribosomal protein L6 Pfam Description: Ribosomal protein L6
  misc_feature (1)..(65): Homolog of NCBI NO: 12322579 NR Description: ribosomal protein L9, 5' partial [Arabidopsis
  misc_feature (4)..(93): Homolog of NCBI NO: 7440703 NR Description: probable ribosomal protein L9 - rice (fragment)
  misc_feature (1)..(92): Homolog of NCBI NO: 33087067 NR Description: ribosomal L9-like protein [Oryza sativa (japonica
  misc_feature (1)..(92): Homolog of NCBI NO: 6174959 NR Description: 60S RIBOSOMAL PROTEIN L9
  misc_feature (1)..(93): Homolog of NCBI NO: 2129720 NR Description: ribosomal protein L9, cytosolic - Arabidopsis
  misc_feature (1)..(93): Homolog of NCBI NO: 6015604 NR Description: ribosomal protein L9 [Pisum sativum]
  misc_feature (1)..(93): Homolog of NCBI NO: 266945 NR Description: 60S ribosomal protein L9 (Gibberellin-regulated
  misc_feature (1)..(93): Homolog of NCBI NO: 15235114 NR Description: putative ribosomal protein L9, cytosolic
  misc_feature (1)..(93): Homolog of NCBI NO: 21554945 NR Description: ribosomal protein L9, putative [Arabidopsis
  misc_feature (1)..(93): Homolog of NCBI NO: 18398753 NR Description: ribosomal protein L9, putative
FPINASIGGDGKSIEIRNFLGEKKVRKVEMLDGVTIVRSEKVKDEIVLDGNDIELVSRSCALINQKCHVKKKDIRKFLDGIYVSEKSKIVEEE

SEQ ID NO: 37444 - protein, 64 aa, Arabidopsis thaliana
  peptide (1)..(64): Ceres Seq. ID no. 12738875
  misc_feature (1)..(51): Pfam Name: Ribosomal protein L6 Pfam Description: Ribosomal protein L6
  misc_feature (1)..(36): Homolog of NCBI NO: 12322579 NR Description: ribosomal protein L9, 5' partial [Arabidopsis
  misc_feature (1)..(64): Homolog of NCBI NO: 7440703 NR Description: probable ribosomal protein L9 - rice (fragment)
  misc_feature (1)..(63): Homolog of NCBI NO: 33087067 NR Description: ribosomal L9-like protein [Oryza sativa (japonica
  misc_feature (1)..(63): Homolog of NCBI NO: 6174959 NR Description: 60S RIBOSOMAL PROTEIN L9
  misc_feature (1)..(64): Homolog of NCBI NO: 2129720 NR Description: ribosomal protein L9, cytosolic - Arabidopsis
  misc_feature (1)..(64): Homolog of NCBI NO: 6015604 NR Description: ribosomal protein L9 [Pisum sativum]
  misc_feature (1)..(64): Homolog of NCBI NO: 266945 NR Description: 60S ribosomal protein L9 (Gibberellin-regulated
  misc_feature (1)..(64): Homolog of NCBI NO: 15235114 NR Description: putative ribosomal protein L9, cytosolic
  misc_feature (1)..(64): Homolog of NCBI NO: 21554945 NR Description: ribosomal protein L9, putative [Arabidopsis
  misc_feature (1)..(64): Homolog of NCBI NO: 18398753 NR Description: ribosomal protein L9, putative
MLDGVTIVRSEKVKDEIVLDGNDIELVSRSCALINQKCHVKKKDIRKFLDGIYVSEKSKIVEEE

SEQ ID NO: 37445 - protein, 48 aa, Arabidopsis thaliana
  peptide (1)..(48): Ceres Seq. ID no. 12738876
MNTHIPLLAHISCVWNVVSFVLWTKSTGDVNLAFFLFENLLTYATSFG

SEQ ID NO: 37446 - DNA, 927 bp, Arabidopsis thaliana
  misc_feature (1)..(927): Ceres Seq. ID no. 12371965
  misc_feature: MA Experiment ID: 108434 Result: Up-regulated in Transcription
  misc_feature: MA Experiment 108434 PARAMETER Experiment Name: At_Root_Tips_cDNA_P Parameter: Tissue Value: Root Tips
  misc_feature: MA Experiment ID: 108461 Result: Up-regulated in Transcription
  misc_feature: MA Experiment 108461 PARAMETER Experiment Name: At_Germinating_Seeds_cDNA_P Parameter: Age (day) Value: 1 vs. 0
  misc_feature: MA Experiment 108461 PARAMETER Experiment Name: At_Germinating_Seeds_cDNA_P Parameter: Tissue Value: Germinating Seeds
  misc_feature: MA Experiment ID: 108462 Result: Up-regulated in Transcription
  misc_feature: MA Experiment 108462 PARAMETER Experiment Name: At_Germinating_Seeds_cDNA_P Parameter: Age (day) Value: 2 vs. 0
  misc_feature: MA Experiment 108462 PARAMETER Experiment Name: At_Germinating_Seeds_cDNA_P Parameter: Tissue Value: Germinating Seeds
  misc_feature: MA Experiment ID: 108463 Result: Up-regulated in Transcription
  misc_feature: MA Experiment 108463 PARAMETER Experiment Name: At_Germinating_Seeds_cDNA_P Parameter: Age (day) Value: 3 vs. 0
  misc_feature: MA Experiment 108463 PARAMETER Experiment Name: At_Germinating_Seeds_cDNA_P Parameter: Tissue Value: Germinating Seeds
  misc_feature: MA Experiment ID: 108464 Result: Up-regulated in Transcription
  misc_feature: MA Experiment 108464 PARAMETER Experiment Name: At_Germinating_Seeds_cDNA_P Parameter: Age (day) Value: 4 vs. 0
  misc_feature: MA Experiment 108464 PARAMETER Experiment Name: At_Germinating_Seeds_cDNA_P Parameter: Tissue Value: Germinating Seeds
  misc_feature: MA Experiment ID: 20000071 Result: Down-regulated in Transcription
  misc_feature: MA Experiment 20000071 PARAMETER Experiment Name: At_100uM_ABA_Mutants_cDNA_P Parameter: Plant Line Value: CS8104
  misc_feature: MA Experiment 20000071 PARAMETER Experiment Name: At_100uM_ABA_Mutants_cDNA_P Parameter: Timepoint (hr) Value: 6
  misc_feature: MA Experiment 20000071 PARAMETER Experiment Name: At_100uM_ABA_Mutants_cDNA_P Parameter: Tissue Value: Aerial
  misc_feature: MA Experiment 20000071 PARAMETER Experiment Name: At_100uM_ABA_Mutants_cDNA_P Parameter: Treatment Value: 100uM ABA vs. No Treatment
  misc_feature: MA Experiment ID: 20000072 Result: Down-regulated in Transcription
  misc_feature: MA Experiment 20000072 PARAMETER Experiment Name: At_100uM_ABA_Mutants_cDNA_P Parameter: Plant Line Value: CS8105
  misc_feature: MA Experiment 20000072 PARAMETER Experiment Name: At_100uM_ABA_Mutants_cDNA_P Parameter: Timepoint (hr) Value: 6
  misc_feature: MA Experiment 20000072 PARAMETER Experiment Name: At_100uM_ABA_Mutants_cDNA_P Parameter: Tissue Value: Aerial
  misc_feature: MA Experiment 20000072 PARAMETER Experiment Name: At_100uM_ABA_Mutants_cDNA_P Parameter: Treatment Value: 100uM ABA vs. No Treatment
  misc_feature: MA Experiment ID: 20000093 Result: Down-regulated in Transcription
  misc_feature: MA Experiment 20000093 PARAMETER Experiment Name: At_42deg_Heat_cDNA_P Parameter: Temperature (deg C) Value: 42 vs. 22
  misc_feature: MA Experiment 20000093 PARAMETER Experiment Name: At_42deg_Heat_cDNA_P Parameter: Timepoint (hr) Value: 0.5
  misc_feature: MA Experiment 20000093 PARAMETER Experiment Name: At_42deg_Heat_cDNA_P Parameter: Tissue Value: Aerial
  misc_feature: MA Experiment ID: 20000111 Result: Down-regulated in Transcription
  misc_feature: MA Experiment 20000111 PARAMETER Experiment Name: At_42deg_Heat_cDNA_P Parameter: Temperature (deg C) Value: 42 vs. 22
  misc_feature: MA Experiment 20000111 PARAMETER Experiment Name: At_42deg_Heat_cDNA_P Parameter: Timepoint (hr) Value: 6
  misc_feature: MA Experiment 20000111 PARAMETER Experiment Name: At_42deg_Heat_cDNA_P Parameter: Tissue Value: Aerial
  misc_feature: MA Experiment ID: 20000112 Result: Down-regulated in Transcription
  misc_feature: MA Experiment 20000112 PARAMETER Experiment Name: At_42deg_Heat_cDNA_P Parameter: Temperature (deg C) Value: 42 vs. 22
  misc_feature: MA Experiment 20000112 PARAMETER Experiment Name: At_42deg_Heat_cDNA_P Parameter: Timepoint (hr) Value: 2
  misc_feature: MA Experiment 20000112 PARAMETER Experiment Name: At_42deg_Heat_cDNA_P Parameter: Tissue Value: Aerial
  misc_feature: MA Experiment ID: 20000117 Result: Down-regulated in Transcription
  misc_feature: MA Experiment 20000117 PARAMETER Experiment Name: At_100uM_ABA_Mutants_cDNA_P Parameter: Plant Line Value: Columbia
  misc_feature: MA Experiment 20000117 PARAMETER Experiment Name: At_100uM_ABA_Mutants_cDNA_P Parameter: Timepoint (hr) Value: 6
  misc_feature: MA Experiment 20000117 PARAMETER Experiment Name: At_100uM_ABA_Mutants_cDNA_P Parameter: Tissue Value: Aerial
  misc_feature: MA Experiment 20000117 PARAMETER Experiment Name: At_100uM_ABA_Mutants_cDNA_P Parameter: Treatment Value: 100uM ABA vs. No Treatment
  misc_feature: MA Experiment ID: 20000144 Result: Down-regulated in Transcription
  misc_feature: MA Experiment 20000144 PARAMETER Experiment Name: At_42deg_Heat_cDNA_P Parameter: Temperature (deg C) Value: 42 vs. 22
  misc_feature: MA Experiment 20000144 PARAMETER Experiment Name: At_42deg_Heat_cDNA_P Parameter: Timepoint (hr) Value: 1
  misc_feature: MA Experiment 20000144 PARAMETER Experiment Name: At_42deg_Heat_cDNA_P Parameter: Tissue Value: Aerial
  misc_feature: MA Experiment ID: 20000171 Result: Down-regulated in Transcription
  misc_feature: MA Experiment 20000171 PARAMETER Experiment Name: At_42deg_Heat_P Parameter: Age (day) Value: 14
  misc_feature: MA Experiment 20000171 PARAMETER Experiment Name: At_42deg_Heat_P Parameter: Organism Value: A. thaliana
  misc_feature: MA Experiment 20000171 PARAMETER Experiment Name: At_42deg_Heat_P Parameter: Plant Line Value: WS
  misc_feature: MA Experiment 20000171 PARAMETER Experiment Name: At_42deg_Heat_P Parameter: Temperature (deg C) Value: 42 vs. 22
  misc_feature: MA Experiment 20000171 PARAMETER Experiment Name: At_42deg_Heat_P Parameter: Timepoint (hr) Value: 1
  misc_feature: MA Experiment 20000171 PARAMETER Experiment Name: At_42deg_Heat_P Parameter: Tissue Value: Aerial
  misc_feature: MA Experiment ID: 20000173 Result: Down-regulated in Transcription
  misc_feature: MA Experiment 20000173 PARAMETER Experiment Name: At_42deg_Heat_P Parameter: Age (day) Value: 14
  misc_feature: MA Experiment 20000173 PARAMETER Experiment Name: At_42deg_Heat_P Parameter: Organism Value: A. thaliana
  misc_feature: MA Experiment 20000173 PARAMETER Experiment Name: At_42deg_Heat_P Parameter: Plant Line Value: WS
  misc_feature: MA Experiment 20000173 PARAMETER Experiment Name: At_42deg_Heat_P Parameter: Temperature (deg C) Value: 42 vs. 22
  misc_feature: MA Experiment 20000173 PARAMETER Experiment Name: At_42deg_Heat_P Parameter: Timepoint (hr) Value: 6
  misc_feature: MA Experiment 20000173 PARAMETER Experiment Name: At_42deg_Heat_P Parameter: Tissue Value: Aerial
  misc_feature: MA Experiment ID: 20000180 Result: Up-regulated in Transcription
  misc_feature: MA Experiment 20000180 PARAMETER Experiment Name: At_Germinating_Seeds_P Parameter: Age (hr) Value: 24 vs. 0
  misc_feature: MA Experiment 20000180 PARAMETER Experiment Name: At_Germinating_Seeds_P Parameter: Tissue Value: Germinating Seeds
  misc_feature: MA Experiment ID: 20000227 Result: Down-regulated in Transcription
  misc_feature: MA Experiment 20000227 PARAMETER Experiment Name: At_Root-Tips-vs-Tops_P Parameter: Tissue Value: Root Tips vs. Root Tops
  misc_feature: MA Experiment ID: 20000436 Result: Down-regulated in Transcription
  misc_feature: MA Experiment 20000436 PARAMETER Experiment Name: At_Drought_P Parameter: Age (day) Value: 7
  misc_feature: MA Experiment 20000436 PARAMETER Experiment Name: At_Drought_P Parameter: Organism Value: A. thaliana
  misc_feature: MA Experiment 20000436 PARAMETER Experiment Name: At_Drought_P Parameter: Plant Line Value: WS
  misc_feature: MA Experiment 20000436 PARAMETER Experiment Name: At_Drought_P Parameter: Timepoint (hr) Value: 12
  misc_feature: MA Experiment 20000436 PARAMETER Experiment Name: At_Drought_P Parameter: Tissue Value: Whole Plant
  misc_feature: MA Experiment 20000436 PARAMETER Experiment Name: At_Drought_P Parameter: Treatment Value: Drought vs. No Drought
  misc_feature: MA Experiment ID: 20000437 Result: Down-regulated in Transcription
  misc_feature: MA Experiment 20000437 PARAMETER Experiment Name: At_Drought_P Parameter: Age (day) Value: 8
  misc_feature: MA Experiment 20000437 PARAMETER Experiment Name: At_Drought_P Parameter: Organism Value: A. thaliana
  misc_feature: MA Experiment 20000437 PARAMETER Experiment Name: At_Drought_P Parameter: Plant Line Value: WS
  misc_feature: MA Experiment 20000437 PARAMETER Experiment Name: At_Drought_P Parameter: Timepoint (hr) Value: 24
  misc_feature: MA Experiment 20000437 PARAMETER Experiment Name: At_Drought_P Parameter: Tissue Value: Whole Plant
  misc_feature: MA Experiment 20000437 PARAMETER Experiment Name: At_Drought_P Parameter: Treatment Value: Drought vs. No Drought
  misc_feature: MA Experiment ID: 20000444 Result: Up-regulated in Transcription
  misc_feature: MA Experiment 20000444 PARAMETER Experiment Name: At_100uM_NAA__P Parameter: Age (day) Value: 14
  misc_feature: MA Experiment 20000444 PARAMETER Experiment Name: At_100uM_NAA__P Parameter: Organism Value: A. thaliana
  misc_feature: MA Experiment 20000444 PARAMETER Experiment Name: At_100uM_NAA__P Parameter: Plant Line Value: WS
  misc_feature: MA Experiment 20000444 PARAMETER Experiment Name: At_100uM_NAA__P Parameter: Timepoint (hr) Value: 1
  misc_feature: MA Experiment 20000444 PARAMETER Experiment Name: At_100uM_NAA__P Parameter: Tissue Value: Aerial
  misc_feature: MA Experiment 20000444 PARAMETER Experiment Name: At_100uM_NAA__P Parameter: Treatment Value: 100uM NAA vs. No Treatment
  misc_feature: MA Experiment ID: 20001247 Result: Up-regulated in Transcription
  misc_feature: MA Experiment 20001247 PARAMETER Experiment Name: At_Far-red-induction_P Parameter: Age (day) Value: 7
  misc_feature: MA Experiment 20001247 PARAMETER Experiment Name: At_Far-red-induction_P Parameter: Light Value: Far-red vs. White
  misc_feature: MA Experiment 20001247 PARAMETER Experiment Name: At_Far-red-induction_P Parameter: Organism Value: A. thaliana
  misc_feature: MA Experiment 20001247 PARAMETER Experiment Name: At_Far-red-induction_P Parameter: Plant Line Value: Columbia
  misc_feature: MA Experiment 20001247 PARAMETER Experiment Name: At_Far-red-induction_P Parameter: Timepoint (hr) Value: 1
  misc_feature: MA Experiment 20001247 PARAMETER Experiment Name: At_Far-red-induction_P Parameter: Tissue Value: Whole Plant
  misc_feature: MA Experiment ID: 20001248 Result: Up-regulated in Transcription
  misc_feature: MA Experiment 20001248 PARAMETER Experiment Name: At_Far-red-induction_P Parameter: Age (day) Value: 7
  misc_feature: MA Experiment 20001248 PARAMETER Experiment Name: At_Far-red-induction_P Parameter: Light Value: Far-red vs. White
  misc_feature: MA Experiment 20001248 PARAMETER Experiment Name: At_Far-red-induction_P Parameter: Organism Value: A. thaliana
  misc_feature: MA Experiment 20001248 PARAMETER Experiment Name: At_Far-red-induction_P Parameter: Plant Line Value: Columbia
  misc_feature: MA Experiment 20001248 PARAMETER Experiment Name: At_Far-red-induction_P Parameter: Timepoint (hr) Value: 4
  misc_feature: MA Experiment 20001248 PARAMETER Experiment Name: At_Far-red-induction_P Parameter: Tissue Value: Whole Plant
  misc_feature: MA Experiment ID: 20001450 Result: Up-regulated in Transcription
  misc_feature: MA Experiment 20001450 PARAMETER Experiment Name: At_Far-red-induction_P Parameter: Age (day) Value: 7
  misc_feature: MA Experiment 20001450 PARAMETER Experiment Name: At_Far-red-induction_P Parameter: Light Value: Far-red vs. White
  misc_feature: MA Experiment 20001450 PARAMETER Experiment Name: At_Far-red-induction_P Parameter: Organism Value: A. thaliana
  misc_feature: MA Experiment 20001450 PARAMETER Experiment Name: At_Far-red-induction_P Parameter: Plant Line Value: Columbia
  misc_feature: MA Experiment 20001450 PARAMETER Experiment Name: At_Far-red-induction_P Parameter: Timepoint (hr) Value: 8
  misc_feature: MA Experiment 20001450 PARAMETER Experiment Name: At_Far-red-induction_P Parameter: Tissue Value: Whole Plant
  misc_feature: MA Experiment ID: 20001451 Result: Up-regulated in Transcription
  misc_feature: MA Experiment 20001451 PARAMETER Experiment Name: At_Far-red-induction_P Parameter: Age (day) Value: 7
  misc_feature: MA Experiment 20001451 PARAMETER Experiment Name: At_Far-red-induction_P Parameter: Light Value: Far-red vs. White
  misc_feature: MA Experiment 20001451 PARAMETER Experiment Name: At_Far-red-induction_P Parameter: Organism Value: A. thaliana
  misc_feature: MA Experiment 20001451 PARAMETER Experiment Name: At_Far-red-induction_P Parameter: Plant Line Value: Columbia
  misc_feature: MA Experiment 20001451 PARAMETER Experiment Name: At_Far-red-induction_P Parameter: Timepoint (hr) Value: 24
  misc_feature: MA Experiment 20001451 PARAMETER Experiment Name: At_Far-red-induction_P Parameter: Tissue Value: Whole Plant
  misc_feature: MA Experiment ID: 20001555 Result: Down-regulated in Transcription
  misc_feature: MA Experiment 20001555 PARAMETER Experiment Name: At_Drought_Soil_Dry_P Parameter: Age (day) Value: 24
  misc_feature: MA Experiment 20001555 PARAMETER Experiment Name: At_Drought_Soil_Dry_P Parameter: Organism Value: A. thaliana
  misc_feature: MA Experiment 20001555 PARAMETER Experiment Name: At_Drought_Soil_Dry_P Parameter: Plant Line Value: WS
  misc_feature: MA Experiment 20001555 PARAMETER Experiment Name: At_Drought_Soil_Dry_P Parameter: Post Timepoint (hr) Value: None
  misc_feature: MA Experiment 20001555 PARAMETER Experiment Name: At_Drought_Soil_Dry_P Parameter: Post-Treatment Value: None
  misc_feature: MA Experiment 20001555 PARAMETER Experiment Name: At_Drought_Soil_Dry_P Parameter: Timepoint (day) Value: 10
  misc_feature: MA Experiment 20001555 PARAMETER Experiment Name: At_Drought_Soil_Dry_P Parameter: Treatment Value: Drought vs. No Drought
  misc_feature: MA Experiment ID: 20001757 Result: Up-regulated in Transcription
  misc_feature: MA Experiment 20001757 PARAMETER Experiment Name: At_50mM_NH4NO3_L-to-H_P Parameter: Timepoint (hr) Value: 6
  misc_feature: MA Experiment 20001757 PARAMETER Experiment Name: At_50mM_NH4NO3_L-to-H_P Parameter: Tissue Value: Leaf
  misc_feature: MA Experiment 20001757 PARAMETER Experiment Name: At_50mM_NH4NO3_L-to-H_P Parameter: Treatment Value: 50mM NH4NO3 vs 100mM Mannitol
  misc_feature: MA Experiment ID: 20001904 Result: Down-regulated in Transcription
  misc_feature: MA Experiment 20001904 PARAMETER Experiment Name: At_Drought_Reproduction_P Parameter: Age (day) Value: 37
  misc_feature: MA Experiment 20001904 PARAMETER Experiment Name: At_Drought_Reproduction_P Parameter: Organism Value: A. thaliana
  misc_feature: MA Experiment 20001904 PARAMETER Experiment Name: At_Drought_Reproduction_P Parameter: Plant Line Value: WS
  misc_feature: MA Experiment 20001904 PARAMETER Experiment Name: At_Drought_Reproduction_P Parameter: Timepoint (day) Value: 7
  misc_feature: MA Experiment 20001904 PARAMETER Experiment Name: At_Drought_Reproduction_P Parameter: Tissue Value: Rosettes
  misc_feature: MA Experiment 20001904 PARAMETER Experiment Name: At_Drought_Reproduction_P Parameter: Treatment Value: Drought vs. No Drought
  misc_feature: MA Experiment ID: 20001905 Result: Down-regulated in Transcription
  misc_feature: MA Experiment 20001905 PARAMETER Experiment Name: At_Drought_Reproduction_P Parameter: Age (day) Value: 40
  misc_feature: MA Experiment 20001905 PARAMETER Experiment Name: At_Drought_Reproduction_P Parameter: Organism Value: A. thaliana
  misc_feature: MA Experiment 20001905 PARAMETER Experiment Name: At_Drought_Reproduction_P Parameter: Plant Line Value: WS
  misc_feature: MA Experiment 20001905 PARAMETER Experiment Name: At_Drought_Reproduction_P Parameter: Timepoint (day) Value: 10
  misc_feature: MA Experiment 20001905 PARAMETER Experiment Name: At_Drought_Reproduction_P Parameter: Tissue Value: Rosettes
  misc_feature: MA Experiment 20001905 PARAMETER Experiment Name: At_Drought_Reproduction_P Parameter: Treatment Value: Drought vs. No Drought
  misc_feature: MA Experiment ID: 20001906 Result: Down-regulated in Transcription
  misc_feature: MA Experiment 20001906 PARAMETER Experiment Name: At_Drought_Reproduction_P Parameter: Age (day) Value: 35
  misc_feature: MA Experiment 20001906 PARAMETER Experiment Name: At_Drought_Reproduction_P Parameter: Organism Value: A. thaliana
  misc_feature: MA Experiment 20001906 PARAMETER Experiment Name: At_Drought_Reproduction_P Parameter: Plant Line Value: WS
  misc_feature: MA Experiment 20001906 PARAMETER Experiment Name: At_Drought_Reproduction_P Parameter: Timepoint (day) Value: 5
  misc_feature: MA Experiment 20001906 PARAMETER Experiment Name: At_Drought_Reproduction_P Parameter: Tissue Value: Siliques
  misc_feature: MA Experiment 20001906 PARAMETER Experiment Name: At_Drought_Reproduction_P Parameter: Treatment Value: Drought vs. No Drought
  misc_feature: MA Experiment ID: 20001908 Result: Down-regulated in Transcription
  misc_feature: MA Experiment 20001908 PARAMETER Experiment Name: At_Drought_Reproduction_P Parameter: Age (day) Value: 40
  misc_feature: MA Experiment 20001908 PARAMETER Experiment Name: At_Drought_Reproduction_P Parameter: Organism Value: A. thaliana
  misc_feature: MA Experiment 20001908 PARAMETER Experiment Name: At_Drought_Reproduction_P Parameter: Plant Line Value: WS
  misc_feature: MA Experiment 20001908 PARAMETER Experiment Name: At_Drought_Reproduction_P Parameter: Timepoint (day) Value: 10
  misc_feature: MA Experiment 20001908 PARAMETER Experiment Name: At_Drought_Reproduction_P Parameter: Tissue Value: Siliques
  misc_feature: MA Experiment 20001908 PARAMETER Experiment Name: At_Drought_Reproduction_P Parameter: Treatment Value: Drought vs. No Drought
  misc_feature: MA Experiment ID: 20001911 Result: Down-regulated in Transcription
  misc_feature: MA Experiment 20001911 PARAMETER Experiment Name: At_Drought_Reproduction_P Parameter: Age (day) Value: 40
  misc_feature: MA Experiment 20001911 PARAMETER Experiment Name: At_Drought_Reproduction_P Parameter: Organism Value: A. thaliana
  misc_feature: MA Experiment 20001911 PARAMETER Experiment Name: At_Drought_Reproduction_P Parameter: Plant Line Value: WS
  misc_feature: MA Experiment 20001911 PARAMETER Experiment Name: At_Drought_Reproduction_P Parameter: Timepoint (day) Value: 10
  misc_feature: MA Experiment 20001911 PARAMETER Experiment Name: At_Drought_Reproduction_P Parameter: Tissue Value: Flowers
  misc_feature: MA Experiment 20001911 PARAMETER Experiment Name: At_Drought_Reproduction_P Parameter: Treatment Value: Drought vs. No Drought
atcaacaagtctttctctctctctagacaaccacaagaacacaaaacacacaaaaacaaagaggttctttctttgaagaagaaatggaaaaagttgatgtttatgatgagcttgttaacctaaaggcaacagagctgagattgggattaccagggacagaagaaactgtttcttgtggaaaaagcaacaaaagagttttacctgaagctactgagaaagagattgaatccactggaaaaactgaaaccgcttctcctccaaaggctcagattgttggatggccaccagttagatcttacagaaagaacaatgttcagacaaagaagagtgaatctgaaggtcaaggaaactatgtgaaagtaagtatggatggtgctccatatctaaggaagatagatctaacgatgtataaacaatatccagagttgatgaaatcacttgaaaacatgtttaaattctctgtgggagaatattttgagagagaaggatataaaggctcagactttgtacctacttatgaagacaaagatggtgattggatgcttgttggtgatgttccttgggagatgtttgtttcgtcttgtaagaggctaaggatcatgaaaggatctgaagttaaaggtttaggttgtggtggtctttaacaaacctaattgagagataaagatcaaagagaaagattcaaaaacagagttttttgttctgtttcttgaaacagagtaaatatagctctgaaactgctcgggttcttggggagagatgtttcatacaatcatactttgtgaatgtttacctcatcggtaaaaagagagatgcttaaaatggtcttaagcataaaagtgtgagaaagatctaaatctaaactttagctgtaactctgtctccattaaagagaaaggttttgtggtattagaaaggtctaatccg

SEQ ID NO: 37447 - protein, 186 aa, Arabidopsis thaliana; identical to SEQ ID NO: 28591
  peptide (1)..(186): Ceres Seq. ID no. 12371966
  misc_feature (11)..(185): Pfam Name: AUX/IAA family Pfam Description: AUX/IAA family
  misc_feature (11)..(184): Homolog of NCBI NO: 4887014 NR Description: Nt-iaa2.5 deduced protein [Nicotiana tabacum]
  misc_feature (1)..(181): Homolog of NCBI NO: 4887016 NR Description: Nt-iaa4.3 deduced protein [Nicotiana tabacum]
  misc_feature (1)..(181): Homolog of NCBI NO: 4887018 NR Description: Nt-iaa4.5 deduced protein [Nicotiana tabacum]
  misc_feature (1)..(183): Homolog of NCBI NO: 416641 NR Description: Auxin-induced protein 22B (Indole-3-acetic acid
  misc_feature (1)..(184): Homolog of NCBI NO: 4887012 NR Description: Nt-iaa2.3 deduced protein [Nicotiana tabacum]
  misc_feature (7)..(183): Homolog of NCBI NO: 11131103 NR Description: Auxin-induced protein 22D (Indole-3-acetic acid
  misc_feature (7)..(184): Homolog of NCBI NO: 34550779 NR Description: Gbiaa-Re [Gossypium barbadense]
  misc_feature (8)..(184): Homolog of NCBI NO: 15219692 NR Description: putative auxin-induced protein AUX2-11
  misc_feature (1)..(186): Homolog of NCBI NO: 99663 NR Description: auxin-induced protein AUX2-11 - Arabidopsis
  misc_feature (1)..(186): Homolog of NCBI NO: 15239950 NR Description: auxin-induced protein AUX2-11 (sp P33077)

SEQ ID NO: 37448 - DNA, 2348 bp, Arabidopsis thaliana
  misc_feature (1)..(2348): Ceres Seq. ID no. 12674418
  misc_feature: MA Experiment ID: 20001557 Result: Up-regulated in Transcription
  misc_feature: MA Experiment 20001557 PARAMETER Experiment Name: At_Drought_Soil_Dry_P Parameter: Age (day) Value: 27
  misc_feature: MA Experiment 20001557 PARAMETER Experiment Name: At_Drought_Soil_Dry_P Parameter: Organism Value: A. thaliana
  misc_feature: MA Experiment 20001557 PARAMETER Experiment Name: At_Drought_Soil_Dry_P Parameter: Plant Line Value: WS
  misc_feature: MA Experiment 20001557 PARAMETER Experiment Name: At_Drought_Soil_Dry_P Parameter: Post Timepoint (hr) Value: 3
  misc_feature: MA Experiment 20001557 PARAMETER Experiment Name: At_Drought_Soil_Dry_P Parameter: Post-Treatment Value: Re-Water vs. No Drought
  misc_feature: MA Experiment 20001557 PARAMETER Experiment Name: At_Drought_Soil_Dry_P Parameter: Timepoint (day) Value: 13
  misc_feature: MA Experiment 20001557 PARAMETER Experiment Name: At_Drought_Soil_Dry_P Parameter: Treatment Value: Drought vs. No Drought
atatttttggcttaaggtcattttgaagattaataacatgtctattttatcgcgttgtgtccgatccagaaggttctctatttttcgtggataagaagataaagttattgtttattgataagttttctgctgggaagttgcaactttttctagatttaggacgttacaaatttcaatcatgagtgcatcatgggcagatgtggctgattcagagaaggccgtttctcagtcaaagcctccttatgttcccccacacctacggaacaggccatcagagcctgttgctgctcctttgccacaaaatgatcatgcagggtatggtggtcaaccagctgggtctcgttgggctcctcctagcagtgggggtggtggtgccagcggcggtggctataggaatgatggagggcgcactggctatggttatggtgctggaggaggaggtggtggtggtggtggctggaacaacagaagtggagggtgggaccgtagggaacgtgaagtaaacccatttggagatgatgctgagttagaaccggtctttacagagcaggagaatactggcattaattttgatgcctatgaagatattccagttgagaccagtgggggagacgtgccccctcctgttaacacatttgctgacatagatcttggggatgcattaaatctgaacatccggaggtgcaagtatgtgaggccaacaccggtacagcgtcatgctattccaatactgcttgcagagagagatttgatggcctgtgcccagactgggtctgggaagactgctgctttttgctttccaataattagtggaatcatgaaagatcagcatgtagaaagaccccgtggttcacgggcggtttacccttttgcagtcatcctctcaccaacaagggaattggcatgccagatacatgatgaagccaaaaaattctcctaccaaactggtgtgaaggttgttgttgcttatggaggaacacccattcaccagcagctcagggaactcgagaggggatgtgatatccttgtggcaactcctggccggttaaatgatttgcttgaaagagctagagtctcaatgcagatgattaggtttttagctctagatgaggcagacaggatgctggacatgggttttgagccacagattagaaagattgttgagcagatggacatgcctccacgtggggtgagacagacaatgctgttcagtgctacatttccaagtcagattcagagacttgcagctgatttcatgtcaaactatatatttttggctgtgggaagagttggttcaagcactgatttaattacccaaagggttgagtttgtccaagagtctgacaagagaagccatctcatggacctgcttcacgcgcaaagagagacccaagacaagcaatcattgacattagtttttgtggagacaaagaggggagctgatactttggaaaattggctgtgcatgaatgagtttccagcaacctccattcatggcgatagaacacaacaggaaagagaagtggcactgaggtccttcaaaactgggaggacacctattttggttgcaacagacgtggcagcacgtggtcttgacattccccacgtggctcatgttgtaaacttcgatctaccaaatgacattgatgactatgtccaccgtatcggacgaacaggacgtgcaggcaaatctggaatagcaactgccttcttcaacgagaacaatgcacaactggctaggtcgcttgctgagctaatgcaagaagccaatcaagaggtccccgagtggctcacacgatatgcttcacgtgcttcatttggtggtggtaagaaacggtctggtggtcggtttggtggccgtgacttcagaagggaaggctcttacagtagaggaggaggcggcggcggcggaggaggcggcagtgattactatggcggaggaggctatggtggtggtggatacggtggtgctccaagcggtgggtatggtgctggagtgaccagtgcttgggattagccaattaggctccccaatttttcctctttttaacctgactatttatttcttctcttctacattcccaagagagcacgtgtatttgcccccacctttgagatctctcattcaagagatggatttaactaatcttgctattaggtggatctctctgttttttcaggctatttttaggatttgtcctaaaagatagacagtagtttttccgattttgatcttgttcttggtttcttctaacaatttcatttgttagtttgaaatccaatttgtctttttgtttccctttgttgttgacaatctttcttggtgaaatacaatctctctttatatc

SEQ ID NO: 37449 - protein, 612 aa, Arabidopsis thaliana
  peptide (1)..(612): Ceres Seq. ID no. 12674419
  misc_feature (164)..(381): Pfam Name: DEAD/DEAH box helicase Pfam Description: DEAD/DEAH box helicase
  misc_feature (40)..(100): Homolog of NCBI NO: 19528473 NR Description: RE28061p [Drosophila melanogaster]
  misc_feature (40)..(100): Homolog of NCBI NO: 17985987 NR Description: belle CG9748-PA
  misc_feature (22)..(104): Homolog of NCBI NO: 19528473 NR Description: RE28061p [Drosophila melanogaster]
  misc_feature (50)..(606): Homolog of NCBI NO: 19528473 NR Description: RE28061p [Drosophila melanogaster]
  misc_feature (22)..(104): Homolog of NCBI NO: 17985987 NR Description: belle CG9748-PA
  misc_feature (50)..(606): Homolog of NCBI NO: 17985987 NR Description: belle CG9748-PA
  misc_feature (192)..(612): Homolog of NCBI NO: 17064740 NR Description: ATP-dependent RNA helicase-like protein
  misc_feature (2)..(604): Homolog of NCBI NO: 15231074 NR Description: DEAD/DEAH box RNA helicase protein, putative
  misc_feature (1)..(612): Homolog of NCBI NO: 28393424 NR Description: putative DEAD/DEAH box RNA helicase [Arabidopsis
  misc_feature (1)..(612): Homolog of NCBI NO: 15227951 NR Description: DEAD/DEAH box RNA helicase, putative; protein id:
MSASWADVADSEKAVSQSKPPYVPPHLRNRPSEPVAAPLPQNDHAGYGGQPAGSRWAPPSSGGGGASGGGYRNDGGRTGYGYGAGGGGGGGGGWNNRSGGWDRREREVNPFGDDAELEPVFTEQENTGINFDAYEDIPVETSGGDVPPPVNTFADIDLGDALNLNIRRCKYVRPTPVQRHAIPILLAERDLMACAQTGSGKTAAFCFPIISGIMKDQHVERPRGSRAVYPFAVILSPTRELACQIHDEAKKFSYQTGVKVVVAYGGTPIHQQLRELERGCDILVATPGRLNDLLERARVSMQMIRFLALDEADRMLDMGFEPQIRKIVEQMDMPPRGVRQTMLFSATFPSQIQRLAADFMSNYIFLAVGRVGSSTDLITQRVEFVQESDKRSHLMDLLHAQRETQDKQSLTLVFVETKRGADTLENWLCMNEFPATSIHGDRTQQEREVALRSFKTGRTPILVATDVAARGLDIPHVAHVVNFDLPNDIDDYVHRIGRTGRAGKSGIATAFFNENNAQLARSLAELMQEANQEVPEWLTRYASRASFGGGKKRSGGRFGGRDFRREGSYSRGGGGGGGGGGSDYYGGGGYGGGGYGGAPSGGYGAGVTSAWD

SEQ ID NO: 37450 - protein, 421 aa, Arabidopsis thaliana
  peptide (1)..(421): Ceres Seq. ID no. 12674420
  misc_feature (1)..(190): Pfam Name: DEAD/DEAH box helicase Pfam Description: DEAD/DEAH box helicase
  misc_feature (1)..(418): Homolog of NCBI NO: 3023628 NR Description: DEAD-box protein 3 (Helicase-like protein 2)
  misc_feature (1)..(418): Homolog of NCBI NO: 14861844 NR Description: PL10 protein [Mus musculus]
  misc_feature (1)..(420): Homolog of NCBI NO: 18859239 NR Description: pl10; p110 [Danio rerio]
  misc_feature (1)..(415): Homolog of NCBI NO: 11267519 NR Description: probable ATP-dependent RNA helicase DED1
  misc_feature (1)..(415): Homolog of NCBI NO: 19528473 NR Description: RE28061p [Drosophila melanogaster]
  misc_feature (1)..(415): Homolog of NCBI NO: 17985987 NR Description: belle CG9748-PA
  misc_feature (1)..(421): Homolog of NCBI NO: 17064740 NR Description: ATP-dependent RNA helicase-like protein
  misc_feature (1)..(413): Homolog of NCBI NO: 15231074 NR Description: DEAD/DEAH box RNA helicase protein, putative
  misc_feature (1)..(421): Homolog of NCBI NO: 28393424 NR Description: putative DEAD/DEAH box RNA helicase [Arabidopsis
  misc_feature (1)..(421): Homolog of NCBI NO: 15227951 NR Description: DEAD/DEAH box RNA helicase, putative; protein id:
MACAQTGSGKTAAFCFPIISGIMKDQHVERPRGSRAVYPFAVILSPTRELACQIHDEAKKFSYQTGVKVVVAYGGTPIHQQLRELERGCDILVATPGRLNDLLERARVSMQMIRFLALDEADRMLDMGFEPQIRKIVEQMDMPPRGVRQTMLFSATFPSQIQRLAADFMSNYIFLAVGRVGSSTDLITQRVEFVQESDKRSHLMDLLHAQRETQDKQSLTLVFVETKRGADTLENWLCMNEFPATSIHGDRTQQEREVALRSFKTGRTPILVATDVAARGLDIPHVAHVVNFDLPNDIDDYVHRIGRTGRAGKSGIATAFFNENNAQLARSLAELMQEANQEVPEWLTRYASRASFGGGKKRSGGRFGGRDFRREGSYSRGGGGGGGGGGSDYYGGGGYGGGGYGGAPSGGYGAGVTSAWD

SEQ ID NO: 37451 - protein, 399 aa, Arabidopsis thaliana
  peptide (1)..(399): Ceres Seq. ID no. 12674421
  misc_feature (1)..(168): Pfam Name: DEAD/DEAH box helicase Pfam Description: DEAD/DEAH box helicase
  misc_feature (1)..(396): Homolog of NCBI NO: 3023628 NR Description: DEAD-box protein 3 (Helicase-like protein 2)
  misc_feature (1)..(396): Homolog of NCBI NO: 14861844 NR Description: PL10 protein [Mus musculus]
  misc_feature (1)..(398): Homolog of NCBI NO: 18859239 NR Description: pl10; p110 [Danio rerio]
  misc_feature (1)..(393): Homolog of NCBI NO: 11267519 NR Description: probable ATP-dependent RNA helicase DED1
  misc_feature (1)..(393): Homolog of NCBI NO: 19528473 NR Description: RE28061p [Drosophila melanogaster]
  misc_feature (1)..(393): Homolog of NCBI NO: 17985987 NR Description: belle CG9748-PA
  misc_feature (1)..(399): Homolog of NCBI NO: 17064740 NR Description: ATP-dependent RNA helicase-like protein
  misc_feature (1)..(391): Homolog of NCBI NO: 15231074 NR Description: DEAD/DEAH box RNA helicase protein, putative
  misc_feature (1)..(399): Homolog of NCBI NO: 28393424 NR Description: putative DEAD/DEAH box RNA helicase [Arabidopsis
  misc_feature (1)..(399): Homolog of NCBI NO: 15227951 NR Description: DEAD/DEAH box RNA helicase, putative; protein id:
MKDQHVERPRGSRAVYPFAVILSPTRELACQIHDEAKKFSYQTGVKVVVAYGGTPIHQQLRELERGCDILVATPGRLNDLLERARVSMQMIRFLALDEADRMLDMGFEPQIRKIVEQMDMPPRGVRQTMLFSATFPSQIQRLAADFMSNYIFLAVGRVGSSTDLITQRVEFVQESDKRSHLMDLLHAQRETQDKQSLTLVFVETKRGADTLENWLCMNEFPATSIHGDRTQQEREVALRSFKTGRTPILVATDVAARGLDIPHVAHVVNFDLPNDIDDYVHRIGRTGRAGKSGIATAFFNENNAQLARSLAELMQEANQEVPEWLTRYASRASFGGGKKRSGGRFGGRDFRREGSYSRGGGGGGGGGGSDYYGGGGYGGGGYGGAPSGGYGAGVTSAWD

SEQ ID NO: 37452 - DNA, 1784 bp, Arabidopsis thaliana
  misc_feature (1)..(1784): Ceres Seq. ID no. 13611515
  misc_feature: MA Experiment ID: 108435 Result: Down-regulated in Transcription
  misc_feature: MA Experiment 108435 PARAMETER Experiment Name: At_stm_Mutants_cDNA_P Parameter: Plant Line Value: wt Landsburg vs stm
  misc_feature: MA Experiment 108435 PARAMETER Experiment Name: At_stm_Mutants_cDNA_P Parameter: Tissue Value: Shoot Apical Meristem Region
  misc_feature: MA Experiment ID: 108461 Result: Up-regulated in Transcription
  misc_feature: MA Experiment 108461 PARAMETER Experiment Name: At_Germinating_Seeds_cDNA_P Parameter: Age (day) Value: 1 vs. 0
  misc_feature: MA Experiment 108461 PARAMETER Experiment Name: At_Germinating_Seeds_cDNA_P Parameter: Tissue Value: Germinating Seeds
  misc_feature: MA Experiment ID: 108462 Result: Up-regulated in Transcription
  misc_feature: MA Experiment 108462 PARAMETER Experiment Name: At_Germinating_Seeds_cDNA_P Parameter: Age (day) Value: 2 vs. 0
  misc_feature: MA Experiment 108462 PARAMETER Experiment Name: At_Germinating_Seeds_cDNA_P Parameter: Tissue Value: Germinating Seeds
  misc_feature: MA Experiment ID: 108463 Result: Up-regulated in Transcription
  misc_feature: MA Experiment 108463 PARAMETER Experiment Name: At_Germinating_Seeds_cDNA_P Parameter: Age (day) Value: 3 vs. 0
  misc_feature: MA Experiment 108463 PARAMETER Experiment Name: At_Germinating_Seeds_cDNA_P Parameter: Tissue Value: Germinating Seeds
  misc_feature: MA Experiment ID: 108464 Result: Up-regulated in Transcription
  misc_feature: MA Experiment 108464 PARAMETER Experiment Name: At_Germinating_Seeds_cDNA_P Parameter: Age (day) Value: 4 vs. 0
  misc_feature: MA Experiment 108464 PARAMETER Experiment Name: At_Germinating_Seeds_cDNA_P Parameter: Tissue Value: Germinating Seeds
  misc_feature: MA Experiment ID: 108488 Result: Up-regulated in Transcription
  misc_feature: MA Experiment ID: 108595 Result: Down-regulated in Transcription
  misc_feature: MA Experiment 108595 PARAMETER Experiment Name: At_Ler-pi_Ovule_cDNA_P Parameter: Plant Line Value: null
  misc_feature: MA Experiment ID: 20000069 Result: Down-regulated in Transcription
  misc_feature: MA Experiment 20000069 PARAMETER Experiment Name: At_100uM_ABA_Mutants_cDNA_P Parameter: Plant Line Value: CS23
  misc_feature: MA Experiment 20000069 PARAMETER Experiment Name: At_100uM_ABA_Mutants_cDNA_P Parameter: Timepoint (hr) Value: 6
  misc_feature: MA Experiment 20000069 PARAMETER Experiment Name: At_100uM_ABA_Mutants_cDNA_P Parameter: Tissue Value: Aerial
  misc_feature: MA Experiment 20000069 PARAMETER Experiment Name: At_100uM_ABA_Mutants_cDNA_P Parameter: Treatment Value: 100uM ABA vs. No Treatment
  misc_feature: MA Experiment ID: 20000086 Result: Down-regulated in Transcription
  misc_feature: MA Experiment 20000086 PARAMETER Experiment Name: At_100uM_ABA_Mutants_cDNA_P Parameter: Plant Line Value: CS22
  misc_feature: MA Experiment 20000086 PARAMETER Experiment Name: At_100uM_ABA_Mutants_cDNA_P Parameter: Timepoint (hr) Value: 6
  misc_feature: MA Experiment 20000086 PARAMETER Experiment Name: At_100uM_ABA_Mutants_cDNA_P Parameter: Tissue Value: Aerial
  misc_feature: MA Experiment 20000086 PARAMETER Experiment Name: At_100uM_ABA_Mutants_cDNA_P Parameter: Treatment Value: 100uM ABA vs. No Treatment
  misc_feature: MA Experiment ID: 20000087 Result: Down-regulated in Transcription
  misc_feature: MA Experiment 20000087 PARAMETER Experiment Name: At_100uM_ABA_Mutants_cDNA_P Parameter: Plant Line Value: WS
  misc_feature: MA Experiment 20000087 PARAMETER Experiment Name: At_100uM_ABA_Mutants_cDNA_P Parameter: Timepoint (hr) Value: 6
  misc_feature: MA Experiment 20000087 PARAMETER Experiment Name: At_100uM_ABA_Mutants_cDNA_P Parameter: Tissue Value: Aerial
  misc_feature: MA Experiment 20000087 PARAMETER Experiment Name: At_100uM_ABA_Mutants_cDNA_P Parameter: Treatment Value: 100uM ABA vs. No Treatment
  misc_feature: MA Experiment ID: 20000089 Result: Down-regulated in Transcription
  misc_feature: MA Experiment ID: 20000090 Result: Down-regulated in Transcription
  misc_feature: MA Experiment ID: 20000185 Result: Down-regulated in Transcription
  misc_feature: MA Experiment 20000185 PARAMETER Experiment Name: At_Roots__P Parameter: Age (day) Value: 7 vs. 21
  misc_feature: MA Experiment 20000185 PARAMETER Experiment Name: At_Roots__P Parameter: Organism Value: A. thaliana
  misc_feature: MA Experiment 20000185 PARAMETER Experiment Name: At_Roots__P Parameter: Tissue Value: Roots vs. Whole Plant
  misc_feature: MA Experiment ID: 20000438 Result: Up-regulated in Transcription
  misc_feature: MA Experiment 20000438 PARAMETER Experiment Name: At_Shoots__P Parameter: Age (day) Value: 14
  misc_feature: MA Experiment 20000438 PARAMETER Experiment Name: At_Shoots__P Parameter: Tissue Value: Shoots vs. Whole Plant
  misc_feature: MA Experiment ID: 20000439 Result: Down-regulated in Transcription
  misc_feature: MA Experiment 20000439 PARAMETER Experiment Name: At_Roots__P Parameter: Age (day) Value: 14 vs. 21
  misc_feature: MA Experiment 20000439 PARAMETER Experiment Name: At_Roots__P Parameter: Organism Value: A. thaliana
  misc_feature: MA Experiment 20000439 PARAMETER Experiment Name: At_Roots__P Parameter: Tissue Value: Roots vs. Whole Plant
  misc_feature: MA Experiment ID: 20000794 Result: Down-regulated in Transcription
  misc_feature: MA Experiment 20000794 PARAMETER Experiment Name: At_Petals_P Parameter: Age (day) Value: 23-25 days
  misc_feature: MA Experiment 20000794 PARAMETER Experiment Name: At_Petals_P Parameter: Plant Line Value: WS
  misc_feature: MA Experiment 20000794 PARAMETER Experiment Name: At_Petals_P Parameter: Tissue Value: Petals vs. Whole plant
  misc_feature: MA Experiment ID: 20001557 Result: Down-regulated in Transcription
  misc_feature: MA Experiment 20001557 PARAMETER Experiment Name: At_Drought_Soil_Dry_P Parameter: Age (day) Value: 27
  misc_feature: MA Experiment 20001557 PARAMETER Experiment Name: At_Drought_Soil_Dry_P Parameter: Organism Value: A. thaliana
  misc_feature: MA Experiment 20001557 PARAMETER Experiment Name: At_Drought_Soil_Dry_P Parameter: Plant Line Value: WS
  misc_feature: MA Experiment 20001557 PARAMETER Experiment Name: At_Drought_Soil_Dry_P Parameter: Post Timepoint (hr) Value: 3
  misc_feature: MA Experiment 20001557 PARAMETER Experiment Name: At_Drought_Soil_Dry_P Parameter: Post-Treatment Value: Re-Water vs. No Drought
  misc_feature: MA Experiment 20001557 PARAMETER Experiment Name: At_Drought_Soil_Dry_P Parameter: Timepoint (day) Value: 13
  misc_feature: MA Experiment 20001557 PARAMETER Experiment Name: At_Drought_Soil_Dry_P Parameter: Treatment Value: Drought vs. No Drought
  misc_feature: MA Experiment ID: 20001757 Result: Up-regulated in Transcription
  misc_feature: MA Experiment 20001757 PARAMETER Experiment Name: At_50mM_NH4NO3_L-to-H_P Parameter: Timepoint (hr) Value: 6
  misc_feature: MA Experiment 20001757 PARAMETER Experiment Name: At_50mM_NH4NO3_L-to-H_P Parameter: Tissue Value: Leaf
  misc_feature: MA Experiment 20001757 PARAMETER Experiment Name: At_50mM_NH4NO3_L-to-H_P Parameter: Treatment Value: 50mM NH4NO3 vs 100mM Mannitol
  misc_feature: MA Experiment ID: 20001904 Result: Down-regulated in Transcription
  misc_feature: MA Experiment 20001904 PARAMETER Experiment Name: At_Drought_Reproduction_P Parameter: Age (day) Value: 37
  misc_feature: MA Experiment 20001904 PARAMETER Experiment Name: At_Drought_Reproduction_P Parameter: Organism Value: A. thaliana
  misc_feature: MA Experiment 20001904 PARAMETER Experiment Name: At_Drought_Reproduction_P Parameter: Plant Line Value: WS
  misc_feature: MA Experiment 20001904 PARAMETER Experiment Name: At_Drought_Reproduction_P Parameter: Timepoint (day) Value: 7
  misc_feature: MA Experiment 20001904 PARAMETER Experiment Name: At_Drought_Reproduction_P Parameter: Tissue Value: Rosettes
  misc_feature: MA Experiment 20001904 PARAMETER Experiment Name: At_Drought_Reproduction_P Parameter: Treatment Value: Drought vs. No Drought
  misc_feature: MA Experiment ID: 20001905 Result: Down-regulated in Transcription
  misc_feature: MA Experiment 20001905 PARAMETER Experiment Name: At_Drought_Reproduction_P Parameter: Age (day) Value: 40
  misc_feature: MA Experiment 20001905 PARAMETER Experiment Name: At_Drought_Reproduction_P Parameter: Organism Value: A. thaliana
  misc_feature: MA Experiment 20001905 PARAMETER Experiment Name: At_Drought_Reproduction_P Parameter: Plant Line Value: WS
  misc_feature: MA Experiment 20001905 PARAMETER Experiment Name: At_Drought_Reproduction_P Parameter: Timepoint (day) Value: 10
  misc_feature: MA Experiment 20001905 PARAMETER Experiment Name: At_Drought_Reproduction_P Parameter: Tissue Value: Rosettes
  misc_feature: MA Experiment 20001905 PARAMETER Experiment Name: At_Drought_Reproduction_P Parameter: Treatment Value: Drought vs. No Drought
acttcttcttcatcatctttaatcgttgggaaaagtttgatgatacggagtggacaattcttggtgtagaaggagaatctgagagagagagagtcatggaagctctgaaaaccgcaacttttagccctatgtcggtgttatccgagaaaagatcagaaccacgaaagcctttctcgctccctaacctctttccaccaaaatcacagagaccaatctcccaagaaagcttcttgaagagattcaatggtggattggctcttctaacttctgttctaagcagtgcaacagctcctgctaaatccctgacgtacgaggaagctctgcaacaatctatgaccacttcttcatcttttgattcggatggtctgattgaagggatatccaattttgtcacagacaatcctttggttattgccggtggagttgctgcattggctgttccatttgttctgtctcaggttctgaacaagaagcccaaatcatggggagttgagtctgctaagaatgcttataccaagttgggtactgatgataatgctcagttgcttgacataagagctactgctgatttcagacaagtgggcagtcctaatattaagggtttgggtaaaaaagcggtttctactgtttataacggtgaagacaagcctggtttcctgaagaagctttctttgaagtttaaagatcctgagaacaccacattatacattctggacaagtttgatggaaactctgagcttgttgctgaattggtggctcttaatggattcaaatctgcttatgcgattaaagatggtgcagagggacctagaggctggttgaatagcagcttgccttggatagagccaaagaagactctcagccttgatttaagcagtttgacggatagcatcagcggtgtatttggtgagagttctgatggtgtatctgtcgctcttggagtagctgctgctgctggattaagtgtttttgcatttacagagattgaaaccatactccaactactaggttcagctgcacttgttcaacttgcaggcaagaaacttctatttgctgaggaccgaaagcaaactctaaaacaggtggatgagttcttgaacacaaaggttgcccctaaagaacttgttgatgagttaaaggaaataggaaaggctcttcttcctcaatcaacaagcaacaaagctctcccagcaccagcaacagtaacagcagaagcagaatcagctacagctacaaccaccacagtcgataaaccagtacctgagccagaaacagttgcagctacaacaaccactgtagataaaccagtacctgagccagagccagtgccagagccagtgccagtgccagcgattgaagctgcagtcgctgcacaagtaatcacagaaccaaccgaaacagaagccaaaccaaaacctcattcaagacctctctctccatatgcatcgtaccctgacttgaagcctccatcttctccgatgccatcgcagccctgaaaacagctaagaacagtctctctctcgttacttagtctggttttgtcctcctgcaaacagaagaacaaaagtggtcgaatattgtaacttgttcttttttctctcgttttttctcccgaacttagatgctactttgtgtcgaatctgagataagtggactttgttttgtttttctccctttataccaccattgagttcaaacaagagtctgtcatcgcgttaaaggggatcagaagctgtgtgaggggtgtattggacgaaataaaagttgtggggaaatttccaaat

SEQ ID NO: 37453 - protein, 497 aa, Arabidopsis thaliana; identical to SEQ ID NO: 34924
  peptide (1)..(497): Ceres Seq. ID no. 13611516
  misc_feature (41)..(252): Homolog of NCBI NO: 9279727 NR Description: gb|AAB61039.1~gene_id:MWL2.9~similar to unknown
  misc_feature (41)..(273): Homolog of NCBI NO: 18404538 NR Description: rhodanese-like domain protein [Arabidopsis
  misc_feature (120)..(272): Homolog of NCBI NO: 34907512 NR Description: B1099D03.26 [Oryza sativa (japonica
  misc_feature (41)..(273): Homolog of NCBI NO: 21593550 NR Description: unknown [Arabidopsis thaliana]
  misc_feature (335)..(482): Homolog of NCBI NO: 7485232 NR Description: hypothetical protein A_IG002N01.31 - Arabidopsis
  misc_feature (255)..(497): Homolog of NCBI NO: 25407077 NR Description: hypothetical protein AT4g01050 [imported] -
  misc_feature (1)..(441): Homolog of NCBI NO: 25407077 NR Description: hypothetical protein AT4g01050 [imported] -
  misc_feature (1)..(439): Homolog of NCBI NO: 7485232 NR Description: hypothetical protein A_IG002N01.31 - Arabidopsis
  misc_feature (32)..(497): Homolog of NCBI NO: 18411523 NR Description: proline-rich protein family [Arabidopsis

SEQ ID NO: 37454 - protein, 466 aa, Arabidopsis thaliana; identical to SEQ ID NO: 34925
  peptide (1)..(466): Ceres Seq. ID no. 13611517
  misc_feature (10)..(221): Homolog of NCBI NO: 9279727 NR Description: gb|AAB61039.1~gene_id:MWL2.9~similar to unknown
  misc_feature (10)..(242): Homolog of NCBI NO: 18404538 NR Description: rhodanese-like domain protein [Arabidopsis
  misc_feature (89)..(241): Homolog of NCBI NO: 34907512 NR Description: B1099D03.26 [Oryza sativa (japonica
  misc_feature (10)..(242): Homolog of NCBI NO: 21593550 NR Description: unknown [Arabidopsis thaliana]
  misc_feature (304)..(451): Homolog of NCBI NO: 7485232 NR Description: hypothetical protein A_IG002N01.31 - Arabidopsis
  misc_feature (224)..(466): Homolog of NCBI NO: 25407077 NR Description: hypothetical protein AT4g01050 [imported] -
  misc_feature (1)..(410): Homolog of NCBI NO: 25407077 NR Description: hypothetical protein AT4g01050 [imported] -
  misc_feature (1)..(408): Homolog of NCBI NO: 7485232 NR Description: hypothetical protein A_IG002N01.31 - Arabidopsis
  misc_feature (1)..(466): Homolog of NCBI NO: 18411523 NR Description: proline-rich protein family [Arabidopsis

SEQ ID NO: 37455 - protein, 455 aa, Arabidopsis thaliana; identical to SEQ ID NO: 34926
  peptide (1)..(455): Ceres Seq. ID no. 13611518
  misc_feature (1)..(210): Homolog of NCBI NO: 9279727 NR Description: gb|AAB61039.1~gene_id:MWL2.9~similar to unknown
  misc_feature (1)..(231): Homolog of NCBI NO: 18404538 NR Description: rhodanese-like domain protein [Arabidopsis
  misc_feature (78)..(230): Homolog of NCBI NO: 34907512 NR Description: B1099D03.26 [Oryza sativa (japonica
  misc_feature (1)..(231): Homolog of NCBI NO: 21593550 NR Description: unknown [Arabidopsis thaliana]
  misc_feature (293)..(440): Homolog of NCBI NO: 7485232 NR Description: hypothetical protein A_IG002N01.31 - Arabidopsis
  misc_feature (213)..(455): Homolog of NCBI NO: 25407077 NR Description: hypothetical protein AT4g01050 [imported] -
  misc_feature (1)..(399): Homolog of NCBI NO: 25407077 NR Description: hypothetical protein AT4g01050 [imported] -
  misc_feature (1)..(397): Homolog of NCBI NO: 7485232 NR Description: hypothetical protein A_IG002N01.31 - Arabidopsis
  misc_feature (1)..(455): Homolog of NCBI NO: 18411523 NR Description: proline-rich protein family [Arabidopsis

SEQ ID NO: 37456 - DNA, 1567 bp, Arabidopsis thaliana
  misc_feature (1)..(1567): Ceres Seq. ID no. 12389081
  misc_feature: MA Experiment ID: 20000184 Result: Up-regulated in Transcription
  misc_feature: MA Experiment 20000184 PARAMETER Experiment Name: At_Shoots__P Parameter: Age (day) Value: 7
  misc_feature: MA Experiment 20000184 PARAMETER Experiment Name: At_Shoots__P Parameter: Tissue Value: Shoots vs. Whole Plant
  misc_feature: MA Experiment ID: 20000265 Result: Up-regulated in Transcription
  misc_feature: MA Experiment 20000265 PARAMETER Experiment Name: At_Open_Flower_P Parameter: Age (day) Value: 21
  misc_feature: MA Experiment 20000265 PARAMETER Experiment Name: At_Open_Flower_P Parameter: Plant Line Value: WS
  misc_feature: MA Experiment 20000265 PARAMETER Experiment Name: At_Open_Flower_P Parameter: Tissue Value: Closed Flower vs. Whole Plant
  misc_feature: MA Experiment ID: 20000286 Result: Up-regulated in Transcription
  misc_feature: MA Experiment 20000286 PARAMETER Experiment Name: At_Open_Flower_P Parameter: Age (day) Value: 21
  misc_feature: MA Experiment 20000286 PARAMETER Experiment Name: At_Open_Flower_P Parameter: Plant Line Value: WS
  misc_feature: MA Experiment 20000286 PARAMETER Experiment Name: At_Open_Flower_P Parameter: Tissue Value: Half Open vs. Whole Plant
gatcgttttggttcttcacctttccttttctttgctttctgcttcctcccttaaatacatttcactctgttatcatcgatttttttttcttatatctcaatcttattttgtttgtcttttctccatttttgtttcgttaagaagaaacaatggttatggctatggatcggatcgctttgttctcttcctcatcatcatctgtttatcgtcatcgttcgtctcattctcatggctccaaatcttccagagttttcactattcgttccgactctacagcggttggaaggaaactgtatattcctcctcgagaggttcatcttcaagtgaagtattcaatgccaccacaaaagctggagattttcaagtccttagaaggatgggctaatgagaacttgttggcttacttaaaacctgttgagaaatcatggcaaccaactgattttctccctgaacctgagtcagaaggattctatgaccaagttaaggagttaagagaaaggtgtaaggagctctctgatgactaccttatagtgcttgttggtgatatgatcacagaggaagcacttccgacttatcagaccatgattaatacattggacggggttagagatgagacgggagcaagtccaactccttgggccgtatggactagggcatggactgcggaagagaatagacatggtgatcttcttaacaagtacctttatctgtctggacgagtagacatgagacagattgaaaaaactattcaatacctcattggttctggaatggatccaaaaactgaaaacaacccttacttgggattcatatatacttcttttcaagaaagagctacattcatctcccatggaaacactgctagactggcaaaggatcttggagacttgacacttgggaagatttgtggcaccattgctgctgatgagaggcgtcatgaacacgcctacaccaagattgtagagaagctctttgaaattgatcctgataccacagtcgtgggatttgctgacatgatgaggaaaaagatctcgatgcctgctcatttgatgtatgatggtcgtgatgataatctatttgatcacttctcgtccgtggcccagaggcttggtgtctacactgccaaggactatgctgatatactgcaacatcttgtggaaaggtggaatgtggagaagttgtcagacctttctagtgaagggaacagggcccaggactacctctgtggattacctgctagaatccgcaaacttgaagagagggctcaagggagaaccaaagaagcagcaaaaaacataccattcagctggatttttggtcgagaagtcagggcttaaaagaagtaatgctaagcaattaattcttccatattataatcccaagcaagctataaaagatcttcaccaacaccatgatgaagaagccagaagtatgttatgttggaaagtgtgtagataaagtatgtgctagactttgctttgtttggatcacttaaatgactgcctccaaagaatttgctttgttttgacgattttatttatttatttctgcacctctatttgttgcc

SEQ ID NO: 37457 - protein, 395 aa, Arabidopsis thaliana
  peptide (1)..(395): Ceres Seq. ID no. 12389082
  misc_feature (36)..(394): Homolog of NCBI NO: 417820 NR Description: Acyl-
  misc_feature (36)..(394): Homolog of NCBI NO: 134945 NR Description: Acyl-
  misc_feature (22)..(393): Homolog of NCBI NO: 3355634 NR Description: stearoyl-acyl carrier protein desaturase [Linum
  misc_feature (36)..(394): Homolog of NCBI NO: 575942 NR Description: stearoyl-acyl carrier protein desaturase [Sesamum
  misc_feature (22)..(393): Homolog of NCBI NO: 3355632 NR Description: stearoyl-acyl carrier protein desaturase [Linum
  misc_feature (1)..(395): Homolog of NCBI NO: 21592896 NR Description: putative stearoyl-acyl carrier protein desaturase
  misc_feature (1)..(395): Homolog of NCBI NO: 20466636 NR Description: putative stearoyl-acyl carrier protein desaturase
  misc_feature (1)..(395): Homolog of NCBI NO: 15232943 NR Description: putative stearoyl-acyl carrier protein desaturase
  misc_feature (1)..(395): Homolog of NCBI NO: 15237308 NR Description: stearoyl-acyl carrier protein desaturase
  misc_feature (1)..(395): Homolog of NCBI NO: 21593675 NR Description: stearoyl-acyl carrier protein desaturase
  misc_feature (36)..(394): Homolog of NCBI NO: 417820 NR Description: Acyl-
  misc_feature (36)..(394): Homolog of NCBI NO: 134945 NR Description: Acyl-
  misc_feature (22)..(393): Homolog of NCBI NO: 3355634 NR Description: stearoyl-acyl carrier protein desaturase [Linum
  misc_feature (36)..(394): Homolog of NCBI NO: 575942 NR Description: stearoyl-acyl carrier protein desaturase [Sesamum
  misc_feature (22)..(393): Homolog of NCBI NO: 3355632 NR Description: stearoyl-acyl carrier protein desaturase [Linum
  misc_feature (1)..(395): Homolog of NCBI NO: 21592896 NR Description: putative stearoyl-acyl carrier protein desaturase
  misc_feature (1)..(395): Homolog of NCBI NO: 20466636 NR Description: putative stearoyl-acyl carrier protein desaturase
  misc_feature (1)..(395): Homolog of NCBI NO: 15232943 NR Description: putative stearoyl-acyl carrier protein desaturase
  misc_feature (1)..(395): Homolog of NCBI NO: 15237308 NR Description: stearoyl-acyl carrier protein desaturase
  misc_feature (1)..(395): Homolog of NCBI NO: 21593675 NR Description: stearoyl-acyl carrier protein desaturase
MVMAMDRIALFSSSSSSVYRHRSSHSHGSKSSRVFTIRSDSTAVGRKLYIPPREVHLQVKYSMPPQKLEIFKSLEGWANENLLAYLKPVEKSWQPTDFLPEPESEGFYDQVKELRERCKELSDDYLIVLVGDMITEEALPTYQTMINTLDGVRDETGASPTPWAVWTRAWTAEENRHGDLLNKYLYLSGRVDMRQIEKTIQYLIGSGMDPKTENNPYLGFIYTSFQERATFISHGNTARLAKDLGDLTLGKICGTIAADERRHEHAYTKIVEKLFEIDPDTTVVGFADMMRKKISMPAHLMYDGRDDNLFDHFSSVAQRLGVYTAKDYADILQHLVERWNVEKLSDLSSEGNRAQDYLCGLPARIRKLEERAQGRTKEAAKNIPFSWIFGREVRA

SEQ ID NO: 37458 - protein, 393 aa, Arabidopsis thaliana
  peptide (1)..(393): Ceres Seq. ID no. 12389083
  misc_feature (34)..(392): Homolog of NCBI NO: 417820 NR Description: Acyl-
  misc_feature (34)..(392): Homolog of NCBI NO: 134945 NR Description: Acyl-
  misc_feature (20)..(391): Homolog of NCBI NO: 3355634 NR Description: stearoyl-acyl carrier protein desaturase [Linum
  misc_feature (34)..(392): Homolog of NCBI NO: 575942 NR Description: stearoyl-acyl carrier protein desaturase [Sesamum
  misc_feature (20)..(391): Homolog of NCBI NO: 3355632 NR Description: stearoyl-acyl carrier protein desaturase [Linum
  misc_feature (1)..(393): Homolog of NCBI NO: 21592896 NR Description: putative stearoyl-acyl carrier protein desaturase
  misc_feature (1)..(393): Homolog of NCBI NO: 20466636 NR Description: putative stearoyl-acyl carrier protein desaturase
  misc_feature (1)..(393): Homolog of NCBI NO: 15232943 NR Description: putative stearoyl-acyl carrier protein desaturase
  misc_feature (1)..(393): Homolog of NCBI NO: 15237308 NR Description: stearoyl-acyl carrier protein desaturase
  misc_feature (1)..(393): Homolog of NCBI NO: 21593675 NR Description: stearoyl-acyl carrier protein desaturase
  misc_feature (34)..(392): Homolog of NCBI NO: 417820 NR Description: Acyl-
  misc_feature (34)..(392): Homolog of NCBI NO: 134945 NR Description: Acyl-
  misc_feature (20)..(391): Homolog of NCBI NO: 3355634 NR Description: stearoyl-acyl carrier protein desaturase [Linum
  misc_feature (34)..(392): Homolog of NCBI NO: 575942 NR Description: stearoyl-acyl carrier protein desaturase [Sesamum
  misc_feature (20)..(391): Homolog of NCBI NO: 3355632 NR Description: stearoyl-acyl carrier protein desaturase [Linum
  misc_feature (1)..(393): Homolog of NCBI NO: 21592896 NR Description: putative stearoyl-acyl carrier protein desaturase
  misc_feature (1)..(393): Homolog of NCBI NO: 20466636 NR Description: putative stearoyl-acyl carrier protein desaturase
  misc_feature (1)..(393): Homolog of NCBI NO: 15232943 NR Description: putative stearoyl-acyl carrier protein desaturase
  misc_feature (1)..(393): Homolog of NCBI NO: 15237308 NR Description: stearoyl-acyl carrier protein desaturase
  misc_feature (1)..(393): Homolog of NCBI NO: 21593675 NR Description: stearoyl-acyl carrier protein desaturase
MAMDRIALFSSSSSSVYRHRSSHSHGSKSSRVFTIRSDSTAVGRKLYIPPREVHLQVKYSMPPQKLEIFKSLEGWANENLLAYLKPVEKSWQPTDFLPEPESEGFYDQVKELRERCKELSDDYLIVLVGDMITEEALPTYQTMINTLDGVRDETGASPTPWAVWTRAWTAEENRHGDLLNKYLYLSGRVDMRQIEKTIQYLIGSGMDPKTENNPYLGFIYTSFQERATFISHGNTARLAKDLGDLTLGKICGTIAADERRHEHAYTKIVEKLFEIDPDTTVVGFADMMRKKISMPAHLMYDGRDDNLFDHFSSVAQRLGVYTAKDYADILQHLVERWNVEKLSDLSSEGNRAQDYLCGLPARIRKLEERAQGRTKEAAKNIPFSWIFGREVRA

SEQ ID NO: 37459 - protein, 391 aa, Arabidopsis thaliana
  peptide (1)..(391): Ceres Seq. ID no. 12389084
  misc_feature (32)..(390): Homolog of NCBI NO: 417820 NR Description: Acyl-
  misc_feature (32)..(390): Homolog of NCBI NO: 134945 NR Description: Acyl-
  misc_feature (18)..(389): Homolog of NCBI NO: 3355634 NR Description: stearoyl-acyl carrier protein desaturase [Linum
  misc_feature (32)..(390): Homolog of NCBI NO: 575942 NR Description: stearoyl-acyl carrier protein desaturase [Sesamum
  misc_feature (18)..(389): Homolog of NCBI NO: 3355632 NR Description: stearoyl-acyl carrier protein desaturase [Linum
  misc_feature (1)..(391): Homolog of NCBI NO: 21592896 NR Description: putative stearoyl-acyl carrier protein desaturase
  misc_feature (1)..(391): Homolog of NCBI NO: 20466636 NR Description: putative stearoyl-acyl carrier protein desaturase
  misc_feature (1)..(391): Homolog of NCBI NO: 15232943 NR Description: putative stearoyl-acyl carrier protein desaturase
  misc_feature (1)..(391): Homolog of NCBI NO: 15237308 NR Description: stearoyl-acyl carrier protein desaturase
  misc_feature (1)..(391): Homolog of NCBI NO: 21593675 NR Description: stearoyl-acyl carrier protein desaturase
  misc_feature (32)..(390): Homolog of NCBI NO: 417820 NR Description: Acyl-
  misc_feature (32)..(390): Homolog of NCBI NO: 134945 NR Description: Acyl-
  misc_feature (18)..(389): Homolog of NCBI NO: 3355634 NR Description: stearoyl-acyl carrier protein desaturase [Linum
  misc_feature (32)..(390): Homolog of NCBI NO: 575942 NR Description: stearoyl-acyl carrier protein desaturase [Sesamum
  misc_feature (18)..(389): Homolog of NCBI NO: 3355632 NR Description: stearoyl-acyl carrier protein desaturase [Linum
  misc_feature (1)..(391): Homolog of NCBI NO: 21592896 NR Description: putative stearoyl-acyl carrier protein desaturase
  misc_feature (1)..(391): Homolog of NCBI NO: 20466636 NR Description: putative stearoyl-acyl carrier protein desaturase
  misc_feature (1)..(391): Homolog of NCBI NO: 15232943 NR Description: putative stearoyl-acyl carrier protein desaturase
  misc_feature (1)..(391): Homolog of NCBI NO: 15237308 NR Description: stearoyl-acyl carrier protein desaturase
  misc_feature (1)..(391): Homolog of NCBI NO: 21593675 NR Description: stearoyl-acyl carrier protein desaturase
MDRIALFSSSSSSVYRHRSSHSHGSKSSRVFTIRSDSTAVGRKLYIPPREVHLQVKYSMPPQKLEIFKSLEGWANENLLAYLKPVEKSWQPTDFLPEPESEGFYDQVKELRERCKELSDDYLIVLVGDMITEEALPTYQTMINTLDGVRDETGASPTPWAVWTRAWTAEENRHGDLLNKYLYLSGRVDMRQIEKTIQYLIGSGMDPKTENNPYLGFIYTSFQERATFISHGNTARLAKDLGDLTLGKICGTIAADERRHEHAYTKIVEKLFEIDPDTTVVGFADMMRKKISMPAHLMYDGRDDNLFDHFSSVAQRLGVYTAKDYADILQHLVERWNVEKLSDLSSEGNRAQDYLCGLPARIRKLEERAQGRTKEAAKNIPFSWIFGREVRA

SEQ ID NO: 37460 - DNA, 1473 bp, Arabidopsis thaliana
  misc_feature (1)..(1473): Ceres Seq. ID no. 12324325
  misc_feature: MA Experiment ID: 108434 Result: Up-regulated in Transcription
  misc_feature: MA Experiment 108434 PARAMETER Experiment Name: At_Root_Tips_cDNA_P Parameter: Tissue Value: Root Tips
  misc_feature: MA Experiment ID: 108462 Result: Up-regulated in Transcription
  misc_feature: MA Experiment 108462 PARAMETER Experiment Name: At_Germinating_Seeds_cDNA_P Parameter: Age (day) Value: 2 vs. 0
  misc_feature: MA Experiment 108462 PARAMETER Experiment Name: At_Germinating_Seeds_cDNA_P Parameter: Tissue Value: Germinating Seeds
  misc_feature: MA Experiment ID: 20000069 Result: Down-regulated in Transcription
  misc_feature: MA Experiment 20000069 PARAMETER Experiment Name: At_100uM_ABA_Mutants_cDNA_P Parameter: Plant Line Value: CS23
  misc_feature: MA Experiment 20000069 PARAMETER Experiment Name: At_100uM_ABA_Mutants_cDNA_P Parameter: Timepoint (hr) Value: 6
  misc_feature: MA Experiment 20000069 PARAMETER Experiment Name: At_100uM_ABA_Mutants_cDNA_P Parameter: Tissue Value: Aerial
  misc_feature: MA Experiment 20000069 PARAMETER Experiment Name: At_100uM_ABA_Mutants_cDNA_P Parameter: Treatment Value: 100uM ABA vs. No Treatment
  misc_feature: MA Experiment ID: 20000070 Result: Down-regulated in Transcription
  misc_feature: MA Experiment 20000070 PARAMETER Experiment Name: At_100uM_ABA_Mutants_cDNA_P Parameter: Plant Line Value: CS24
  misc_feature: MA Experiment 20000070 PARAMETER Experiment Name: At_100uM_ABA_Mutants_cDNA_P Parameter: Timepoint (hr) Value: 6
  misc_feature: MA Experiment 20000070 PARAMETER Experiment Name: At_100uM_ABA_Mutants_cDNA_P Parameter: Tissue Value: Aerial
  misc_feature: MA Experiment 20000070 PARAMETER Experiment Name: At_100uM_ABA_Mutants_cDNA_P Parameter: Treatment Value: 100uM ABA vs. No Treatment
  misc_feature: MA Experiment ID: 20000071 Result: Down-regulated in Transcription
  misc_feature: MA Experiment 20000071 PARAMETER Experiment Name: At_100uM_ABA_Mutants_cDNA_P Parameter: Plant Line Value: CS8104
  misc_feature: MA Experiment 20000071 PARAMETER Experiment Name: At_100uM_ABA_Mutants_cDNA_P Parameter: Timepoint (hr) Value: 6
  misc_feature: MA Experiment 20000071 PARAMETER Experiment Name: At_100uM_ABA_Mutants_cDNA_P Parameter: Tissue Value: Aerial
  misc_feature: MA Experiment 20000071 PARAMETER Experiment Name: At_100uM_ABA_Mutants_cDNA_P Parameter: Treatment Value: 100uM ABA vs. No Treatment
  misc_feature: MA Experiment ID: 20000072 Result: Down-regulated in Transcription
  misc_feature: MA Experiment 20000072 PARAMETER Experiment Name: At_100uM_ABA_Mutants_cDNA_P Parameter: Plant Line Value: CS8105
  misc_feature: MA Experiment 20000072 PARAMETER Experiment Name: At_100uM_ABA_Mutants_cDNA_P Parameter: Timepoint (hr) Value: 6
  misc_feature: MA Experiment 20000072 PARAMETER Experiment Name: At_100uM_ABA_Mutants_cDNA_P Parameter: Tissue Value: Aerial
  misc_feature: MA Experiment 20000072 PARAMETER Experiment Name: At_100uM_ABA_Mutants_cDNA_P Parameter: Treatment Value: 100uM ABA vs. No Treatment
  misc_feature: MA Experiment ID: 20000086 Result: Down-regulated in Transcription
  misc_feature: MA Experiment 20000086 PARAMETER Experiment Name: At_100uM_ABA_Mutants_cDNA_P Parameter: Plant Line Value: CS22
  misc_feature: MA Experiment 20000086 PARAMETER Experiment Name: At_100uM_ABA_Mutants_cDNA_P Parameter: Timepoint (hr) Value: 6
  misc_feature: MA Experiment 20000086 PARAMETER Experiment Name: At_100uM_ABA_Mutants_cDNA_P Parameter: Tissue Value: Aerial
  misc_feature: MA Experiment 20000086 PARAMETER Experiment Name: At_100uM_ABA_Mutants_cDNA_P Parameter: Treatment Value: 100uM ABA vs. No Treatment
  misc_feature: MA Experiment ID: 20000087 Result: Down-regulated in Transcription
  misc_feature: MA Experiment 20000087 PARAMETER Experiment Name: At_100uM_ABA_Mutants_cDNA_P Parameter: Plant Line Value: WS
  misc_feature: MA Experiment 20000087 PARAMETER Experiment Name: At_100uM_ABA_Mutants_cDNA_P Parameter: Timepoint (hr) Value: 6
  misc_feature: MA Experiment 20000087 PARAMETER Experiment Name: At_100uM_ABA_Mutants_cDNA_P Parameter: Tissue Value: Aerial
  misc_feature: MA Experiment 20000087 PARAMETER Experiment Name: At_100uM_ABA_Mutants_cDNA_P Parameter: Treatment Value: 100uM ABA vs. No Treatment
  misc_feature: MA Experiment ID: 20000090 Result: Down-regulated in Transcription
  misc_feature: MA Experiment ID: 20000117 Result: Down-regulated in Transcription
  misc_feature: MA Experiment 20000117 PARAMETER Experiment Name: At_100uM_ABA_Mutants_cDNA_P Parameter: Plant Line Value: Columbia
  misc_feature: MA Experiment 20000117 PARAMETER Experiment Name: At_100uM_ABA_Mutants_cDNA_P Parameter: Timepoint (hr) Value: 6
  misc_feature: MA Experiment 20000117 PARAMETER Experiment Name: At_100uM_ABA_Mutants_cDNA_P Parameter: Tissue Value: Aerial
  misc_feature: MA Experiment 20000117 PARAMETER Experiment Name: At_100uM_ABA_Mutants_cDNA_P Parameter: Treatment Value: 100uM ABA vs. No Treatment
  misc_feature: MA Experiment ID: 20000180 Result: Up-regulated in Transcription
  misc_feature: MA Experiment 20000180 PARAMETER Experiment Name: At_Germinating_Seeds_P Parameter: Age (hr) Value: 24 vs. 0
  misc_feature: MA Experiment 20000180 PARAMETER Experiment Name: At_Germinating_Seeds_P Parameter: Tissue Value: Germinating Seeds
  misc_feature: MA Experiment ID: 20000184 Result: Up-regulated in Transcription
  misc_feature: MA Experiment 20000184 PARAMETER Experiment Name: At_Shoots__P Parameter: Age (day) Value: 7
  misc_feature: MA Experiment 20000184 PARAMETER Experiment Name: At_Shoots__P Parameter: Tissue Value: Shoots vs. Whole Plant
  misc_feature: MA Experiment ID: 20000265 Result: Up-regulated in Transcription
  misc_feature: MA Experiment 20000265 PARAMETER Experiment Name: At_Open_Flower_P Parameter: Age (day) Value: 21
  misc_feature: MA Experiment 20000265 PARAMETER Experiment Name: At_Open_Flower_P Parameter: Plant Line Value: WS
  misc_feature: MA Experiment 20000265 PARAMETER Experiment Name: At_Open_Flower_P Parameter: Tissue Value: Closed Flower vs. Whole Plant
  misc_feature: MA Experiment ID: 20000438 Result: Up-regulated in Transcription
  misc_feature: MA Experiment 20000438 PARAMETER Experiment Name: At_Shoots__P Parameter: Age (day) Value: 14
  misc_feature: MA Experiment 20000438 PARAMETER Experiment Name: At_Shoots__P Parameter: Tissue Value: Shoots vs. Whole Plant
  misc_feature: MA Experiment ID: 20001905 Result: Down-regulated in Transcription
  misc_feature: MA Experiment 20001905 PARAMETER Experiment Name: At_Drought_Reproduction_P Parameter: Age (day) Value: 40
  misc_feature: MA Experiment 20001905 PARAMETER Experiment Name: At_Drought_Reproduction_P Parameter: Organism Value: A. thaliana
  misc_feature: MA Experiment 20001905 PARAMETER Experiment Name: At_Drought_Reproduction_P Parameter: Plant Line Value: WS
  misc_feature: MA Experiment 20001905 PARAMETER Experiment Name: At_Drought_Reproduction_P Parameter: Timepoint (day) Value: 10
  misc_feature: MA Experiment 20001905 PARAMETER Experiment Name: At_Drought_Reproduction_P Parameter: Tissue Value: Rosettes
  misc_feature: MA Experiment 20001905 PARAMETER Experiment Name: At_Drought_Reproduction_P Parameter: Treatment Value: Drought vs. No Drought
  misc_feature: Phenotype: INFLORESCENCE Flowering Time-Late Flowering
  misc_feature: Phenotype: INFLORESCENCE Strength-Strong
  misc_feature: Phenotype: WHOLE PLANT Size-Small
  misc_feature: Phenotype: INFLORESCENCE Flowering Time-Late Flowering
agagattacaagagtgttgtttgagagcgaatcaaggttcctccaaagaaagaagatgactttaattcttatttaatttccctttctccttttgcttcaccaaaatccacacattcatcaattaaaaaacaaaccctagattcttgaaaactggaactcattcacgaatcctaaaaagagagctcctttggttttcttgaaacccagattcttcaagctcagctatggcggtcttcaaaaccctagctttcctattcgttttaagcatcgtgatttaccaatcagtggctgttacagatgtaaattcatcgttttcctttaatgggtttgtcaaagctccaagctttgacaataatgttgctctgtttggagattcgaagctcgttcatggcggtccatcgattcaattgactgactcagtgagtcgcagtgaagggcgagttatttacaagaaacccatcagactgttccaaggtaaagagagaaacttttccggatcattctcaactagtttctcgttttcgatgtctgatgagattggtagtgtcttggcttttataatggttccaagaggtttggatcttaggttgtttggtagaaagggtaataatagttcctctggtttagggttcttattgaaacacaaagttgttgctgttgagtttggtatctccaagagagggaatcatgtagggatcttagttggtcgtcctgaatctggtaaagttagaaagttatcatcttttggtcaccatttcaatgaagagaagagattgaattgttggattgattatgaggcaagctcaaagagaatagaggttcgtttgagtctatctgctgccttaaagccggtggatccattcgtgtcttactctgtagacttggctaagctatggaaagatgggaagtttatggtgggtttaacctctgcaaatggaaacacttcaaagccggtttatctccattcgtggagctttaaactgatacatccttcgatgaggattcactcgcagccgcttgatccaaacgacgtttccaagactgttaaggaaggggagaagacggtggaagttaaggggaaaggaaaatgtatatggagaatccttggtgcattggtcttgggggcggtttgtggaacattgggagccatgttcgcgttatacctttggacaatatgcggtaataggcagtcaatggcgatagttcccgaggaatgtgctgacgaaaaagcggatatccttgtaacgaaagctgatgttgttgttgaagaagaagtcaagaagtagtagaaaaagaaaagtttggtgtgtgtgttttagaatgttgtatttgttgtttgtaatgtaaattcttgtgtccttctttattcttcttctgtttgtttttttgttagttgcagatttggtgagatgagttttcacatgtagaagaaccatacaatatgtattaagttaagatcctgaaatcttgatc

SEQ ID NO: 37461 - protein, 353 aa, Arabidopsis thaliana
  peptide (1)..(353): Ceres Seq. ID no. 12324326
  misc_feature (9)..(253): Homolog of NCBI NO: 38112427 NR Description: lectin-like receptor kinase 7;2 [Medicago
  misc_feature (7)..(280): Homolog of NCBI NO: 15230670 NR Description: receptor-like protein kinase; protein id:
  misc_feature (5)..(277): Homolog of NCBI NO: 28416699 NR Description: At3g53810 [Arabidopsis thaliana]
  misc_feature (5)..(277): Homolog of NCBI NO: 15232332 NR Description: serine/threonine-specific kinase like protein
  misc_feature (5)..(331): Homolog of NCBI NO: 15232413 NR Description: putative protein
  misc_feature (40)..(332): Homolog of NCBI NO: 5923683 NR Description: putative lectin [Arabidopsis thaliana]
  misc_feature (1)..(335): Homolog of NCBI NO: 22330926 NR Description: similar to lectin - like protein; protein id:
  misc_feature (1)..(353): Homolog of NCBI NO: 15240888 NR Description: lectin - like protein
  misc_feature (1)..(353): Homolog of NCBI NO: 21593676 NR Description: lectin-like protein [Arabidopsis thaliana]
MAVFKTLAFLFVLSIVIYQSVAVTDVNSSFSFNGFVKAPSFDNNVALFGDSKLVHGGPSIQLTDSVSRSEGRVIYKKPIRLFQGKERNFSGSFSTSFSFSMSDEIGSVLAFIMVPRGLDLRLFGRKGNNSSSGLGFLLKHKVVAVEFGISKRGNHVGILVGRPESGKVRKLSSFGHHFNEEKRLNCWIDYEASSKRIEVRLSLSAALKPVDPFVSYSVDLAKLWKDGKFMVGLTSANGNTSKPVYLHSWSFKLIHPSMRIHSQPLDPNDVSKTVKEGEKTVEVKGKGKCIWRILGALVLGAVCGTLGAMFALYLWTICGNRQSMAIVPEECADEKADILVTKADVVVEEEVKK

SEQ ID NO: 37462 - protein, 253 aa, Arabidopsis thaliana
  peptide (1)..(253): Ceres Seq. ID no. 12324327
  misc_feature (1)..(153): Homolog of NCBI NO: 38112427 NR Description: lectin-like receptor kinase 7;2 [Medicago
  misc_feature (1)..(180): Homolog of NCBI NO: 15230670 NR Description: receptor-like protein kinase; protein id:
  misc_feature (1)..(177): Homolog of NCBI NO: 28416699 NR Description: At3g53810 [Arabidopsis thaliana]
  misc_feature (1)..(177): Homolog of NCBI NO: 15232332 NR Description: serine/threonine-specific kinase like protein
  misc_feature (1)..(231): Homolog of NCBI NO: 15232413 NR Description: putative protein
  misc_feature (1)..(232): Homolog of NCBI NO: 5923683 NR Description: putative lectin [Arabidopsis thaliana]
  misc_feature (1)..(235): Homolog of NCBI NO: 22330926 NR Description: similar to lectin - like protein; protein id:
  misc_feature (1)..(253): Homolog of NCBI NO: 15240888 NR Description: lectin - like protein
  misc_feature (1)..(253): Homolog of NCBI NO: 21593676 NR Description: lectin-like protein [Arabidopsis thaliana]
MSDEIGSVLAFIMVPRGLDLRLFGRKGNNSSSGLGFLLKHKVVAVEFGISKRGNHVGILVGRPESGKVRKLSSFGHHFNEEKRLNCWIDYEASSKRIEVRLSLSAALKPVDPFVSYSVDLAKLWKDGKFMVGLTSANGNTSKPVYLHSWSFKLIHPSMRIHSQPLDPNDVSKTVKEGEKTVEVKGKGKCIWRILGALVLGAVCGTLGAMFALYLWTICGNRQSMAIVPEECADEKADILVTKADVVVEEEVKK

SEQ ID NO: 37463 - protein, 241 aa, Arabidopsis thaliana
  peptide (1)..(241): Ceres Seq. ID no. 12324328
  misc_feature (1)..(141): Homolog of NCBI NO: 38112427 NR Description: lectin-like receptor kinase 7;2 [Medicago
  misc_feature (1)..(168): Homolog of NCBI NO: 15230670 NR Description: receptor-like protein kinase; protein id:
  misc_feature (1)..(165): Homolog of NCBI NO: 28416699 NR Description: At3g53810 [Arabidopsis thaliana]
  misc_feature (1)..(165): Homolog of NCBI NO: 15232332 NR Description: serine/threonine-specific kinase like protein
  misc_feature (1)..(219): Homolog of NCBI NO: 15232413 NR Description: putative protein
  misc_feature (1)..(220): Homolog of NCBI NO: 5923683 NR Description: putative lectin [Arabidopsis thaliana]
  misc_feature (1)..(223): Homolog of NCBI NO: 22330926 NR Description: similar to lectin - like protein; protein id:
  misc_feature (1)..(241): Homolog of NCBI NO: 15240888 NR Description: lectin - like protein
  misc_feature (1)..(241): Homolog of NCBI NO: 21593676 NR Description: lectin-like protein [Arabidopsis thaliana]
MVPRGLDLRLFGRKGNNSSSGLGFLLKHKVVAVEFGISKRGNHVGILVGRPESGKVRKLSSFGHHFNEEKRLNCWIDYEASSKRIEVRLSLSAALKPVDPFVSYSVDLAKLWKDGKFMVGLTSANGNTSKPVYLHSWSFKLIHPSMRIHSQPLDPNDVSKTVKEGEKTVEVKGKGKCIWRILGALVLGAVCGTLGAMFALYLWTICGNRQSMAIVPEECADEKADILVTKADVVVEEEVKK

SEQ ID NO: 37464 - DNA, 1471 bp, Arabidopsis thaliana
  misc_feature (1)..(1471): Ceres Seq. ID no. 12422556
  misc_feature: MA Experiment ID: 108434 Result: Up-regulated in Transcription
  misc_feature: MA Experiment 108434 PARAMETER Experiment Name: At_Root_Tips_cDNA_P Parameter: Tissue Value: Root Tips
  misc_feature: MA Experiment ID: 108569 Result: Up-regulated in Transcription
  misc_feature: MA Experiment 108569 PARAMETER Experiment Name: At_0.001%_MeJA__cDNA_P Parameter: Timepoint (hr) Value: 6
  misc_feature: MA Experiment 108569 PARAMETER Experiment Name: At_0.001%_MeJA__cDNA_P Parameter: Tissue Value: Aerial
  misc_feature: MA Experiment 108569 PARAMETER Experiment Name: At_0.001%_MeJA__cDNA_P Parameter: Treatment Value: 0.001% MeJA vs. No Treatment
  misc_feature: MA Experiment ID: 108573 Result: Up-regulated in Transcription
  misc_feature: MA Experiment 108573 PARAMETER Experiment Name: At_Drought_cDNA_P Parameter: Timepoint (hr) Value: 6
  misc_feature: MA Experiment 108573 PARAMETER Experiment Name: At_Drought_cDNA_P Parameter: Tissue Value: Aerial
  misc_feature: MA Experiment 108573 PARAMETER Experiment Name: At_Drought_cDNA_P Parameter: Treatment Value: Drought vs. No Drought
  misc_feature: MA Experiment ID: 20000227 Result: Down-regulated in Transcription
  misc_feature: MA Experiment 20000227 PARAMETER Experiment Name: At_Root-Tips-vs-Tops_P Parameter: Tissue Value: Root Tips vs. Root Tops
gttttggtttcttcttcatcggtccgatcagagagagagaatcgccggtgagaaaagaaaatggcgtcggcgatttctctttctctcttaaacggagcaacgcctttgaaatcgaattcgctccacaaatctagactcactccacttcatcttcgaactatctcttgttctagactatcttactctccctcgagtcgcgaaatttctctcaaaactcaatctactgttcctatttcgtgtaggcgtagtaggtttgacttcgttcctcgttgcggcatttcgtcgaacgatttgcctactgagaaaaagaagagctttggggagtgggttgagtttgtgggagaggcggtttcgacggcgtttccgatatgggtttctctgggatgcttgttgggactgatgagaccaagtactttcaattgggttactccaaattggaccattgtaggtcttacgatcactatgcttggaatgggaatgactttgacccttgatgatcttcgtggcgctttatcgatgcccaaggagctcttcgctggctttctgttgcagtattcggtcatgccactatcagcattttttgtgagtaaactcttaaatttgccaccacattacgcagccggtctcatattggttggttgctgtccaggcggcacggctagtaatattgtcacatacatcgcgcgtggaaatgttgcgctatcagtgttgatgacagcagctagcactgtttcagctgtgattatgacaccgcttcttacggcgaagcttgccaagcagtatatcacagttgatgctcttggattactaatgtcaacactacaggtggttcttctcccagtgttggctggtgcatttcttaaccaatactttaaaaagctggtgaaattcgtctctcctgtgatgcctccaattgcggttggaacagttgcaatcctgtgtgggtatgctatcggtcagaacgcatctgcaatactcatgtctgggaaacaagtagtcttggcttcatgccttcttcacatctctggatttctctttgggtatctgttttcaagaatactcggaattgatgtggcatcatcgagaactatctctatcgaagttggcatgcagaactcggtgcttggagttgttcttgcgacacagcattttgggaatccactcactgcagtaccgtgcgctgtttctagcgtctgtcactcaatcctcggtagcgtcttggctggaatttggagacgcagtgccccaaaacagcttgaagactaaaaagaaagcaaaggaaagttcatgaagtcctcactgtgttactcaatttcaacatctttcaggaccatttagttaagtttgttgaacaaatgaaccaaaacgggttatgtcttgtaaagctttggaagatttttttttttttttctatgtctgagatttctcttgttattcttcaaagaattttgtgaattcgaaacatgaaaat

SEQ ID NO: 37465 - protein, 401 aa, Arabidopsis thaliana
  peptide (1)..(401): Ceres Seq. ID no. 12422557
  misc_feature (128)..(304): Pfam Name: Sodium Bile acid symporter family Pfam Description: Sodium Bile acid symporter family
  misc_feature (60)..(382): Homolog of NCBI NO: 7485401 NR Description: hypothetical protein At2g26900 [imported] -
  misc_feature (133)..(392): Homolog of NCBI NO: 22298669 NR Description: ORF_ID:tll1126~probable sodium-dependent
  misc_feature (93)..(393): Homolog of NCBI NO: 24217327 NR Description: conserved hypothetical protein
  misc_feature (54)..(394): Homolog of NCBI NO: 33865169 NR Description: Sodium/bile acid cotransporter family
  misc_feature (42)..(401): Homolog of NCBI NO: 20269901 NR Description: putative sodium-dependent bile acid symporter
  misc_feature (42)..(401): Homolog of NCBI NO: 30683305 NR Description: bile acid:sodium symporter family [Arabidopsis
  misc_feature (34)..(401): Homolog of NCBI NO: 34911708 NR Description: P0707D10.18 [Oryza sativa (japonica
  misc_feature (218)..(401): Homolog of NCBI NO: 25406554 NR Description: hypothetical protein T30F21.11 [imported] -
  misc_feature (19)..(396): Homolog of NCBI NO: 38346633 NR Description: OSJNBa0072D21.3 [Oryza sativa (japonica
  misc_feature (1)..(401): Homolog of NCBI NO: 18412023 NR Description: expressed protein
MASAISLSLLNGATPLKSNSLHKSRLTPLHLRTISCSRLSYSPSSREISLKTQSTVPISCRRSRFDFVPRCGISSNDLPTEKKKSFGEWVEFVGEAVSTAFPIWVSLGCLLGLMRPSTFNWVTPNWTIVGLTITMLGMGMTLTLDDLRGALSMPKELFAGFLLQYSVMPLSAFFVSKLLNLPPHYAAGLILVGCCPGGTASNIVTYIARGNVALSVLMTAASTVSAVIMTPLLTAKLAKQYITVDALGLLMSTLQVVLLPVLAGAFLNQYFKKLVKFVSPVMPPIAVGTVAILCGYAIGQNASAILMSGKQVVLASCLLHISGFLFGYLFSRILGIDVASSRTISIEVGMQNSVLGVVLATQHFGNPLTAVPCAVSSVCHSILGSVLAGIWRRSAPKQLED

SEQ ID NO: 37466 - protein, 288 aa, Arabidopsis thaliana
  peptide (1)..(288): Ceres Seq. ID no. 12422558
  misc_feature (15)..(191): Pfam Name: Sodium Bile acid symporter family Pfam Description: Sodium Bile acid symporter family
  misc_feature (1)..(269): Homolog of NCBI NO: 7485401 NR Description: hypothetical protein At2g26900 [imported] -
  misc_feature (20)..(279): Homolog of NCBI NO: 22298669 NR Description: ORF_ID:tll1126~probable sodium-dependent
  misc_feature (1)..(280): Homolog of NCBI NO: 24217327 NR Description: conserved hypothetical protein
  misc_feature (1)..(281): Homolog of NCBI NO: 33865169 NR Description: Sodium/bile acid cotransporter family
  misc_feature (1)..(288): Homolog of NCBI NO: 20269901 NR Description: putative sodium-dependent bile acid symporter
  misc_feature (1)..(288): Homolog of NCBI NO: 30683305 NR Description: bile acid:sodium symporter family [Arabidopsis
  misc_feature (1)..(288): Homolog of NCBI NO: 34911708 NR Description: P0707D10.18 [Oryza sativa (japonica
  misc_feature (105)..(288): Homolog of NCBI NO: 25406554 NR Description: hypothetical protein T30F21.11 [imported] -
  misc_feature (1)..(283): Homolog of NCBI NO: 38346633 NR Description: OSJNBa0072D21.3 [Oryza sativa (japonica
  misc_feature (1)..(288): Homolog of NCBI NO: 18412023 NR Description: expressed protein
MRPSTFNWVTPNWTIVGLTITMLGMGMTLTLDDLRGALSMPKELFAGFLLQYSVMPLSAFFVSKLLNLPPHYAAGLILVGCCPGGTASNIVTYIARGNVALSVLMTAASTVSAVIMTPLLTAKLAKQYITVDALGLLMSTLQVVLLPVLAGAFLNQYFKKLVKFVSPVMPPIAVGTVAILCGYAIGQNASAILMSGKQVVLASCLLHISGFLFGYLFSRILGIDVASSRTISIEVGMQNSVLGVVLATQHFGNPLTAVPCAVSSVCHSILGSVLAGIWRRSAPKQLED

SEQ ID NO: 37467 - protein, 267 aa, Arabidopsis thaliana
  peptide (1)..(267): Ceres Seq. ID no. 12422559
  misc_feature (1)..(170): Pfam Name: Sodium Bile acid symporter family Pfam Description: Sodium Bile acid symporter family
  misc_feature (1)..(248): Homolog of NCBI NO: 7485401 NR Description: hypothetical protein At2g26900 [imported] -
  misc_feature (1)..(258): Homolog of NCBI NO: 22298669 NR Description: ORF_ID:tll1126~probable sodium-dependent
  misc_feature (1)..(259): Homolog of NCBI NO: 24217327 NR Description: conserved hypothetical protein
  misc_feature (1)..(260): Homolog of NCBI NO: 33865169 NR Description: Sodium/bile acid cotransporter family
  misc_feature (1)..(267): Homolog of NCBI NO: 20269901 NR Description: putative sodium-dependent bile acid symporter
  misc_feature (1)..(267): Homolog of NCBI NO: 30683305 NR Description: bile acid:sodium symporter family [Arabidopsis
  misc_feature (1)..(267): Homolog of NCBI NO: 34911708 NR Description: P0707D10.18 [Oryza sativa (japonica
  misc_feature (84)..(267): Homolog of NCBI NO: 25406554 NR Description: hypothetical protein T30F21.11 [imported] -
  misc_feature (1)..(262): Homolog of NCBI NO: 38346633 NR Description: OSJNBa0072D21.3 [Oryza sativa (japonica
  misc_feature (1)..(267): Homolog of NCBI NO: 18412023 NR Description: expressed protein
MLGMGMTLTLDDLRGALSMPKELFAGFLLQYSVMPLSAFFVSKLLNLPPHYAAGLILVGCCPGGTASNIVTYIARGNVALSVLMTAASTVSAVIMTPLLTAKLAKQYITVDALGLLMSTLQVVLLPVLAGAFLNQYFKKLVKFVSPVMPPIAVGTVAILCGYAIGQNASAILMSGKQVVLASCLLHISGFLFGYLFSRILGIDVASSRTISIEVGMQNSVLGVVLATQHFGNPLTAVPCAVSSVCHSILGSVLAGIWRRSAPKQLED

SEQ ID NO: 37468 - DNA, 1414 bp, Arabidopsis thaliana
  misc_feature (1)..(1414): Ceres Seq. ID no. 13490862
  misc_feature: MA Experiment ID: 108434 Result: Up-regulated in Transcription
  misc_feature: MA Experiment 108434 PARAMETER Experiment Name: At_Root_Tips_cDNA_P Parameter: Tissue Value: Root Tips
  misc_feature: MA Experiment ID: 108573 Result: Up-regulated in Transcription
  misc_feature: MA Experiment 108573 PARAMETER Experiment Name: At_Drought_cDNA_P Parameter: Timepoint (hr) Value: 6
  misc_feature: MA Experiment 108573 PARAMETER Experiment Name: At_Drought_cDNA_P Parameter: Tissue Value: Aerial
  misc_feature: MA Experiment 108573 PARAMETER Experiment Name: At_Drought_cDNA_P Parameter: Treatment Value: Drought vs. No Drought
  misc_feature: MA Experiment ID: 108595 Result: Down-regulated in Transcription
  misc_feature: MA Experiment 108595 PARAMETER Experiment Name: At_Ler-pi_Ovule_cDNA_P Parameter: Plant Line Value: null
  misc_feature: MA Experiment ID: 20000179 Result: Up-regulated in Transcription
  misc_feature: MA Experiment 20000179 PARAMETER Experiment Name: At_Germinating_Seeds_P Parameter: Age (hr) Value: 6 vs. 0
  misc_feature: MA Experiment 20000179 PARAMETER Experiment Name: At_Germinating_Seeds_P Parameter: Tissue Value: Germinating Seeds
  misc_feature: MA Experiment ID: 20000184 Result: Up-regulated in Transcription
  misc_feature: MA Experiment 20000184 PARAMETER Experiment Name: At_Shoots__P Parameter: Age (day) Value: 7
  misc_feature: MA Experiment 20000184 PARAMETER Experiment Name: At_Shoots__P Parameter: Tissue Value: Shoots vs. Whole Plant
  misc_feature: MA Experiment ID: 20000185 Result: Up-regulated in Transcription
  misc_feature: MA Experiment 20000185 PARAMETER Experiment Name: At_Roots__P Parameter: Age (day) Value: 7 vs. 21
  misc_feature: MA Experiment 20000185 PARAMETER Experiment Name: At_Roots__P Parameter: Organism Value: A. thaliana
  misc_feature: MA Experiment 20000185 PARAMETER Experiment Name: At_Roots__P Parameter: Tissue Value: Roots vs. Whole Plant
  misc_feature: MA Experiment ID: 20000264 Result: Up-regulated in Transcription
  misc_feature: MA Experiment 20000264 PARAMETER Experiment Name: At_Open_Flower_P Parameter: Age (day) Value: 21
  misc_feature: MA Experiment 20000264 PARAMETER Experiment Name: At_Open_Flower_P Parameter: Plant Line Value: WS
  misc_feature: MA Experiment 20000264 PARAMETER Experiment Name: At_Open_Flower_P Parameter: Tissue Value: Open Flower vs. Whole Plant
  misc_feature: MA Experiment ID: 20000286 Result: Up-regulated in Transcription
  misc_feature: MA Experiment 20000286 PARAMETER Experiment Name: At_Open_Flower_P Parameter: Age (day) Value: 21
  misc_feature: MA Experiment 20000286 PARAMETER Experiment Name: At_Open_Flower_P Parameter: Plant Line Value: WS
  misc_feature: MA Experiment 20000286 PARAMETER Experiment Name: At_Open_Flower_P Parameter: Tissue Value: Half Open vs. Whole Plant
  misc_feature: MA Experiment ID: 20000439 Result: Up-regulated in Transcription
  misc_feature: MA Experiment 20000439 PARAMETER Experiment Name: At_Roots__P Parameter: Age (day) Value: 14 vs. 21
  misc_feature: MA Experiment 20000439 PARAMETER Experiment Name: At_Roots__P Parameter: Organism Value: A. thaliana
  misc_feature: MA Experiment 20000439 PARAMETER Experiment Name: At_Roots__P Parameter: Tissue Value: Roots vs. Whole Plant
  misc_feature: MA Experiment ID: 20000794 Result: Up-regulated in Transcription
  misc_feature: MA Experiment 20000794 PARAMETER Experiment Name: At_Petals_P Parameter: Age (day) Value: 23-25 days
  misc_feature: MA Experiment 20000794 PARAMETER Experiment Name: At_Petals_P Parameter: Plant Line Value: WS
  misc_feature: MA Experiment 20000794 PARAMETER Experiment Name: At_Petals_P Parameter: Tissue Value: Petals vs. Whole plant
  misc_feature: MA Experiment ID: 20001451 Result: Down-regulated in Transcription
  misc_feature: MA Experiment 20001451 PARAMETER Experiment Name: At_Far-red-induction_P Parameter: Age (day) Value: 7
  misc_feature: MA Experiment 20001451 PARAMETER Experiment Name: At_Far-red-induction_P Parameter: Light Value: Far-red vs. White
  misc_feature: MA Experiment 20001451 PARAMETER Experiment Name: At_Far-red-induction_P Parameter: Organism Value: A. thaliana
  misc_feature: MA Experiment 20001451 PARAMETER Experiment Name: At_Far-red-induction_P Parameter: Plant Line Value: Columbia
  misc_feature: MA Experiment 20001451 PARAMETER Experiment Name: At_Far-red-induction_P Parameter: Timepoint (hr) Value: 24
  misc_feature: MA Experiment 20001451 PARAMETER Experiment Name: At_Far-red-induction_P Parameter: Tissue Value: Whole Plant
  misc_feature: Phenotype: WHOLE PLANT Color-Dark Green
  misc_feature: Phenotype: WHOLE PLANT Size-Small
  misc_feature: Phenotype: WHOLE PLANT Color-Dark Green
  misc_feature: Phenotype: WHOLE PLANT Size-Small
  misc_feature: Phenotype: WHOLE PLANT Color-Dark Green
  misc_feature: Phenotype: WHOLE PLANT Size-Small
  misc_feature: Phenotype: FERTILITY Fertility-Reduced
  misc_feature: Phenotype: WHOLE PLANT Size-Small
  misc_feature: Phenotype: FERTILITY Fertility-Reduced
  misc_feature: Phenotype: WHOLE PLANT Color-Dark Green
  misc_feature: Phenotype: WHOLE PLANT Size-Small
  misc_feature: Phenotype: WHOLE PLANT Color-Dark Green
  misc_feature: Phenotype: WHOLE PLANT Size-Small
  misc_feature: Phenotype: FERTILITY Fertility-Reduced
  misc_feature: Phenotype: WHOLE PLANT Size-Small
  misc_feature: Phenotype: FERTILITY Fertility-Reduced
gccgctgtgtcatcgtggaactcccattttctctcttttacttgttcgttcccaaactcttctccctcgatcgtctccgtcgccgatctcgtttcttcattttccgcgtgttgattggtacaaaggtttaatcaaatggttggaggaggagttatccagcaaattcttaggaggaagcttcactcccaatcacttgcaactccggttttgtcttggttttcttcgaagaaagctcatgaggatgctggttcttctggtgtaagagcacttgccttgttgggtgctggtgttacaggactgttgagtttttctacagtagcatctgctgatgaggctgaacatggattggagagtccagagtacccttggcctcatgatggcattcttagctcatatgaccatgcttcgatccgtcgtgggcatcaagtttatcagcaagtctgtgcatcatgccattcaatgtctctgatctcataccgagacttggtgggtgtcgcctacgcagaggaagaggcaaaggcaatggcagctgaaatcgaggtagtagatggacctaatgatgagggtgagatgttcacccgccctggtaaactcagtgaccggtttcctcagccatatgcaaatgaatcagctgcaaggtttgctaatggtggagcgtatcctcctgatctaagtcttataactaaggcacgtcacaatggtccaaactatgtctttgcgcttctgactggttaccgtgatccccctgctggcatatcgattagagaggggttacactacaatccttatttccctgggggagcaattgctatgccgaaaatgctcaatgatgaagctgttgagtatgaagatggtgtccccgccacagaggcacagatgggtaaagatattgtatcattcttggcctgggcagctgaaccagaaatggaagagaggaaactgatgggtttcaaatggatattcctactctctctcgctcttctccaagctgcttactacaggcgactaaaatggtcggttctcaagtcccgcaagctggttcttgacgtggttaactaaagcgccgctgagaagcttttgcattggcctggccacacacagtcgtattttcaacaaaggatgttaaatagagaagagcctttctctggtaataacgtatcatcatttttatgtgtcataaaaatctttgatgagaccagttctcacctgaaggtgaaaagacctcatcgttcttctttttccttcgattattactagagagttttatgaggataatcacgaaaacttgtttttttcgcctcataataatcacacatgattttgagattatatcatttgttatgtttttcctcttgtctcaataaaaaataactttgtactctgattttgttgtctattttcggcatttcttgcg

SEQ ID NO: 37469 - protein, 307 aa, Arabidopsis thaliana
  peptide (1)..(307): Ceres Seq. ID no. 13490863
  misc_feature (72)..(297): Pfam Name: Cytochrome C1 family Pfam Description: Cytochrome C1 family
  misc_feature (48)..(307): Homolog of NCBI NO: 82264 NR Description: ubiquinol-cytochrome-c reductase (EC 1.10.2.2)
  misc_feature (37)..(307): Homolog of NCBI NO: 117765 NR Description: Cytochrome c1, heme protein, mitochondrial
  misc_feature (1)..(307): Homolog of NCBI NO: 34907202 NR Description: putative cytochrome c1 precursor
  misc_feature (37)..(307): Homolog of NCBI NO: 7547401 NR Description: cytochrome c1 precursor [Solanum tuberosum]
  misc_feature (37)..(307): Homolog of NCBI NO: 82263 NR Description: ubiquinol-cytochrome-c reductase (EC 1.10.2.2)
  misc_feature (1)..(307): Homolog of NCBI NO: 15215624 NR Description: AT5g40810/MHK7_4 [Arabidopsis thaliana]
  misc_feature (1)..(307): Homolog of NCBI NO: 15237497 NR Description: cytochrome c1 precursor [Arabidopsis thaliana]
  misc_feature (1)..(307): Homolog of NCBI NO: 21593678 NR Description: cytochrome c, putative [Arabidopsis thaliana]
  misc_feature (1)..(307): Homolog of NCBI NO: 15232125 NR Description: cytochrome c -related [Arabidopsis thaliana]
  misc_feature (1)..(307): Homolog of NCBI NO: 15809956 NR Description: AT3g27240/K17E12_6 [Arabidopsis thaliana]
MVGGGVIQQILRRKLHSQSLATPVLSWFSSKKAHEDAGSSGVRALALLGAGVTGLLSFSTVASADEAEHGLESPEYPWPHDGILSSYDHASIRRGHQVYQQVCASCHSMSLISYRDLVGVAYAEEEAKAMAAEIEVVDGPNDEGEMFTRPGKLSDRFPQPYANESAARFANGGAYPPDLSLITKARHNGPNYVFALLTGYRDPPAGISIREGLHYNPYFPGGAIAMPKMLNDEAVEYEDGVPATEAQMGKDIVSFLAWAAEPEMEERKLMGFKWIFLLSLALLQAAYYRRLKWSVLKSRKLVLDVVN

SEQ ID NO: 37470 - protein, 199 aa, Arabidopsis thaliana
  peptide (1)..(199): Ceres Seq. ID no. 13490864
  misc_feature (1)..(189): Pfam Name: Cytochrome C1 family Pfam Description: Cytochrome C1 family
  misc_feature (1)..(199): Homolog of NCBI NO: 82264 NR Description: ubiquinol-cytochrome-c reductase (EC 1.10.2.2)
  misc_feature (1)..(199): Homolog of NCBI NO: 117765 NR Description: Cytochrome c1, heme protein, mitochondrial
  misc_feature (1)..(199): Homolog of NCBI NO: 34907202 NR Description: putative cytochrome c1 precursor
  misc_feature (1)..(199): Homolog of NCBI NO: 7547401 NR Description: cytochrome c1 precursor [Solanum tuberosum]
  misc_feature (1)..(199): Homolog of NCBI NO: 82263 NR Description: ubiquinol-cytochrome-c reductase (EC 1.10.2.2)
  misc_feature (1)..(199): Homolog of NCBI NO: 15215624 NR Description: AT5g40810/MHK7_4 [Arabidopsis thaliana]
  misc_feature (1)..(199): Homolog of NCBI NO: 15237497 NR Description: cytochrome c1 precursor [Arabidopsis thaliana]
  misc_feature (1)..(199): Homolog of NCBI NO: 21593678 NR Description: cytochrome c, putative [Arabidopsis thaliana]
  misc_feature (1)..(199): Homolog of NCBI NO: 15232125 NR Description: cytochrome c -related [Arabidopsis thaliana]
  misc_feature (1)..(199): Homolog of NCBI NO: 15809956 NR Description: AT3g27240/K17E12_6 [Arabidopsis thaliana]
MSLISYRDLVGVAYAEEEAKAMAAEIEVVDGPNDEGEMFTRPGKLSDRFPQPYANESAARFANGGAYPPDLSLITKARHNGPNYVFALLTGYRDPPAGISIREGLHYNPYFPGGAIAMPKMLNDEAVEYEDGVPATEAQMGKDIVSFLAWAAEPEMEERKLMGFKWIFLLSLALLQAAYYRRLKWSVLKSRKLVLDVVN

SEQ ID NO: 37471 - protein, 178 aa, Arabidopsis thaliana
  peptide (1)..(178): Ceres Seq. ID no. 13490865
  misc_feature (1)..(168): Pfam Name: Cytochrome C1 family Pfam Description: Cytochrome C1 family
  misc_feature (1)..(178): Homolog of NCBI NO: 82264 NR Description: ubiquinol-cytochrome-c reductase (EC 1.10.2.2)
  misc_feature (1)..(178): Homolog of NCBI NO: 117765 NR Description: Cytochrome c1, heme protein, mitochondrial
  misc_feature (1)..(178): Homolog of NCBI NO: 34907202 NR Description: putative cytochrome c1 precursor
  misc_feature (1)..(178): Homolog of NCBI NO: 7547401 NR Description: cytochrome c1 precursor [Solanum tuberosum]
  misc_feature (1)..(178): Homolog of NCBI NO: 82263 NR Description: ubiquinol-cytochrome-c reductase (EC 1.10.2.2)
  misc_feature (1)..(178): Homolog of NCBI NO: 15215624 NR Description: AT5g40810/MHK7_4 [Arabidopsis thaliana]
  misc_feature (1)..(178): Homolog of NCBI NO: 15237497 NR Description: cytochrome c1 precursor [Arabidopsis thaliana]
  misc_feature (1)..(178): Homolog of NCBI NO: 21593678 NR Description: cytochrome c, putative [Arabidopsis thaliana]
  misc_feature (1)..(178): Homolog of NCBI NO: 15232125 NR Description: cytochrome c -related [Arabidopsis thaliana]
  misc_feature (1)..(178): Homolog of NCBI NO: 15809956 NR Description: AT3g27240/K17E12_6 [Arabidopsis thaliana]
MAAEIEVVDGPNDEGEMFTRPGKLSDRFPQPYANESAARFANGGAYPPDLSLITKARHNGPNYVFALLTGYRDPPAGISIREGLHYNPYFPGGAIAMPKMLNDEAVEYEDGVPATEAQMGKDIVSFLAWAAEPEMEERKLMGFKWIFLLSLALLQAAYYRRLKWSVLKSRKLVLDVVN

SEQ ID NO: 37472 - DNA, 1490 bp, Arabidopsis thaliana
  misc_feature (1)..(1490): Ceres Seq. ID no. 12421224
  misc_feature: MA Experiment ID: 20000185 Result: Up-regulated in Transcription
  misc_feature: MA Experiment 20000185 PARAMETER Experiment Name: At_Roots__P Parameter: Age (day) Value: 7 vs. 21
  misc_feature: MA Experiment 20000185 PARAMETER Experiment Name: At_Roots__P Parameter: Organism Value: A. thaliana
  misc_feature: MA Experiment 20000185 PARAMETER Experiment Name: At_Roots__P Parameter: Tissue Value: Roots vs. Whole Plant
  misc_feature: MA Experiment ID: 20000439 Result: Up-regulated in Transcription
  misc_feature: MA Experiment 20000439 PARAMETER Experiment Name: At_Roots__P Parameter: Age (day) Value: 14 vs. 21
  misc_feature: MA Experiment 20000439 PARAMETER Experiment Name: At_Roots__P Parameter: Organism Value: A. thaliana
  misc_feature: MA Experiment 20000439 PARAMETER Experiment Name: At_Roots__P Parameter: Tissue Value: Roots vs. Whole Plant
  misc_feature: MA Experiment ID: 20000451 Result: Up-regulated in Transcription
  misc_feature: MA Experiment 20000451 PARAMETER Experiment Name: At_CS6879_Shoots-Roots_P Parameter: Age (day) Value: 14
  misc_feature: MA Experiment 20000451 PARAMETER Experiment Name: At_CS6879_Shoots-Roots_P Parameter: Organism Value: A. thaliana
  misc_feature: MA Experiment 20000451 PARAMETER Experiment Name: At_CS6879_Shoots-Roots_P Parameter: Plant Line Value: CS6879 vs. WS
  misc_feature: MA Experiment 20000451 PARAMETER Experiment Name: At_CS6879_Shoots-Roots_P Parameter: Tissue Value: Roots
  misc_feature: MA Experiment ID: 20000794 Result: Up-regulated in Transcription
  misc_feature: MA Experiment 20000794 PARAMETER Experiment Name: At_Petals_P Parameter: Age (day) Value: 23-25 days
  misc_feature: MA Experiment 20000794 PARAMETER Experiment Name: At_Petals_P Parameter: Plant Line Value: WS
  misc_feature: MA Experiment 20000794 PARAMETER Experiment Name: At_Petals_P Parameter: Tissue Value: Petals vs. Whole plant
  misc_feature: MA Experiment ID: 20001557 Result: Up-regulated in Transcription
  misc_feature: MA Experiment 20001557 PARAMETER Experiment Name: At_Drought_Soil_Dry_P Parameter: Age (day) Value: 27
  misc_feature: MA Experiment 20001557 PARAMETER Experiment Name: At_Drought_Soil_Dry_P Parameter: Organism Value: A. thaliana
  misc_feature: MA Experiment 20001557 PARAMETER Experiment Name: At_Drought_Soil_Dry_P Parameter: Plant Line Value: WS
  misc_feature: MA Experiment 20001557 PARAMETER Experiment Name: At_Drought_Soil_Dry_P Parameter: Post Timepoint (hr) Value: 3
  misc_feature: MA Experiment 20001557 PARAMETER Experiment Name: At_Drought_Soil_Dry_P Parameter: Post-Treatment Value: Re-Water vs. No Drought
  misc_feature: MA Experiment 20001557 PARAMETER Experiment Name: At_Drought_Soil_Dry_P Parameter: Timepoint (day) Value: 13
  misc_feature: MA Experiment 20001557 PARAMETER Experiment Name: At_Drought_Soil_Dry_P Parameter: Treatment Value: Drought vs. No Drought
  misc_feature: Phenotype: WHOLE PLANT Color-Dark Green
  misc_feature: Phenotype: FLOWERS Other
  misc_feature: Phenotype: INFLORESCENCE Flowering Time-Early Flowering
  misc_feature: Phenotype: INFLORESCENCE Height-Short
  misc_feature: Phenotype: INFLORESCENCE Other
  misc_feature: Phenotype: WHOLE PLANT Color-Dark Green
  misc_feature: Phenotype: FLOWERS Other
  misc_feature: Phenotype: INFLORESCENCE Flowering Time-Early Flowering
  misc_feature: Phenotype: INFLORESCENCE Height-Short
  misc_feature: Phenotype: INFLORESCENCE Height-Short
  misc_feature: Phenotype: INFLORESCENCE Other
aaaaaagattcgatttttgactgcaaaaaagagaatttctaaaagcaaatcggagagcttcggcgatggcgttatcacgactttcttcacgatccaacactttcctaaagccggcgattaccgccttgccctcctccatccgccgtcatgtttccacagactcatcaccgatcacaatcgaaaccgccgtccctttcacatcgcatctatgtgaatcaccgtcacgctccgtcgagacttcatcggaggagatcttagcctttttccgtgacatggctcggatgaggaggatggagatcgcagcagattctctttacaaggcgaagctgatccgtgggttctgtcatttgtacgatggtcaagaggctttagcggtgggaatggaagcggcgattaccaaaaaagatgcgattatcacatcgtatcgtgatcactgtactttcattggtcgtggtgggaagcttgttgatgctttctctgagcttatggggagaaaaactggttgttctcatggtaaaggaggatctatgcatttctataagaaagatgcttccttttatggtggacatgggattgttggtgctcagattccattgggatgtggtttggcttttgctcagaagtataataaggatgaggctgtgacttttgctttgtatggtgatggtgctgcgaatcagggacagttgtttgaggccttgaacatttcggctttgtgggatttgcctgcgattcttgtttgcgagaataaccattatggaatgggaacggctacatggaggtcggctaagtctccggcttatttcaagcgtggagattatgttcctggcttgaaggtggatggtatggatgcactggctgtgaaacaggcgtgcaagtttgccaaggagcatgctctcaagaatggtcctattatccttgagatggacacttacagataccacggtcactctatgtctgacccaggaagcacttaccgtactcgtgatgaaatctctggcgtgagacaggtgcgtgatccaattgaaagggtgcgaaagttgctcttaactcatgacatagctaccgaaaaagagcttaaggacatggagaaagagataaggaaagaagtagatgacgccgtagctcaggccaaggagagcccgataccagatgcatctgagctattcacaaacatgtacgtgaaagactgcggagttgagtcgtttggagcagacagaaaagaactcaaagtaacacttccatagaatcttgcttcccaaggagatgattggttcaataaatcagaaggcaaggctacacaaatctttttaacttgctaccaaaaatatttctggttttttttttttgtattttcatttcaagtgtaaagccattgcttcaccagtttgccaactttgtttcccacacttaaatttgacaccaagcaaaagaagcttcggatatcactctgtgagataaagttagagaaataagcagagagagtagtt

SEQ ID NO: 37473 - protein, 393 aa, Arabidopsis thaliana
  peptide (1)..(393): Ceres Seq. ID no. 12421225
  misc_feature (68)..(365): Pfam Name: Dehydrogenase E1 component Pfam Description: Dehydrogenase E1 component
  misc_feature (3)..(393): Homolog of NCBI NO: 28465345 NR Description: pyruvate dehydrogenase E1 alpha subunit [Beta
  misc_feature (1)..(393): Homolog of NCBI NO: 3851005 NR Description: pyruvate dehydrogenase E1 alpha subunit [Zea mays]
  misc_feature (1)..(393): Homolog of NCBI NO: 1709453 NR Description: Pyruvate dehydrogenase E1 component alpha
  misc_feature (3)..(393): Homolog of NCBI NO: 28465343 NR Description: pyruvate dehydrogenase E1alpha subunit [Beta
  misc_feature (1)..(393): Homolog of NCBI NO: 1709449 NR Description: Pyruvate dehydrogenase E1 component alpha
  misc_feature (1)..(393): Homolog of NCBI NO: 2117533 NR Description: pyruvate dehydrogenase (lipoamide) (EC 1.2.4.1)
  misc_feature (1)..(393): Homolog of NCBI NO: 13430788 NR Description: putative pyruvate dehydrogenase e1 alpha subunit
  misc_feature (1)..(393): Homolog of NCBI NO: 15218940 NR Description: pyruvate dehydrogenase e1 alpha subunit, putative
  misc_feature (1)..(393): Homolog of NCBI NO: 23306664 NR Description: pyruvate dehydrogenase E1a-like subunit IAR4
  misc_feature (1)..(393): Homolog of NCBI NO: 15221692 NR Description: pyruvate dehydrogenase E1 alpha subunit
MALSRLSSRSNTFLKPAITALPSSIRRHVSTDSSPITIETAVPFTSHLCESPSRSVETSSEEILAFFRDMARMRRMEIAADSLYKAKLIRGFCHLYDGQEALAVGMEAAITKKDAIITSYRDHCTFIGRGGKLVDAFSELMGRKTGCSHGKGGSMHFYKKDASFYGGHGIVGAQIPLGCGLAFAQKYNKDEAVTFALYGDGAANQGQLFEALNISALWDLPAILVCENNHYGMGTATWRSAKSPAYFKRGDYVPGLKVDGMDALAVKQACKFAKEHALKNGPIILEMDTYRYHGHSMSDPGSTYRTRDEISGVRQVRDPIERVRKLLLTHDIATEKELKDMEKEIRKEVDDAVAQAKESPIPDASELFTNMYVKDCGVESFGADRKELKVTLP

SEQ ID NO: 37474 - protein, 324 aa, Arabidopsis thaliana
  peptide (1)..(324): Ceres Seq. ID no. 12421226
  misc_feature (1)..(296): Pfam Name: Dehydrogenase E1 component Pfam Description: Dehydrogenase E1 component
  misc_feature (1)..(324): Homolog of NCBI NO: 28465345 NR Description: pyruvate dehydrogenase E1 alpha subunit [Beta
  misc_feature (1)..(324): Homolog of NCBI NO: 3851005 NR Description: pyruvate dehydrogenase E1 alpha subunit [Zea mays]
  misc_feature (1)..(324): Homolog of NCBI NO: 1709453 NR Description: Pyruvate dehydrogenase E1 component alpha
  misc_feature (1)..(324): Homolog of NCBI NO: 28465343 NR Description: pyruvate dehydrogenase E1alpha subunit [Beta
  misc_feature (1)..(324): Homolog of NCBI NO: 1709449 NR Description: Pyruvate dehydrogenase E1 component alpha
  misc_feature (1)..(324): Homolog of NCBI NO: 2117533 NR Description: pyruvate dehydrogenase (lipoamide) (EC 1.2.4.1)
  misc_feature (1)..(324): Homolog of NCBI NO: 13430788 NR Description: putative pyruvate dehydrogenase e1 alpha subunit
  misc_feature (1)..(324): Homolog of NCBI NO: 15218940 NR Description: pyruvate dehydrogenase e1 alpha subunit, putative
  misc_feature (1)..(324): Homolog of NCBI NO: 23306664 NR Description: pyruvate dehydrogenase E1a-like subunit IAR4
  misc_feature (1)..(324): Homolog of NCBI NO: 15221692 NR Description: pyruvate dehydrogenase E1 alpha subunit
MARMRRMEIAADSLYKAKLIRGFCHLYDGQEALAVGMEAAITKKDAIITSYRDHCTFIGRGGKLVDAFSELMGRKTGCSHGKGGSMHFYKKDASFYGGHGIVGAQIPLGCGLAFAQKYNKDEAVTFALYGDGAANQGQLFEALNISALWDLPAILVCENNHYGMGTATWRSAKSPAYFKRGDYVPGLKVDGMDALAVKQACKFAKEHALKNGPIILEMDTYRYHGHSMSDPGSTYRTRDEISGVRQVRDPIERVRKLLLTHDIATEKELKDMEKEIRKEVDDAVAQAKESPIPDASELFTNMYVKDCGVESFGADRKELKVTLP

SEQ ID NO: 37475 - protein, 321 aa, Arabidopsis thaliana
  peptide (1)..(321): Ceres Seq. ID no. 12421227
  misc_feature (1)..(293): Pfam Name: Dehydrogenase E1 component Pfam Description: Dehydrogenase E1 component
  misc_feature (1)..(321): Homolog of NCBI NO: 28465345 NR Description: pyruvate dehydrogenase E1 alpha subunit [Beta
  misc_feature (1)..(321): Homolog of NCBI NO: 3851005 NR Description: pyruvate dehydrogenase E1 alpha subunit [Zea mays]
  misc_feature (1)..(321): Homolog of NCBI NO: 1709453 NR Description: Pyruvate dehydrogenase E1 component alpha
  misc_feature (1)..(321): Homolog of NCBI NO: 28465343 NR Description: pyruvate dehydrogenase E1alpha subunit [Beta
  misc_feature (1)..(321): Homolog of NCBI NO: 1709449 NR Description: Pyruvate dehydrogenase E1 component alpha
  misc_feature (1)..(321): Homolog of NCBI NO: 2117533 NR Description: pyruvate dehydrogenase (lipoamide) (EC 1.2.4.1)
  misc_feature (1)..(321): Homolog of NCBI NO: 13430788 NR Description: putative pyruvate dehydrogenase e1 alpha subunit
  misc_feature (1)..(321): Homolog of NCBI NO: 15218940 NR Description: pyruvate dehydrogenase e1 alpha subunit, putative
  misc_feature (1)..(321): Homolog of NCBI NO: 23306664 NR Description: pyruvate dehydrogenase E1a-like subunit IAR4
  misc_feature (1)..(321): Homolog of NCBI NO: 15221692 NR Description: pyruvate dehydrogenase E1 alpha subunit
MRRMEIAADSLYKAKLIRGFCHLYDGQEALAVGMEAAITKKDAIITSYRDHCTFIGRGGKLVDAFSELMGRKTGCSHGKGGSMHFYKKDASFYGGHGIVGAQIPLGCGLAFAQKYNKDEAVTFALYGDGAANQGQLFEALNISALWDLPAILVCENNHYGMGTATWRSAKSPAYFKRGDYVPGLKVDGMDALAVKQACKFAKEHALKNGPIILEMDTYRYHGHSMSDPGSTYRTRDEISGVRQVRDPIERVRKLLLTHDIATEKELKDMEKEIRKEVDDAVAQAKESPIPDASELFTNMYVKDCGVESFGADRKELKVTLP

SEQ ID NO: 37476 - DNA, 1439 bp, Arabidopsis thaliana
  misc_feature (1)..(1439): Ceres Seq. ID no. 12738816
  misc_feature: MA Experiment ID: 108462 Result: Up-regulated in Transcription
  misc_feature: MA Experiment 108462 PARAMETER Experiment Name: At_Germinating_Seeds_cDNA_P Parameter: Age (day) Value: 2 vs. 0
  misc_feature: MA Experiment 108462 PARAMETER Experiment Name: At_Germinating_Seeds_cDNA_P Parameter: Tissue Value: Germinating Seeds
  misc_feature: MA Experiment ID: 108463 Result: Up-regulated in Transcription
  misc_feature: MA Experiment 108463 PARAMETER Experiment Name: At_Germinating_Seeds_cDNA_P Parameter: Age (day) Value: 3 vs. 0
  misc_feature: MA Experiment 108463 PARAMETER Experiment Name: At_Germinating_Seeds_cDNA_P Parameter: Tissue Value: Germinating Seeds
  misc_feature: MA Experiment ID: 108573 Result: Up-regulated in Transcription
  misc_feature: MA Experiment 108573 PARAMETER Experiment Name: At_Drought_cDNA_P Parameter: Timepoint (hr) Value: 6
  misc_feature: MA Experiment 108573 PARAMETER Experiment Name: At_Drought_cDNA_P Parameter: Tissue Value: Aerial
  misc_feature: MA Experiment 108573 PARAMETER Experiment Name: At_Drought_cDNA_P Parameter: Treatment Value: Drought vs. No Drought
  misc_feature: MA Experiment ID: 108607 Result: Up-regulated in Transcription
  misc_feature: MA Experiment 108607 PARAMETER Experiment Name: At_100uM_ABA_cDNA_P Parameter: Timepoint (hr) Value: 4
  misc_feature: MA Experiment 108607 PARAMETER Experiment Name: At_100uM_ABA_cDNA_P Parameter: Tissue Value: Aerial
  misc_feature: MA Experiment 108607 PARAMETER Experiment Name: At_100uM_ABA_cDNA_P Parameter: Treatment Value: 100uM ABA vs. No Treatment
  misc_feature: MA Experiment ID: 20000437 Result: Up-regulated in Transcription
  misc_feature: MA Experiment 20000437 PARAMETER Experiment Name: At_Drought_P Parameter: Age (day) Value: 8
  misc_feature: MA Experiment 20000437 PARAMETER Experiment Name: At_Drought_P Parameter: Organism Value: A. thaliana
  misc_feature: MA Experiment 20000437 PARAMETER Experiment Name: At_Drought_P Parameter: Plant Line Value: WS
  misc_feature: MA Experiment 20000437 PARAMETER Experiment Name: At_Drought_P Parameter: Timepoint (hr) Value: 24
  misc_feature: MA Experiment 20000437 PARAMETER Experiment Name: At_Drought_P Parameter: Tissue Value: Whole Plant
  misc_feature: MA Experiment 20000437 PARAMETER Experiment Name: At_Drought_P Parameter: Treatment Value: Drought vs. No Drought
cttcttcttcttcgtcgtcctcaacaagctcttctttctgactcataacccaaatttctgagaatcagagccttattcaagagaacaccaagagtttggtggaagttgttgaaattcgaagccgatcgcggactcgtttgctcttgattacgtcgcaatccgtacgattttccgatcaaacttaagagtgaaggagatagatttgtagaaaaaggaagagaataagagtgagcttgtggccaaaaaagggatgcctttgaacttaggcaacgatggcgatgggtcttcccggattattttgactgagcctcgcggatctactgctgaggtgcttctatttggaggacaagtcatttcttggaaaaatgaaaggagggaagaactgctttatatgagcagcaaggctcaatataagccacccaaggcgatcagaggaggaatacctgtttgctttccacagtttggaaactttggtggacttgagcgacatggatttgcccggaacaaattctggtcacatgatgaagatccttcgcctctacctcctgctaacaaacaatcatctgttgatctgatattgaagtccacagaagatgacttgaagacctggccgcatagttttgaactccgtattcgcatttctattagccctgggaagcttactttgatccctcgtgtgaggaacattgactcaaaggcattctcctttatgtttgcactgcgaaactacttatatgtatctgacataagtgaagttcgagttgagggtttggagacactggattatctagacaacttgattggtaaagaaagattcactgagcaagcagacgcgattacctttgacggggaggtcgatagagtgtacttgaacacaccaacaaagattgcggtcatagatcatgagcgaaagaggaccatcgagttgcgaaaggaaggcatgcccaatgcagttgtgtggaacccctgggacaaaaaggcaaagaccatagctgatatgggagatgaagattacaaaacaatgctttgtgtagattctggagtaatcgaacctctggtattgttaaagcctcgtgaagagtggaaaggcagacaagaactatccatcgtctcatcaagttactgcagcggacagcttgatccacgcaaggttctttacggagatatctgatccttttgggggtttatcttacttagtaaaaaaaacaataataagccatgatctcattatcactaccacccagaaacaactctctaagagtcttgtcttgaacttggagattttatccttttgacttgtgttttgagtgagttctgattgttgttgttacacagagaggtcacggtaatattttgtaacgttgactctgtgtttgaccgtcaaacagtgtatcggtttctttgttcggaaatttagtagaatatatcatcaatttagt

SEQ ID NO: 37477 - protein, 306 aa, Arabidopsis thaliana
  peptide (1)..(306): Ceres Seq. ID no. 12738817
  misc_feature (13)..(285): Pfam Name: Aldose 1-epimerase Pfam Description: Aldose 1-epimerase
  misc_feature (10)..(302): Homolog of NCBI NO: 19387263 NR Description: putative apospory-associated protein C
  misc_feature (11)..(304): Homolog of NCBI NO: 2501555 NR Description: POSSIBLE APOSPORY-ASSOCIATED PROTEIN C
  misc_feature (6)..(304): Homolog of NCBI NO: 40253263 NR Description: putative Aldose 1-epimerase
  misc_feature (11)..(304): Homolog of NCBI NO: 38344152 NR Description: OSJNBa0041A02.19 [Oryza sativa (japonica
  misc_feature (10)..(302): Homolog of NCBI NO: 15242099 NR Description: apospory-associated protein C
  misc_feature (1)..(305): Homolog of NCBI NO: 18417396 NR Description: putative protein
  misc_feature (1)..(305): Homolog of NCBI NO: 28393808 NR Description: unknown protein [Arabidopsis thaliana]
  misc_feature (1)..(305): Homolog of NCBI NO: 11281678 NR Description: hypothetical protein F18O22.290 - Arabidopsis
  misc_feature (1)..(306): Homolog of NCBI NO: 16612258 NR Description: AT3g01590/F4P13_13 [Arabidopsis thaliana]
  misc_feature (1)..(306): Homolog of NCBI NO: 18395868 NR Description: expressed protein
MPLNLGNDGDGSSRIILTEPRGSTAEVLLFGGQVISWKNERREELLYMSSKAQYKPPKAIRGGIPVCFPQFGNFGGLERHGFARNKFWSHDEDPSPLPPANKQSSVDLILKSTEDDLKTWPHSFELRIRISISPGKLTLIPRVRNIDSKAFSFMFALRNYLYVSDISEVRVEGLETLDYLDNLIGKERFTEQADAITFDGEVDRVYLNTPTKIAVIDHERKRTIELRKEGMPNAVVWNPWDKKAKTIADMGDEDYKTMLCVDSGVIEPLVLLKPREEWKGRQELSIVSSSYCSGQLDPRKVLYGDI

SEQ ID NO: 37478 - protein, 259 aa, Arabidopsis thaliana
  peptide (1)..(259): Ceres Seq. ID no. 12738818
  misc_feature (1)..(238): Pfam Name: Aldose 1-epimerase Pfam Description: Aldose 1-epimerase
  misc_feature (1)..(255): Homolog of NCBI NO: 19387263 NR Description: putative apospory-associated protein C
  misc_feature (1)..(257): Homolog of NCBI NO: 2501555 NR Description: POSSIBLE APOSPORY-ASSOCIATED PROTEIN C
  misc_feature (1)..(257): Homolog of NCBI NO: 40253263 NR Description: putative Aldose 1-epimerase
  misc_feature (1)..(257): Homolog of NCBI NO: 38344152 NR Description: OSJNBa0041A02.19 [Oryza sativa (japonica
  misc_feature (1)..(255): Homolog of NCBI NO: 15242099 NR Description: apospory-associated protein C
  misc_feature (1)..(258): Homolog of NCBI NO: 18417396 NR Description: putative protein
  misc_feature (1)..(258): Homolog of NCBI NO: 28393808 NR Description: unknown protein [Arabidopsis thaliana]
  misc_feature (1)..(258): Homolog of NCBI NO: 11281678 NR Description: hypothetical protein F18O22.290 - Arabidopsis
  misc_feature (1)..(259): Homolog of NCBI NO: 16612258 NR Description: AT3g01590/F4P13_13 [Arabidopsis thaliana]
  misc_feature (1)..(259): Homolog of NCBI NO: 18395868 NR Description: expressed protein
MSSKAQYKPPKAIRGGIPVCFPQFGNFGGLERHGFARNKFWSHDEDPSPLPPANKQSSVDLILKSTEDDLKTWPHSFELRIRISISPGKLTLIPRVRNIDSKAFSFMFALRNYLYVSDISEVRVEGLETLDYLDNLIGKERFTEQADAITFDGEVDRVYLNTPTKIAVIDHERKRTIELRKEGMPNAVVWNPWDKKAKTIADMGDEDYKTMLCVDSGVIEPLVLLKPREEWKGRQELSIVSSSYCSGQLDPRKVLYGDI

SEQ ID NO: 37479 - protein, 153 aa, Arabidopsis thaliana
  peptide (1)..(153): Ceres Seq. ID no. 12738819
  misc_feature (1)..(132): Pfam Name: Aldose 1-epimerase Pfam Description: Aldose 1-epimerase
  misc_feature (1)..(149): Homolog of NCBI NO: 19387263 NR Description: putative apospory-associated protein C
  misc_feature (1)..(151): Homolog of NCBI NO: 2501555 NR Description: POSSIBLE APOSPORY-ASSOCIATED PROTEIN C
  misc_feature (1)..(151): Homolog of NCBI NO: 40253263 NR Description: putative Aldose 1-epimerase
  misc_feature (1)..(151): Homolog of NCBI NO: 38344152 NR Description: OSJNBa0041A02.19 [Oryza sativa (japonica
  misc_feature (1)..(149): Homolog of NCBI NO: 15242099 NR Description: apospory-associated protein C
  misc_feature (1)..(152): Homolog of NCBI NO: 18417396 NR Description: putative protein
  misc_feature (1)..(152): Homolog of NCBI NO: 28393808 NR Description: unknown protein [Arabidopsis thaliana]
  misc_feature (1)..(152): Homolog of NCBI NO: 11281678 NR Description: hypothetical protein F18O22.290 - Arabidopsis
  misc_feature (1)..(153): Homolog of NCBI NO: 16612258 NR Description: AT3g01590/F4P13_13 [Arabidopsis thaliana]
  misc_feature (1)..(153): Homolog of NCBI NO: 18395868 NR Description: expressed protein
MFALRNYLYVSDISEVRVEGLETLDYLDNLIGKERFTEQADAITFDGEVDRVYLNTPTKIAVIDHERKRTIELRKEGMPNAVVWNPWDKKAKTIADMGDEDYKTMLCVDSGVIEPLVLLKPREEWKGRQELSIVSSSYCSGQLDPRKVLYGDI

SEQ ID NO: 37480 - DNA, 775 bp, Arabidopsis thaliana
  misc_feature (1)..(775): Ceres Seq. ID no. 12348623
  misc_feature: MA Experiment ID: 108434 Result: Up-regulated in Transcription
  misc_feature: MA Experiment 108434 PARAMETER Experiment Name: At_Root_Tips_cDNA_P Parameter: Tissue Value: Root Tips
  misc_feature: MA Experiment ID: 108462 Result: Up-regulated in Transcription
  misc_feature: MA Experiment 108462 PARAMETER Experiment Name: At_Germinating_Seeds_cDNA_P Parameter: Age (day) Value: 2 vs. 0
  misc_feature: MA Experiment 108462 PARAMETER Experiment Name: At_Germinating_Seeds_cDNA_P Parameter: Tissue Value: Germinating Seeds
  misc_feature: MA Experiment ID: 108463 Result: Up-regulated in Transcription
  misc_feature: MA Experiment 108463 PARAMETER Experiment Name: At_Germinating_Seeds_cDNA_P Parameter: Age (day) Value: 3 vs. 0
  misc_feature: MA Experiment 108463 PARAMETER Experiment Name: At_Germinating_Seeds_cDNA_P Parameter: Tissue Value: Germinating Seeds
  misc_feature: MA Experiment ID: 108464 Result: Up-regulated in Transcription
  misc_feature: MA Experiment 108464 PARAMETER Experiment Name: At_Germinating_Seeds_cDNA_P Parameter: Age (day) Value: 4 vs. 0
  misc_feature: MA Experiment 108464 PARAMETER Experiment Name: At_Germinating_Seeds_cDNA_P Parameter: Tissue Value: Germinating Seeds
  misc_feature: MA Experiment ID: 108572 Result: Up-regulated in Transcription
  misc_feature: MA Experiment 108572 PARAMETER Experiment Name: At_Drought_cDNA_P Parameter: Timepoint (hr) Value: 1
  misc_feature: MA Experiment 108572 PARAMETER Experiment Name: At_Drought_cDNA_P Parameter: Tissue Value: Aerial
  misc_feature: MA Experiment 108572 PARAMETER Experiment Name: At_Drought_cDNA_P Parameter: Treatment Value: Drought vs. No Drought
  misc_feature: MA Experiment ID: 108577 Result: Up-regulated in Transcription
  misc_feature: MA Experiment 108577 PARAMETER Experiment Name: At_42deg_Heat_cDNA_P Parameter: Temperature (deg C) Value: 42 vs. 22
  misc_feature: MA Experiment 108577 PARAMETER Experiment Name: At_42deg_Heat_cDNA_P Parameter: Timepoint (hr) Value: 6
  misc_feature: MA Experiment 108577 PARAMETER Experiment Name: At_42deg_Heat_cDNA_P Parameter: Tissue Value: Aerial
  misc_feature: MA Experiment ID: 20000111 Result: Up-regulated in Transcription
  misc_feature: MA Experiment 20000111 PARAMETER Experiment Name: At_42deg_Heat_cDNA_P Parameter: Temperature (deg C) Value: 42 vs. 22
  misc_feature: MA Experiment 20000111 PARAMETER Experiment Name: At_42deg_Heat_cDNA_P Parameter: Timepoint (hr) Value: 6
  misc_feature: MA Experiment 20000111 PARAMETER Experiment Name: At_42deg_Heat_cDNA_P Parameter: Tissue Value: Aerial
  misc_feature: MA Experiment ID: 20000495 Result: Down-regulated in Transcription
  misc_feature: MA Experiment 20000495 PARAMETER Experiment Name: At_Guard_Cells_P Parameter: Harvest Date Value: 8/2/2002
  misc_feature: MA Experiment 20000495 PARAMETER Experiment Name: At_Guard_Cells_P Parameter: Organism Value: A. thaliana
  misc_feature: MA Experiment 20000495 PARAMETER Experiment Name: At_Guard_Cells_P Parameter: Tissue Value: Guard Cells vs. Leaves
  misc_feature: MA Experiment ID: 20001757 Result: Up-regulated in Transcription
  misc_feature: MA Experiment 20001757 PARAMETER Experiment Name: At_50mM_NH4NO3_L-to-H_P Parameter: Timepoint (hr) Value: 6
  misc_feature: MA Experiment 20001757 PARAMETER Experiment Name: At_50mM_NH4NO3_L-to-H_P Parameter: Tissue Value: Leaf
  misc_feature: MA Experiment 20001757 PARAMETER Experiment Name: At_50mM_NH4NO3_L-to-H_P Parameter: Treatment Value: 50mM NH4NO3 vs 100mM Mannitol
attcatcatccacaacaaacctcttcttcagtctgatagagatctcacgtttcaaacaacaagaatggcgttccctaaggtatacttcgacatgaccatcgacggccagcccgcgggaaggatcgtgatggagctgtacaccgataagactcccaggactgccgagaatttcagagctctctgcaccggagagaaaggtgttggcggtaccggaaaaccccttcacttcaagggatctaagtttcaccgtgtgatccctaacttcatgtgccagggaggagatttcaccgccgggaacggaacaggcggtgagtcgatctacgggagcaagttcgaggacgagaatttcgagaggaagcacaccggaccggggatcctgtcgatggcgaacgccggtgcaaacacgaacggatctcagttcttcatctgcaccgtgaagaccgattggcttgatgggaagcacgtggtgtttgggcaggtcgtggaaggcttagacgtggtaaaggccatcgagaaggttggatcatcatctggaaagccgacgaagcctgtggttgttgccgattgtggtcagctctcttaggatcttcctatcatcatccttaatttagcatcatcgtcgtcattgtggtgtctctttatgcttttgcttttgttatggagtctttttaaaatttgtagtcataagtttggtgtgtgttctcatgggaacatatataaacttgcccctttaatattaactaccagaaataaggaatgagcactcttttatcat

SEQ ID NO: 37481 - protein, 193 aa, Arabidopsis thaliana
  peptide (1)..(193): Ceres Seq. ID no. 12348624
  misc_feature (22)..(192): Homolog of NCBI NO: 11270320 NR Description: peptidylprolyl isomerase (EC 5.2.1.8) vcCyP
  misc_feature (25)..(193): Homolog of NCBI NO: 15227259 NR Description: cytosolic cyclophilin (ROC3)
  misc_feature (25)..(193): Homolog of NCBI NO: 21886603 NR Description: peptidylprolyl isomerase (cyclophilin) [Betula
  misc_feature (23)..(193): Homolog of NCBI NO: 18076088 NR Description: cyclophilin [Ricinus communis]
  misc_feature (22)..(192): Homolog of NCBI NO: 11270316 NR Description: peptidylprolyl isomerase (EC 5.2.1.8)
  misc_feature (22)..(193): Homolog of NCBI NO: 18146786 NR Description: CYP1 [Vigna radiata]
  misc_feature (22)..(193): Homolog of NCBI NO: 1076510 NR Description: peptidylprolyl isomerase (EC 5.2.1.8) Cyp -
  misc_feature (25)..(193): Homolog of NCBI NO: 15226467 NR Description: cyclophilin (CYP2)
  misc_feature (25)..(193): Homolog of NCBI NO: 11270324 NR Description: peptidylprolyl isomerase (EC 5.2.1.8) CYP2
  misc_feature (22)..(193): Homolog of NCBI NO: 15234781 NR Description: peptidylprolyl isomerase ROC1
FIIHNKPLLQSDRDLTFQTTRMAFPKVYFDMTIDGQPAGRIVMELYTDKTPRTAENFRALCTGEKGVGGTGKPLHFKGSKFHRVIPNFMCQGGDFTAGNGTGGESIYGSKFEDENFERKHTGPGILSMANAGANTNGSQFFICTVKTDWLDGKHVVFGQVVEGLDVVKAIEKVGSSSGKPTKPVVVADCGQLS

SEQ ID NO: 37482 - protein, 172 aa, Arabidopsis thaliana
  peptide (1)..(172): Ceres Seq. ID no. 12348625
  misc_feature (1)..(171): Homolog of NCBI NO: 11270320 NR Description: peptidylprolyl isomerase (EC 5.2.1.8) vcCyP
  misc_feature (4)..(172): Homolog of NCBI NO: 15227259 NR Description: cytosolic cyclophilin (ROC3)
  misc_feature (4)..(172): Homolog of NCBI NO: 21886603 NR Description: peptidylprolyl isomerase (cyclophilin) [Betula
  misc_feature (2)..(172): Homolog of NCBI NO: 18076088 NR Description: cyclophilin [Ricinus communis]
  misc_feature (1)..(171): Homolog of NCBI NO: 11270316 NR Description: peptidylprolyl isomerase (EC 5.2.1.8)
  misc_feature (1)..(172): Homolog of NCBI NO: 18146786 NR Description: CYP1 [Vigna radiata]
  misc_feature (1)..(172): Homolog of NCBI NO: 1076510 NR Description: peptidylprolyl isomerase (EC 5.2.1.8) Cyp -
  misc_feature (4)..(172): Homolog of NCBI NO: 15226467 NR Description: cyclophilin (CYP2)
  misc_feature (4)..(172): Homolog of NCBI NO: 11270324 NR Description: peptidylprolyl isomerase (EC 5.2.1.8) CYP2
  misc_feature (1)..(172): Homolog of NCBI NO: 15234781 NR Description: peptidylprolyl isomerase ROC1
MAFPKVYFDMTIDGQPAGRIVMELYTDKTPRTAENFRALCTGEKGVGGTGKPLHFKGSKFHRVIPNFMCQGGDFTAGNGTGGESIYGSKFEDENFERKHTGPGILSMANAGANTNGSQFFICTVKTDWLDGKHVVFGQVVEGLDVVKAIEKVGSSSGKPTKPVVVADCGQLS

SEQ ID NO: 37483 - protein, 163 aa, Arabidopsis thaliana
  peptide (1)..(163): Ceres Seq. ID no. 12348626
  misc_feature (1)..(162): Homolog of NCBI NO: 11270320 NR Description: peptidylprolyl isomerase (EC 5.2.1.8) vcCyP
  misc_feature (1)..(163): Homolog of NCBI NO: 15227259 NR Description: cytosolic cyclophilin (ROC3)
  misc_feature (1)..(163): Homolog of NCBI NO: 21886603 NR Description: peptidylprolyl isomerase (cyclophilin) [Betula
  misc_feature (1)..(163): Homolog of NCBI NO: 18076088 NR Description: cyclophilin [Ricinus communis]
  misc_feature (1)..(162): Homolog of NCBI NO: 11270316 NR Description: peptidylprolyl isomerase (EC 5.2.1.8)
  misc_feature (1)..(163): Homolog of NCBI NO: 18146786 NR Description: CYP1 [Vigna radiata]
  misc_feature (1)..(163): Homolog of NCBI NO: 1076510 NR Description: peptidylprolyl isomerase (EC 5.2.1.8) Cyp -
  misc_feature (1)..(163): Homolog of NCBI NO: 15226467 NR Description: cyclophilin (CYP2)
  misc_feature (1)..(163): Homolog of NCBI NO: 11270324 NR Description: peptidylprolyl isomerase (EC 5.2.1.8) CYP2
  misc_feature (1)..(163): Homolog of NCBI NO: 15234781 NR Description: peptidylprolyl isomerase ROC1
MTIDGQPAGRIVMELYTDKTPRTAENFRALCTGEKGVGGTGKPLHFKGSKFHRVIPNFMCQGGDFTAGNGTGGESIYGSKFEDENFERKHTGPGILSMANAGANTNGSQFFICTVKTDWLDGKHVVFGQVVEGLDVVKAIEKVGSSSGKPTKPVVVADCGQLS

SEQ ID NO: 37484 - DNA, 1949 bp, Arabidopsis thaliana
  misc_feature (1)..(1949): Ceres Seq. ID no. 12335366
  misc_feature: MA Experiment ID: 108461 Result: Up-regulated in Transcription
  misc_feature: MA Experiment 108461 PARAMETER Experiment Name: At_Germinating_Seeds_cDNA_P Parameter: Age (day) Value: 1 vs. 0
  misc_feature: MA Experiment 108461 PARAMETER Experiment Name: At_Germinating_Seeds_cDNA_P Parameter: Tissue Value: Germinating Seeds
  misc_feature: MA Experiment ID: 108462 Result: Up-regulated in Transcription
  misc_feature: MA Experiment 108462 PARAMETER Experiment Name: At_Germinating_Seeds_cDNA_P Parameter: Age (day) Value: 2 vs. 0
  misc_feature: MA Experiment 108462 PARAMETER Experiment Name: At_Germinating_Seeds_cDNA_P Parameter: Tissue Value: Germinating Seeds
  misc_feature: MA Experiment ID: 108463 Result: Up-regulated in Transcription
  misc_feature: MA Experiment 108463 PARAMETER Experiment Name: At_Germinating_Seeds_cDNA_P Parameter: Age (day) Value: 3 vs. 0
  misc_feature: MA Experiment 108463 PARAMETER Experiment Name: At_Germinating_Seeds_cDNA_P Parameter: Tissue Value: Germinating Seeds
  misc_feature: MA Experiment ID: 108464 Result: Up-regulated in Transcription
  misc_feature: MA Experiment 108464 PARAMETER Experiment Name: At_Germinating_Seeds_cDNA_P Parameter: Age (day) Value: 4 vs. 0
  misc_feature: MA Experiment 108464 PARAMETER Experiment Name: At_Germinating_Seeds_cDNA_P Parameter: Tissue Value: Germinating Seeds
  misc_feature: MA Experiment ID: 108561 Result: Down-regulated in Transcription
  misc_feature: MA Experiment 108561 PARAMETER Experiment Name: At_100uM_ABA_cDNA_P Parameter: Timepoint (hr) Value: 6
  misc_feature: MA Experiment 108561 PARAMETER Experiment Name: At_100uM_ABA_cDNA_P Parameter: Tissue Value: Aerial
  misc_feature: MA Experiment 108561 PARAMETER Experiment Name: At_100uM_ABA_cDNA_P Parameter: Treatment Value: 100uM ABA vs. No Treatment
  misc_feature: MA Experiment ID: 108569 Result: Up-regulated in Transcription
  misc_feature: MA Experiment 108569 PARAMETER Experiment Name: At_0.001%_MeJA__cDNA_P Parameter: Timepoint (hr) Value: 6
  misc_feature: MA Experiment 108569 PARAMETER Experiment Name: At_0.001%_MeJA__cDNA_P Parameter: Tissue Value: Aerial
  misc_feature: MA Experiment 108569 PARAMETER Experiment Name: At_0.001%_MeJA__cDNA_P Parameter: Treatment Value: 0.001% MeJA vs. No Treatment
  misc_feature: MA Experiment ID: 108594 Result: Up-regulated in Transcription
  misc_feature: MA Experiment 108594 PARAMETER Experiment Name: At_Ler-rhl_Root_cDNA_P Parameter: Plant Line Value: null
  misc_feature: MA Experiment ID: 108595 Result: Up-regulated in Transcription
  misc_feature: MA Experiment 108595 PARAMETER Experiment Name: At_Ler-pi_Ovule_cDNA_P Parameter: Plant Line Value: null
  misc_feature: MA Experiment ID: 108607 Result: Down-regulated in Transcription
  misc_feature: MA Experiment 108607 PARAMETER Experiment Name: At_100uM_ABA_cDNA_P Parameter: Timepoint (hr) Value: 4
  misc_feature: MA Experiment 108607 PARAMETER Experiment Name: At_100uM_ABA_cDNA_P Parameter: Tissue Value: Aerial
  misc_feature: MA Experiment 108607 PARAMETER Experiment Name: At_100uM_ABA_cDNA_P Parameter: Treatment Value: 100uM ABA vs. No Treatment
  misc_feature: MA Experiment ID: 20000069 Result: Down-regulated in Transcription
  misc_feature: MA Experiment 20000069 PARAMETER Experiment Name: At_100uM_ABA_Mutants_cDNA_P Parameter: Plant Line Value: CS23
  misc_feature: MA Experiment 20000069 PARAMETER Experiment Name: At_100uM_ABA_Mutants_cDNA_P Parameter: Timepoint (hr) Value: 6
  misc_feature: MA Experiment 20000069 PARAMETER Experiment Name: At_100uM_ABA_Mutants_cDNA_P Parameter: Tissue Value: Aerial
  misc_feature: MA Experiment 20000069 PARAMETER Experiment Name: At_100uM_ABA_Mutants_cDNA_P Parameter: Treatment Value: 100uM ABA vs. No Treatment
  misc_feature: MA Experiment ID: 20000070 Result: Down-regulated in Transcription
  misc_feature: MA Experiment 20000070 PARAMETER Experiment Name: At_100uM_ABA_Mutants_cDNA_P Parameter: Plant Line Value: CS24
  misc_feature: MA Experiment 20000070 PARAMETER Experiment Name: At_100uM_ABA_Mutants_cDNA_P Parameter: Timepoint (hr) Value: 6
  misc_feature: MA Experiment 20000070 PARAMETER Experiment Name: At_100uM_ABA_Mutants_cDNA_P Parameter: Tissue Value: Aerial
  misc_feature: MA Experiment 20000070 PARAMETER Experiment Name: At_100uM_ABA_Mutants_cDNA_P Parameter: Treatment Value: 100uM ABA vs. No Treatment
  misc_feature: MA Experiment ID: 20000071 Result: Down-regulated in Transcription
  misc_feature: MA Experiment 20000071 PARAMETER Experiment Name: At_100uM_ABA_Mutants_cDNA_P Parameter: Plant Line Value: CS8104
  misc_feature: MA Experiment 20000071 PARAMETER Experiment Name: At_100uM_ABA_Mutants_cDNA_P Parameter: Timepoint (hr) Value: 6
  misc_feature: MA Experiment 20000071 PARAMETER Experiment Name: At_100uM_ABA_Mutants_cDNA_P Parameter: Tissue Value: Aerial
  misc_feature: MA Experiment 20000071 PARAMETER Experiment Name: At_100uM_ABA_Mutants_cDNA_P Parameter: Treatment Value: 100uM ABA vs. No Treatment
  misc_feature: MA Experiment ID: 20000072 Result: Down-regulated in Transcription
  misc_feature: MA Experiment 20000072 PARAMETER Experiment Name: At_100uM_ABA_Mutants_cDNA_P Parameter: Plant Line Value: CS8105
  misc_feature: MA Experiment 20000072 PARAMETER Experiment Name: At_100uM_ABA_Mutants_cDNA_P Parameter: Timepoint (hr) Value: 6
  misc_feature: MA Experiment 20000072 PARAMETER Experiment Name: At_100uM_ABA_Mutants_cDNA_P Parameter: Tissue Value: Aerial
  misc_feature: MA Experiment 20000072 PARAMETER Experiment Name: At_100uM_ABA_Mutants_cDNA_P Parameter: Treatment Value: 100uM ABA vs. No Treatment
  misc_feature: MA Experiment ID: 20000087 Result: Down-regulated in Transcription
  misc_feature: MA Experiment 20000087 PARAMETER Experiment Name: At_100uM_ABA_Mutants_cDNA_P Parameter: Plant Line Value: WS
  misc_feature: MA Experiment 20000087 PARAMETER Experiment Name: At_100uM_ABA_Mutants_cDNA_P Parameter: Timepoint (hr) Value: 6
  misc_feature: MA Experiment 20000087 PARAMETER Experiment Name: At_100uM_ABA_Mutants_cDNA_P Parameter: Tissue Value: Aerial
  misc_feature: MA Experiment 20000087 PARAMETER Experiment Name: At_100uM_ABA_Mutants_cDNA_P Parameter: Treatment Value: 100uM ABA vs. No Treatment
  misc_feature: MA Experiment ID: 20000111 Result: Down-regulated in Transcription
  misc_feature: MA Experiment 20000111 PARAMETER Experiment Name: At_42deg_Heat_cDNA_P Parameter: Temperature (deg C) Value: 42 vs. 22
  misc_feature: MA Experiment 20000111 PARAMETER Experiment Name: At_42deg_Heat_cDNA_P Parameter: Timepoint (hr) Value: 6
  misc_feature: MA Experiment 20000111 PARAMETER Experiment Name: At_42deg_Heat_cDNA_P Parameter: Tissue Value: Aerial
  misc_feature: MA Experiment ID: 20000112 Result: Down-regulated in Transcription
  misc_feature: MA Experiment 20000112 PARAMETER Experiment Name: At_42deg_Heat_cDNA_P Parameter: Temperature (deg C) Value: 42 vs. 22
  misc_feature: MA Experiment 20000112 PARAMETER Experiment Name: At_42deg_Heat_cDNA_P Parameter: Timepoint (hr) Value: 2
  misc_feature: MA Experiment 20000112 PARAMETER Experiment Name: At_42deg_Heat_cDNA_P Parameter: Tissue Value: Aerial
  misc_feature: MA Experiment ID: 20000113 Result: Down-regulated in Transcription
  misc_feature: MA Experiment 20000113 PARAMETER Experiment Name: At_42deg_Heat_cDNA_P Parameter: Temperature (deg C) Value: 42 vs. 22
  misc_feature: MA Experiment 20000113 PARAMETER Experiment Name: At_42deg_Heat_cDNA_P Parameter: Timepoint (hr) Value: 8
  misc_feature: MA Experiment 20000113 PARAMETER Experiment Name: At_42deg_Heat_cDNA_P Parameter: Tissue Value: Aerial
  misc_feature: MA Experiment ID: 20000117 Result: Down-regulated in Transcription
  misc_feature: MA Experiment 20000117 PARAMETER Experiment Name: At_100uM_ABA_Mutants_cDNA_P Parameter: Plant Line Value: Columbia
  misc_feature: MA Experiment 20000117 PARAMETER Experiment Name: At_100uM_ABA_Mutants_cDNA_P Parameter: Timepoint (hr) Value: 6
  misc_feature: MA Experiment 20000117 PARAMETER Experiment Name: At_100uM_ABA_Mutants_cDNA_P Parameter: Tissue Value: Aerial
  misc_feature: MA Experiment 20000117 PARAMETER Experiment Name: At_100uM_ABA_Mutants_cDNA_P Parameter: Treatment Value: 100uM ABA vs. No Treatment
  misc_feature: MA Experiment ID: 20000144 Result: Down-regulated in Transcription
  misc_feature: MA Experiment 20000144 PARAMETER Experiment Name: At_42deg_Heat_cDNA_P Parameter: Temperature (deg C) Value: 42 vs. 22
  misc_feature: MA Experiment 20000144 PARAMETER Experiment Name: At_42deg_Heat_cDNA_P Parameter: Timepoint (hr) Value: 1
  misc_feature: MA Experiment 20000144 PARAMETER Experiment Name: At_42deg_Heat_cDNA_P Parameter: Tissue Value: Aerial
  misc_feature: MA Experiment ID: 20000169 Result: Down-regulated in Transcription
  misc_feature: MA Experiment 20000169 PARAMETER Experiment Name: At_100uM_ABA_P Parameter: Age (day) Value: 14
  misc_feature: MA Experiment 20000169 PARAMETER Experiment Name: At_100uM_ABA_P Parameter: Organism Value: A. thaliana
  misc_feature: MA Experiment 20000169 PARAMETER Experiment Name: At_100uM_ABA_P Parameter: Plant Line Value: WS
  misc_feature: MA Experiment 20000169 PARAMETER Experiment Name: At_100uM_ABA_P Parameter: Timepoint (hr) Value: 6
  misc_feature: MA Experiment 20000169 PARAMETER Experiment Name: At_100uM_ABA_P Parameter: Tissue Value: Aerial
  misc_feature: MA Experiment 20000169 PARAMETER Experiment Name: At_100uM_ABA_P Parameter: Treatment Value: 100uM ABA vs. No Treatment
  misc_feature: MA Experiment ID: 20000171 Result: Down-regulated in Transcription
  misc_feature: MA Experiment 20000171 PARAMETER Experiment Name: At_42deg_Heat_P Parameter: Age (day) Value: 14
  misc_feature: MA Experiment 20000171 PARAMETER Experiment Name: At_42deg_Heat_P Parameter: Organism Value: A. thaliana
  misc_feature: MA Experiment 20000171 PARAMETER Experiment Name: At_42deg_Heat_P Parameter: Plant Line Value: WS
  misc_feature: MA Experiment 20000171 PARAMETER Experiment Name: At_42deg_Heat_P Parameter: Temperature (deg C) Value: 42 vs. 22
  misc_feature: MA Experiment 20000171 PARAMETER Experiment Name: At_42deg_Heat_P Parameter: Timepoint (hr) Value: 1
  misc_feature: MA Experiment 20000171 PARAMETER Experiment Name: At_42deg_Heat_P Parameter: Tissue Value: Aerial
  misc_feature: MA Experiment ID: 20000179 Result: Up-regulated in Transcription
  misc_feature: MA Experiment 20000179 PARAMETER Experiment Name: At_Germinating_Seeds_P Parameter: Age (hr) Value: 6 vs. 0
  misc_feature: MA Experiment 20000179 PARAMETER Experiment Name: At_Germinating_Seeds_P Parameter: Tissue Value: Germinating Seeds
  misc_feature: MA Experiment ID: 20000180 Result: Up-regulated in Transcription
  misc_feature: MA Experiment 20000180 PARAMETER Experiment Name: At_Germinating_Seeds_P Parameter: Age (hr) Value: 24 vs. 0
  misc_feature: MA Experiment 20000180 PARAMETER Experiment Name: At_Germinating_Seeds_P Parameter: Tissue Value: Germinating Seeds
  misc_feature: MA Experiment ID: 20000227 Result: Up-regulated in Transcription
  misc_feature: MA Experiment 20000227 PARAMETER Experiment Name: At_Root-Tips-vs-Tops_P Parameter: Tissue Value: Root Tips vs. Root Tops
  misc_feature: MA Experiment ID: 20000437 Result: Down-regulated in Transcription
  misc_feature: MA Experiment 20000437 PARAMETER Experiment Name: At_Drought_P Parameter: Age (day) Value: 8
  misc_feature: MA Experiment 20000437 PARAMETER Experiment Name: At_Drought_P Parameter: Organism Value: A. thaliana
  misc_feature: MA Experiment 20000437 PARAMETER Experiment Name: At_Drought_P Parameter: Plant Line Value: WS
  misc_feature: MA Experiment 20000437 PARAMETER Experiment Name: At_Drought_P Parameter: Timepoint (hr) Value: 24
  misc_feature: MA Experiment 20000437 PARAMETER Experiment Name: At_Drought_P Parameter: Tissue Value: Whole Plant
  misc_feature: MA Experiment 20000437 PARAMETER Experiment Name: At_Drought_P Parameter: Treatment Value: Drought vs. No Drought
  misc_feature: MA Experiment ID: 20000439 Result: Down-regulated in Transcription
  misc_feature: MA Experiment 20000439 PARAMETER Experiment Name: At_Roots__P Parameter: Age (day) Value: 14 vs. 21
  misc_feature: MA Experiment 20000439 PARAMETER Experiment Name: At_Roots__P Parameter: Organism Value: A. thaliana
  misc_feature: MA Experiment 20000439 PARAMETER Experiment Name: At_Roots__P Parameter: Tissue Value: Roots vs. Whole Plant
  misc_feature: MA Experiment ID: 20001555 Result: Down-regulated in Transcription
  misc_feature: MA Experiment 20001555 PARAMETER Experiment Name: At_Drought_Soil_Dry_P Parameter: Age (day) Value: 24
  misc_feature: MA Experiment 20001555 PARAMETER Experiment Name: At_Drought_Soil_Dry_P Parameter: Organism Value: A. thaliana
  misc_feature: MA Experiment 20001555 PARAMETER Experiment Name: At_Drought_Soil_Dry_P Parameter: Plant Line Value: WS
  misc_feature: MA Experiment 20001555 PARAMETER Experiment Name: At_Drought_Soil_Dry_P Parameter: Post Timepoint (hr) Value: None
  misc_feature: MA Experiment 20001555 PARAMETER Experiment Name: At_Drought_Soil_Dry_P Parameter: Post-Treatment Value: None
  misc_feature: MA Experiment 20001555 PARAMETER Experiment Name: At_Drought_Soil_Dry_P Parameter: Timepoint (day) Value: 10
  misc_feature: MA Experiment 20001555 PARAMETER Experiment Name: At_Drought_Soil_Dry_P Parameter: Treatment Value: Drought vs. No Drought
  misc_feature: MA Experiment ID: 20001559 Result: Down-regulated in Transcription
  misc_feature: MA Experiment 20001559 PARAMETER Experiment Name: At_Drought_Soil_Dry_P Parameter: Age (day) Value: 28
  misc_feature: MA Experiment 20001559 PARAMETER Experiment Name: At_Drought_Soil_Dry_P Parameter: Organism Value: A. thaliana
  misc_feature: MA Experiment 20001559 PARAMETER Experiment Name: At_Drought_Soil_Dry_P Parameter: Plant Line Value: WS
  misc_feature: MA Experiment 20001559 PARAMETER Experiment Name: At_Drought_Soil_Dry_P Parameter: Post Timepoint (hr) Value: 29
  misc_feature: MA Experiment 20001559 PARAMETER Experiment Name: At_Drought_Soil_Dry_P Parameter: Post-Treatment Value: Re-Water vs. No Drought
  misc_feature: MA Experiment 20001559 PARAMETER Experiment Name: At_Drought_Soil_Dry_P Parameter: Timepoint (day) Value: 14
  misc_feature: MA Experiment 20001559 PARAMETER Experiment Name: At_Drought_Soil_Dry_P Parameter: Treatment Value: Drought vs. No Drought
  misc_feature: MA Experiment ID: 20001757 Result: Up-regulated in Transcription
  misc_feature: MA Experiment 20001757 PARAMETER Experiment Name: At_50mM_NH4NO3_L-to-H_P Parameter: Timepoint (hr) Value: 6
  misc_feature: MA Experiment 20001757 PARAMETER Experiment Name: At_50mM_NH4NO3_L-to-H_P Parameter: Tissue Value: Leaf
  misc_feature: MA Experiment 20001757 PARAMETER Experiment Name: At_50mM_NH4NO3_L-to-H_P Parameter: Treatment Value: 50mM NH4NO3 vs 100mM Mannitol
  misc_feature: MA Experiment ID: 20001904 Result: Down-regulated in Transcription
  misc_feature: MA Experiment 20001904 PARAMETER Experiment Name: At_Drought_Reproduction_P Parameter: Age (day) Value: 37
  misc_feature: MA Experiment 20001904 PARAMETER Experiment Name: At_Drought_Reproduction_P Parameter: Organism Value: A. thaliana
  misc_feature: MA Experiment 20001904 PARAMETER Experiment Name: At_Drought_Reproduction_P Parameter: Plant Line Value: WS
  misc_feature: MA Experiment 20001904 PARAMETER Experiment Name: At_Drought_Reproduction_P Parameter: Timepoint (day) Value: 7
  misc_feature: MA Experiment 20001904 PARAMETER Experiment Name: At_Drought_Reproduction_P Parameter: Tissue Value: Rosettes
  misc_feature: MA Experiment 20001904 PARAMETER Experiment Name: At_Drought_Reproduction_P Parameter: Treatment Value: Drought vs. No Drought
  misc_feature: MA Experiment ID: 20001905 Result: Down-regulated in Transcription
  misc_feature: MA Experiment 20001905 PARAMETER Experiment Name: At_Drought_Reproduction_P Parameter: Age (day) Value: 40
  misc_feature: MA Experiment 20001905 PARAMETER Experiment Name: At_Drought_Reproduction_P Parameter: Organism Value: A. thaliana
  misc_feature: MA Experiment 20001905 PARAMETER Experiment Name: At_Drought_Reproduction_P Parameter: Plant Line Value: WS
  misc_feature: MA Experiment 20001905 PARAMETER Experiment Name: At_Drought_Reproduction_P Parameter: Timepoint (day) Value: 10
  misc_feature: MA Experiment 20001905 PARAMETER Experiment Name: At_Drought_Reproduction_P Parameter: Tissue Value: Rosettes
  misc_feature: MA Experiment 20001905 PARAMETER Experiment Name: At_Drought_Reproduction_P Parameter: Treatment Value: Drought vs. No Drought
  misc_feature: MA Experiment ID: 20001906 Result: Down-regulated in Transcription
  misc_feature: MA Experiment 20001906 PARAMETER Experiment Name: At_Drought_Reproduction_P Parameter: Age (day) Value: 35
  misc_feature: MA Experiment 20001906 PARAMETER Experiment Name: At_Drought_Reproduction_P Parameter: Organism Value: A. thaliana
  misc_feature: MA Experiment 20001906 PARAMETER Experiment Name: At_Drought_Reproduction_P Parameter: Plant Line Value: WS
  misc_feature: MA Experiment 20001906 PARAMETER Experiment Name: At_Drought_Reproduction_P Parameter: Timepoint (day) Value: 5
  misc_feature: MA Experiment 20001906 PARAMETER Experiment Name: At_Drought_Reproduction_P Parameter: Tissue Value: Siliques
  misc_feature: MA Experiment 20001906 PARAMETER Experiment Name: At_Drought_Reproduction_P Parameter: Treatment Value: Drought vs. No Drought
  misc_feature: MA Experiment ID: 20001908 Result: Down-regulated in Transcription
  misc_feature: MA Experiment 20001908 PARAMETER Experiment Name: At_Drought_Reproduction_P Parameter: Age (day) Value: 40
  misc_feature: MA Experiment 20001908 PARAMETER Experiment Name: At_Drought_Reproduction_P Parameter: Organism Value: A. thaliana
  misc_feature: MA Experiment 20001908 PARAMETER Experiment Name: At_Drought_Reproduction_P Parameter: Plant Line Value: WS
  misc_feature: MA Experiment 20001908 PARAMETER Experiment Name: At_Drought_Reproduction_P Parameter: Timepoint (day) Value: 10
  misc_feature: MA Experiment 20001908 PARAMETER Experiment Name: At_Drought_Reproduction_P Parameter: Tissue Value: Siliques
  misc_feature: MA Experiment 20001908 PARAMETER Experiment Name: At_Drought_Reproduction_P Parameter: Treatment Value: Drought vs. No Drought
aatcttagtaataatcccaaaaaccagaaaaaaaggagctttgcttttgtaggaattaatggattcagtgaactccttcaaaggatatggaaaagtagacgaagctcaagatttagcattgaagaaaaagacaagaaaacgtctacttctactatccatctccgtcgtagttctcatcgccgtaataatcgccgccgtagtcgccaccgtcgttcacaagaacaaaaacgagtcaacaccgagtccacctcccgagttaacaccatccacttcactcaaagccatttgcagtgtaactcgtttccctgaatcttgcatttcaagtatctcaaagcttccatcttccaacacaacagatccagagactctattcaagctctcattgaaagtaatcatcgatgagcttgattcgatttccgatttaccggagaagctatcgaaagagactgaagacgaaagaatcaaatctgcgttaagggtttgtggagatctgatcgaagatgctttagatcgactcaacgacactgtttccgccattgatgacgaagaaaagaagaaaactttgtcatcttccaaaatcgaagatctcaaaacttggctaagcgcaacggtaacagatcacgagacgtgtttcgattcgttagatgagttgaaacagaacaaaacagagtatgcgaactcgacgattactcagaatctgaaatcggcaatgagtagatcaacggagttcacaagtaacagtcttgcaatagtatcgaagattctttctgcgttaagcgatttggggattccgatacacaggagaagaagactgatgagtcatcatcatcagcaaagtgtggattttgagaaatgggcacgacggaggttgttgcaaacggcaggtttaaagcctgatgtgacggtggcgggtgatggaaccggtgatgtgttgactgtgaatgaagcggtggctaaggtgccgaagaagagtttgaagatgtttgtgatttatgtgaagagtggaacttatgttgagaatgttgtgatggataagagtaaatggaacgttatgatttacggtgacggcaaagggaagaccattatttccggcagcaagaacttcgtcgacgggactcctacttacgaaacggcgacgtttgctatacaaggcaaaggatttataatgaaggatattggaatcataaacaccgcgggagcagcaaaacaccaagctgtggcattccgatcaggctctgatttctcagtctattaccaatgctcattcgatggttttcaagacactctttaccctcactccaaccgccaattctaccgtgactgcgacgttactgggacaatcgacttcattttcggaagtgctgcggtcgttttccaaggctgcaaaatcatgcctcgccagcctctttctaaccaattcaacaccataaccgctcagggcaaaaaagatccgaaccaaagctcggggatgtcgattcaacgatgcactatctccgcaaacggcaatgtgattgctcccacgtatcttggccggccgtggaaggagttttccacgacggttattatggagacggtgattggagcagtggttcgaccgtccgggtggatgtcatgggtttctggagttgatccaccagcaagtattgtctacggagagtataagaatacgggcccgggttcagatgtaacgcagagagttaaatgggctggatataaaccggttatgtcggacgccgaggctgcgaagtttacagtggctacgcttttacacggagctgattggataccggcaacaggagtgatcaatcagctatcttaatatagtgacaatacaattggattcgtagcttgtttttgaaaacatccggttgtgatctactttatatttgtttgacacttatgcatgatctgtaattttttccaacatagttgtattttgtgtatcccct

SEQ ID NO: 37485 - protein, 586 aa, Arabidopsis thaliana
  peptide (1)..(586): Ceres Seq. ID no. 12335367
  misc_feature (280)..(574): Pfam Name: Pectinesterase Pfam Description: Pectinesterase
  misc_feature (14)..(581): Homolog of NCBI NO: 15238729 NR Description: pectinesterase
  misc_feature (22)..(581): Homolog of NCBI NO: 26451784 NR Description: putative pectinesterase [Arabidopsis thaliana]
  misc_feature (22)..(581): Homolog of NCBI NO: 15230019 NR Description: putative pectinesterase; protein id: At3g05610.1
  misc_feature (24)..(586): Homolog of NCBI NO: 15241079 NR Description: pectin methyl-esterase - like protein; protein
  misc_feature (15)..(581): Homolog of NCBI NO: 28393771 NR Description: unknown protein [Arabidopsis thaliana]
  misc_feature (15)..(581): Homolog of NCBI NO: 15238377 NR Description: pectinesterase family; protein id: At5g04960.1
  misc_feature (46)..(577): Homolog of NCBI NO: 15231826 NR Description: putative pectin methylesterase; protein id:
  misc_feature (1)..(581): Homolog of NCBI NO: 6093739 NR Description: Pectinesterase 3 precursor (Pectin methylesterase
  misc_feature (1)..(586): Homolog of NCBI NO: 21593683 NR Description: pectinesterase, putative [Arabidopsis thaliana]
  misc_feature (1)..(586): Homolog of NCBI NO: 15220958 NR Description: pectinesterase family
MDSVNSFKGYGKVDEAQDLALKKKTRKRLLLLSISVVVLIAVIIAAVVATVVHKNKNESTPSPPPELTPSTSLKAICSVTRFPESCISSISKLPSSNTTDPETLFKLSLKVIIDELDSISDLPEKLSKETEDERIKSALRVCGDLIEDALDRLNDTVSAIDDEEKKKTLSSSKIEDLKTWLSATVTDHETCFDSLDELKQNKTEYANSTITQNLKSAMSRSTEFTSNSLAIVSKILSALSDLGIPIHRRRRLMSHHHQQSVDFEKWARRRLLQTAGLKPDVTVAGDGTGDVLTVNEAVAKVPKKSLKMFVIYVKSGTYVENVVMDKSKWNVMIYGDGKGKTIISGSKNFVDGTPTYETATFAIQGKGFIMKDIGIINTAGAAKHQAVAFRSGSDFSVYYQCSFDGFQDTLYPHSNRQFYRDCDVTGTIDFIFGSAAVVFQGCKIMPRQPLSNQFNTITAQGKKDPNQSSGMSIQRCTISANGNVIAPTYLGRPWKEFSTTVIMETVIGAVVRPSGWMSWVSGVDPPASIVYGEYKNTGPGSDVTQRVKWAGYKPVMSDAEAAKFTVATLLHGADWIPATGVINQLS

SEQ ID NO: 37486 - protein, 369 aa, Arabidopsis thaliana
  peptide (1)..(369): Ceres Seq. ID no. 12335368
  misc_feature (63)..(357): Pfam Name: Pectinesterase Pfam Description: Pectinesterase
  misc_feature (1)..(364): Homolog of NCBI NO: 15238729 NR Description: pectinesterase
  misc_feature (1)..(364): Homolog of NCBI NO: 26451784 NR Description: putative pectinesterase [Arabidopsis thaliana]
  misc_feature (1)..(364): Homolog of NCBI NO: 15230019 NR Description: putative pectinesterase; protein id: At3g05610.1
  misc_feature (1)..(369): Homolog of NCBI NO: 15241079 NR Description: pectin methyl-esterase - like protein; protein
  misc_feature (1)..(364): Homolog of NCBI NO: 28393771 NR Description: unknown protein [Arabidopsis thaliana]
  misc_feature (1)..(364): Homolog of NCBI NO: 15238377 NR Description: pectinesterase family; protein id: At5g04960.1
  misc_feature (1)..(360): Homolog of NCBI NO: 15231826 NR Description: putative pectin methylesterase; protein id:
  misc_feature (1)..(364): Homolog of NCBI NO: 6093739 NR Description: Pectinesterase 3 precursor (Pectin methylesterase
  misc_feature (1)..(369): Homolog of NCBI NO: 21593683 NR Description: pectinesterase, putative [Arabidopsis thaliana]
  misc_feature (1)..(369): Homolog of NCBI NO: 15220958 NR Description: pectinesterase family
MSRSTEFTSNSLAIVSKILSALSDLGIPIHRRRRLMSHHHQQSVDFEKWARRRLLQTAGLKPDVTVAGDGTGDVLTVNEAVAKVPKKSLKMFVIYVKSGTYVENVVMDKSKWNVMIYGDGKGKTIISGSKNFVDGTPTYETATFAIQGKGFIMKDIGIINTAGAAKHQAVAFRSGSDFSVYYQCSFDGFQDTLYPHSNRQFYRDCDVTGTIDFIFGSAAVVFQGCKIMPRQPLSNQFNTITAQGKKDPNQSSGMSIQRCTISANGNVIAPTYLGRPWKEFSTTVIMETVIGAVVRPSGWMSWVSGVDPPASIVYGEYKNTGPGSDVTQRVKWAGYKPVMSDAEAAKFTVATLLHGADWIPATGVINQLS

SEQ ID NO: 37487 - protein, 334 aa, Arabidopsis thaliana
  peptide (1)..(334): Ceres Seq. ID no. 12335369
  misc_feature (28)..(322): Pfam Name: Pectinesterase Pfam Description: Pectinesterase
  misc_feature (1)..(329): Homolog of NCBI NO: 15238729 NR Description: pectinesterase
  misc_feature (1)..(329): Homolog of NCBI NO: 26451784 NR Description: putative pectinesterase [Arabidopsis thaliana]
  misc_feature (1)..(329): Homolog of NCBI NO: 15230019 NR Description: putative pectinesterase; protein id: At3g05610.1
  misc_feature (1)..(334): Homolog of NCBI NO: 15241079 NR Description: pectin methyl-esterase - like protein; protein
  misc_feature (1)..(329): Homolog of NCBI NO: 28393771 NR Description: unknown protein [Arabidopsis thaliana]
  misc_feature (1)..(329): Homolog of NCBI NO: 15238377 NR Description: pectinesterase family; protein id: At5g04960.1
  misc_feature (1)..(325): Homolog of NCBI NO: 15231826 NR Description: putative pectin methylesterase; protein id:
  misc_feature (1)..(329): Homolog of NCBI NO: 6093739 NR Description: Pectinesterase 3 precursor (Pectin methylesterase
  misc_feature (1)..(334): Homolog of NCBI NO: 21593683 NR Description: pectinesterase, putative [Arabidopsis thaliana]
  misc_feature (1)..(334): Homolog of NCBI NO: 15220958 NR Description: pectinesterase family
MSHHHQQSVDFEKWARRRLLQTAGLKPDVTVAGDGTGDVLTVNEAVAKVPKKSLKMFVIYVKSGTYVENVVMDKSKWNVMIYGDGKGKTIISGSKNFVDGTPTYETATFAIQGKGFIMKDIGIINTAGAAKHQAVAFRSGSDFSVYYQCSFDGFQDTLYPHSNRQFYRDCDVTGTIDFIFGSAAVVFQGCKIMPRQPLSNQFNTITAQGKKDPNQSSGMSIQRCTISANGNVIAPTYLGRPWKEFSTTVIMETVIGAVVRPSGWMSWVSGVDPPASIVYGEYKNTGPGSDVTQRVKWAGYKPVMSDAEAAKFTVATLLHGADWIPATGVINQLS

SEQ ID NO: 37488 - DNA, 1283 bp, Arabidopsis thaliana
  misc_feature (1)..(1283): Ceres Seq. ID no. 12335735
  misc_feature: MA Experiment ID: 108501 Result: Down-regulated in Transcription
  misc_feature: MA Experiment 108501 PARAMETER Experiment Name: At_ap2_floral_buds_cDNA_P Parameter: Plant Line Value: ap2 (Ler.)
  misc_feature: MA Experiment 108501 PARAMETER Experiment Name: At_ap2_floral_buds_cDNA_P Parameter: Tissue Value: Closed Flower
  misc_feature: MA Experiment ID: 108561 Result: Up-regulated in Transcription
  misc_feature: MA Experiment 108561 PARAMETER Experiment Name: At_100uM_ABA_cDNA_P Parameter: Timepoint (hr) Value: 6
  misc_feature: MA Experiment 108561 PARAMETER Experiment Name: At_100uM_ABA_cDNA_P Parameter: Tissue Value: Aerial
  misc_feature: MA Experiment 108561 PARAMETER Experiment Name: At_100uM_ABA_cDNA_P Parameter: Treatment Value: 100uM ABA vs. No Treatment
  misc_feature: MA Experiment ID: 108605 Result: Up-regulated in Transcription
  misc_feature: MA Experiment 108605 PARAMETER Experiment Name: At_100uM_ABA_cDNA_P Parameter: Timepoint (hr) Value: 6
  misc_feature: MA Experiment 108605 PARAMETER Experiment Name: At_100uM_ABA_cDNA_P Parameter: Tissue Value: Aerial
  misc_feature: MA Experiment 108605 PARAMETER Experiment Name: At_100uM_ABA_cDNA_P Parameter: Treatment Value: 100uM ABA vs. No Treatment
  misc_feature: MA Experiment ID: 108607 Result: Up-regulated in Transcription
  misc_feature: MA Experiment 108607 PARAMETER Experiment Name: At_100uM_ABA_cDNA_P Parameter: Timepoint (hr) Value: 4
  misc_feature: MA Experiment 108607 PARAMETER Experiment Name: At_100uM_ABA_cDNA_P Parameter: Tissue Value: Aerial
  misc_feature: MA Experiment 108607 PARAMETER Experiment Name: At_100uM_ABA_cDNA_P Parameter: Treatment Value: 100uM ABA vs. No Treatment
  misc_feature: MA Experiment ID: 108608 Result: Up-regulated in Transcription
  misc_feature: MA Experiment 108608 PARAMETER Experiment Name: At_100uM_ABA_cDNA_P Parameter: Timepoint (hr) Value: 1
  misc_feature: MA Experiment 108608 PARAMETER Experiment Name: At_100uM_ABA_cDNA_P Parameter: Tissue Value: Aerial
  misc_feature: MA Experiment 108608 PARAMETER Experiment Name: At_100uM_ABA_cDNA_P Parameter: Treatment Value: 100uM ABA vs. No Treatment
  misc_feature: MA Experiment ID: 108668 Result: Up-regulated in Transcription
  misc_feature: MA Experiment 108668 PARAMETER Experiment Name: At_2mM_SA_cDNA_P Parameter: Plant Line Value: WS
  misc_feature: MA Experiment 108668 PARAMETER Experiment Name: At_2mM_SA_cDNA_P Parameter: Timepoint (hr) Value: 6
  misc_feature: MA Experiment 108668 PARAMETER Experiment Name: At_2mM_SA_cDNA_P Parameter: Treatment Value: 2mM SA vs. No Treatment
  misc_feature: MA Experiment ID: 20000070 Result: Up-regulated in Transcription
  misc_feature: MA Experiment 20000070 PARAMETER Experiment Name: At_100uM_ABA_Mutants_cDNA_P Parameter: Plant Line Value: CS24
  misc_feature: MA Experiment 20000070 PARAMETER Experiment Name: At_100uM_ABA_Mutants_cDNA_P Parameter: Timepoint (hr) Value: 6
  misc_feature: MA Experiment 20000070 PARAMETER Experiment Name: At_100uM_ABA_Mutants_cDNA_P Parameter: Tissue Value: Aerial
  misc_feature: MA Experiment 20000070 PARAMETER Experiment Name: At_100uM_ABA_Mutants_cDNA_P Parameter: Treatment Value: 100uM ABA vs. No Treatment
  misc_feature: MA Experiment ID: 20000071 Result: Up-regulated in Transcription
  misc_feature: MA Experiment 20000071 PARAMETER Experiment Name: At_100uM_ABA_Mutants_cDNA_P Parameter: Plant Line Value: CS8104
  misc_feature: MA Experiment 20000071 PARAMETER Experiment Name: At_100uM_ABA_Mutants_cDNA_P Parameter: Timepoint (hr) Value: 6
  misc_feature: MA Experiment 20000071 PARAMETER Experiment Name: At_100uM_ABA_Mutants_cDNA_P Parameter: Tissue Value: Aerial
  misc_feature: MA Experiment 20000071 PARAMETER Experiment Name: At_100uM_ABA_Mutants_cDNA_P Parameter: Treatment Value: 100uM ABA vs. No Treatment
  misc_feature: MA Experiment ID: 20000072 Result: Up-regulated in Transcription
  misc_feature: MA Experiment 20000072 PARAMETER Experiment Name: At_100uM_ABA_Mutants_cDNA_P Parameter: Plant Line Value: CS8105
  misc_feature: MA Experiment 20000072 PARAMETER Experiment Name: At_100uM_ABA_Mutants_cDNA_P Parameter: Timepoint (hr) Value: 6
  misc_feature: MA Experiment 20000072 PARAMETER Experiment Name: At_100uM_ABA_Mutants_cDNA_P Parameter: Tissue Value: Aerial
  misc_feature: MA Experiment 20000072 PARAMETER Experiment Name: At_100uM_ABA_Mutants_cDNA_P Parameter: Treatment Value: 100uM ABA vs. No Treatment
  misc_feature: MA Experiment ID: 20000117 Result: Up-regulated in Transcription
  misc_feature: MA Experiment 20000117 PARAMETER Experiment Name: At_100uM_ABA_Mutants_cDNA_P Parameter: Plant Line Value: Columbia
  misc_feature: MA Experiment 20000117 PARAMETER Experiment Name: At_100uM_ABA_Mutants_cDNA_P Parameter: Timepoint (hr) Value: 6
  misc_feature: MA Experiment 20000117 PARAMETER Experiment Name: At_100uM_ABA_Mutants_cDNA_P Parameter: Tissue Value: Aerial
  misc_feature: MA Experiment 20000117 PARAMETER Experiment Name: At_100uM_ABA_Mutants_cDNA_P Parameter: Treatment Value: 100uM ABA vs. No Treatment
  misc_feature: MA Experiment ID: 20000169 Result: Up-regulated in Transcription
  misc_feature: MA Experiment 20000169 PARAMETER Experiment Name: At_100uM_ABA_P Parameter: Age (day) Value: 14
  misc_feature: MA Experiment 20000169 PARAMETER Experiment Name: At_100uM_ABA_P Parameter: Organism Value: A. thaliana
  misc_feature: MA Experiment 20000169 PARAMETER Experiment Name: At_100uM_ABA_P Parameter: Plant Line Value: WS
  misc_feature: MA Experiment 20000169 PARAMETER Experiment Name: At_100uM_ABA_P Parameter: Timepoint (hr) Value: 6
  misc_feature: MA Experiment 20000169 PARAMETER Experiment Name: At_100uM_ABA_P Parameter: Tissue Value: Aerial
  misc_feature: MA Experiment 20000169 PARAMETER Experiment Name: At_100uM_ABA_P Parameter: Treatment Value: 100uM ABA vs. No Treatment
  misc_feature: MA Experiment ID: 20000179 Result: Up-regulated in Transcription
  misc_feature: MA Experiment 20000179 PARAMETER Experiment Name: At_Germinating_Seeds_P Parameter: Age (hr) Value: 6 vs. 0
  misc_feature: MA Experiment 20000179 PARAMETER Experiment Name: At_Germinating_Seeds_P Parameter: Tissue Value: Germinating Seeds
  misc_feature: MA Experiment ID: 20000180 Result: Up-regulated in Transcription
  misc_feature: MA Experiment 20000180 PARAMETER Experiment Name: At_Germinating_Seeds_P Parameter: Age (hr) Value: 24 vs. 0
  misc_feature: MA Experiment 20000180 PARAMETER Experiment Name: At_Germinating_Seeds_P Parameter: Tissue Value: Germinating Seeds
  misc_feature: MA Experiment ID: 20000182 Result: Up-regulated in Transcription
  misc_feature: MA Experiment 20000182 PARAMETER Experiment Name: At_2mM_SA_P Parameter: Age (day) Value: 14
  misc_feature: MA Experiment 20000182 PARAMETER Experiment Name: At_2mM_SA_P Parameter: Organism Value: A. thaliana
  misc_feature: MA Experiment 20000182 PARAMETER Experiment Name: At_2mM_SA_P Parameter: Plant Line Value: WS
  misc_feature: MA Experiment 20000182 PARAMETER Experiment Name: At_2mM_SA_P Parameter: Timepoint (hr) Value: 6
  misc_feature: MA Experiment 20000182 PARAMETER Experiment Name: At_2mM_SA_P Parameter: Tissue Value: Aerial
  misc_feature: MA Experiment 20000182 PARAMETER Experiment Name: At_2mM_SA_P Parameter: Treatment Value: 2mM SA vs. No Treatment
  misc_feature: MA Experiment ID: 20000184 Result: Down-regulated in Transcription
  misc_feature: MA Experiment 20000184 PARAMETER Experiment Name: At_Shoots__P Parameter: Age (day) Value: 7
  misc_feature: MA Experiment 20000184 PARAMETER Experiment Name: At_Shoots__P Parameter: Tissue Value: Shoots vs. Whole Plant
  misc_feature: MA Experiment ID: 20000436 Result: Up-regulated in Transcription
  misc_feature: MA Experiment 20000436 PARAMETER Experiment Name: At_Drought_P Parameter: Age (day) Value: 7
  misc_feature: MA Experiment 20000436 PARAMETER Experiment Name: At_Drought_P Parameter: Organism Value: A. thaliana
  misc_feature: MA Experiment 20000436 PARAMETER Experiment Name: At_Drought_P Parameter: Plant Line Value: WS
  misc_feature: MA Experiment 20000436 PARAMETER Experiment Name: At_Drought_P Parameter: Timepoint (hr) Value: 12
  misc_feature: MA Experiment 20000436 PARAMETER Experiment Name: At_Drought_P Parameter: Tissue Value: Whole Plant
  misc_feature: MA Experiment 20000436 PARAMETER Experiment Name: At_Drought_P Parameter: Treatment Value: Drought vs. No Drought
  misc_feature: MA Experiment ID: 20000437 Result: Up-regulated in Transcription
  misc_feature: MA Experiment 20000437 PARAMETER Experiment Name: At_Drought_P Parameter: Age (day) Value: 8
  misc_feature: MA Experiment 20000437 PARAMETER Experiment Name: At_Drought_P Parameter: Organism Value: A. thaliana
  misc_feature: MA Experiment 20000437 PARAMETER Experiment Name: At_Drought_P Parameter: Plant Line Value: WS
  misc_feature: MA Experiment 20000437 PARAMETER Experiment Name: At_Drought_P Parameter: Timepoint (hr) Value: 24
  misc_feature: MA Experiment 20000437 PARAMETER Experiment Name: At_Drought_P Parameter: Tissue Value: Whole Plant
  misc_feature: MA Experiment 20000437 PARAMETER Experiment Name: At_Drought_P Parameter: Treatment Value: Drought vs. No Drought
  misc_feature: MA Experiment ID: 20000453 Result: Up-regulated in Transcription
  misc_feature: MA Experiment 20000453 PARAMETER Experiment Name: At_100uM_ABA_P Parameter: Age (day) Value: 15
  misc_feature: MA Experiment 20000453 PARAMETER Experiment Name: At_100uM_ABA_P Parameter: Organism Value: A. thaliana
  misc_feature: MA Experiment 20000453 PARAMETER Experiment Name: At_100uM_ABA_P Parameter: Plant Line Value: WS
  misc_feature: MA Experiment 20000453 PARAMETER Experiment Name: At_100uM_ABA_P Parameter: Timepoint (hr) Value: 24
  misc_feature: MA Experiment 20000453 PARAMETER Experiment Name: At_100uM_ABA_P Parameter: Tissue Value: Aerial
  misc_feature: MA Experiment 20000453 PARAMETER Experiment Name: At_100uM_ABA_P Parameter: Treatment Value: 100uM ABA vs. No Treatment
  misc_feature: MA Experiment ID: 20001556 Result: Up-regulated in Transcription
  misc_feature: MA Experiment 20001556 PARAMETER Experiment Name: At_Drought_Soil_Dry_P Parameter: Age (day) Value: 26
  misc_feature: MA Experiment 20001556 PARAMETER Experiment Name: At_Drought_Soil_Dry_P Parameter: Organism Value: A. thaliana
  misc_feature: MA Experiment 20001556 PARAMETER Experiment Name: At_Drought_Soil_Dry_P Parameter: Plant Line Value: WS
  misc_feature: MA Experiment 20001556 PARAMETER Experiment Name: At_Drought_Soil_Dry_P Parameter: Post Timepoint (hr) Value: None
  misc_feature: MA Experiment 20001556 PARAMETER Experiment Name: At_Drought_Soil_Dry_P Parameter: Post-Treatment Value: None
  misc_feature: MA Experiment 20001556 PARAMETER Experiment Name: At_Drought_Soil_Dry_P Parameter: Timepoint (day) Value: 12
  misc_feature: MA Experiment 20001556 PARAMETER Experiment Name: At_Drought_Soil_Dry_P Parameter: Treatment Value: Drought vs. No Drought
  misc_feature: MA Experiment ID: 20001904 Result: Up-regulated in Transcription
  misc_feature: MA Experiment 20001904 PARAMETER Experiment Name: At_Drought_Reproduction_P Parameter: Age (day) Value: 37
  misc_feature: MA Experiment 20001904 PARAMETER Experiment Name: At_Drought_Reproduction_P Parameter: Organism Value: A. thaliana
  misc_feature: MA Experiment 20001904 PARAMETER Experiment Name: At_Drought_Reproduction_P Parameter: Plant Line Value: WS
  misc_feature: MA Experiment 20001904 PARAMETER Experiment Name: At_Drought_Reproduction_P Parameter: Timepoint (day) Value: 7
  misc_feature: MA Experiment 20001904 PARAMETER Experiment Name: At_Drought_Reproduction_P Parameter: Tissue Value: Rosettes
  misc_feature: MA Experiment 20001904 PARAMETER Experiment Name: At_Drought_Reproduction_P Parameter: Treatment Value: Drought vs. No Drought
  misc_feature: MA Experiment ID: 20001906 Result: Up-regulated in Transcription
  misc_feature: MA Experiment 20001906 PARAMETER Experiment Name: At_Drought_Reproduction_P Parameter: Age (day) Value: 35
  misc_feature: MA Experiment 20001906 PARAMETER Experiment Name: At_Drought_Reproduction_P Parameter: Organism Value: A. thaliana
  misc_feature: MA Experiment 20001906 PARAMETER Experiment Name: At_Drought_Reproduction_P Parameter: Plant Line Value: WS
  misc_feature: MA Experiment 20001906 PARAMETER Experiment Name: At_Drought_Reproduction_P Parameter: Timepoint (day) Value: 5
  misc_feature: MA Experiment 20001906 PARAMETER Experiment Name: At_Drought_Reproduction_P Parameter: Tissue Value: Siliques
  misc_feature: MA Experiment 20001906 PARAMETER Experiment Name: At_Drought_Reproduction_P Parameter: Treatment Value: Drought vs. No Drought
tacgtctctcacatgtcaaatccttacgatttcgatttctcctgaaaatctcaacaaaacccttaagaattttcgatttcgaattcccaattctcccggagttctgatgcagatcgccggagataagtaatctcgagtttactaatgccgcggcttccgtcgtctcgtcgcggtgtcgtgtggtttcgatggaagatactcatcactatctccaccgcattatgcatcctcgctctcttctgtatcaaccgtcagtctaattccactgcgacgacgacgacactgtcttcgtctctctccgtcgcgagatctcgtatccctctcgttaaatactccggcgatcgtcccaaactcgccttccttttcctcgctcgacgtgatttgccacttgattttctctgggacagattcttcaagagtgcagatcagaggaatttctcaatctatgtacattcaatacctggtttcgtattcgatgaatcatccacaagatcacatttcttctacaatcgtcaattgaagaatagcattgaggtagtttggggagaatcaagcatgattgcagcagaaagattgttgcttgcatctgctttggaagatccttctaatcaaagatttgttcttttgtctgatagctgtgttccgttatacgactttggttacatttacagatatctagtttcttcaccaaagagttttgtagacagcttccttgataaagataatcgctacactatgaaaatgtttcctgttatacggaaagagaaatggcgaaaaggatctcagtggatatcattgatcagaagccatgcaaaggtcattgttaatgatgatactgtgttccctgtttttcagaaattttgcaagcgatctctacctctggatcccaaaaagaattggctatatcttaaaaagaggcgacacaactgcatccctgatgaacactacgtgcaaactctactaacaatgcgtggcttggaaaatgaaatggaacggagaacagtgacatacaccacatggaacctatcagcaaaaaaagctgaagctaaatcttggcatcctctcactttcacatctgacaattccggaccagaggaaatagaaggaataaagaaaatcaaccatgtatattatgaatcggagtatcgaacagaatggtgcagatcgaattcaaaacccgtcccgtgctttctgtttgcgaggaagttcactagaggagccgcaatgcgtcttttgagtgaaggattaatagaatcctcaatagatacaacaaccttgtagat

SEQ ID NO: 37489 - protein, 378 aa, Arabidopsis thaliana
  peptide (1)..(378): Ceres Seq. ID no. 12335736
  misc_feature (108)..(216): Pfam Name: Arabidopsis protein of unknown function, DUF266 Pfam Description: Arabidopsis protein of unknown function, DUF266
  misc_feature (69)..(355): Homolog of NCBI NO: 30680587 NR Description: expressed protein [Arabidopsis thaliana]
  misc_feature (52)..(355): Homolog of NCBI NO: 15236024 NR Description: putative protein; protein id: At4g25870.1
  misc_feature (59)..(365): Homolog of NCBI NO: 38346557 NR Description: OSJNBa0035M09.18 [Oryza sativa (japonica
  misc_feature (64)..(241): Homolog of NCBI NO: 34911442 NR Description: P0431H09.21 [Oryza sativa (japonica
  misc_feature (14)..(323): Homolog of NCBI NO: 30684956 NR Description: expressed protein [Arabidopsis thaliana]
  misc_feature (14)..(369): Homolog of NCBI NO: 15241437 NR Description: putative protein; protein id: At5g14550.1
  misc_feature (5)..(293): Homolog of NCBI NO: 25402693 NR Description: hypothetical protein [imported] - Arabidopsis
  misc_feature (1)..(91): Homolog of NCBI NO: 22330381 NR Description: hypothetical protein; protein id: At1g62305.1
  misc_feature (130)..(244): Homolog of NCBI NO: 22330381 NR Description: hypothetical protein; protein id: At1g62305.1
  misc_feature (5)..(376): Homolog of NCBI NO: 30682534 NR Description: expressed protein [Arabidopsis thaliana]
MPRLPSSRRGVVWFRWKILITISTALCILALFCINRQSNSTATTTTLSSSLSVARSRIPLVKYSGDRPKLAFLFLARRDLPLDFLWDRFFKSADQRNFSIYVHSIPGFVFDESSTRSHFFYNRQLKNSIEVVWGESSMIAAERLLLASALEDPSNQRFVLLSDSCVPLYDFGYIYRYLVSSPKSFVDSFLDKDNRYTMKMFPVIRKEKWRKGSQWISLIRSHAKVIVNDDTVFPVFQKFCKRSLPLDPKKNWLYLKKRRHNCIPDEHYVQTLLTMRGLENEMERRTVTYTTWNLSAKKAEAKSWHPLTFTSDNSGPEEIEGIKKINHVYYESEYRTEWCRSNSKPVPCFLFARKFTRGAAMRLLSEGLIESSIDTTTL

SEQ ID NO: 37490 - protein, 241 aa, Arabidopsis thaliana
  peptide (1)..(241): Ceres Seq. ID no. 12335737
  misc_feature (1)..(79): Pfam Name: Arabidopsis protein of unknown function, DUF266 Pfam Description: Arabidopsis protein of unknown function, DUF266
  misc_feature (1)..(218): Homolog of NCBI NO: 38637182 NR Description: unknown protein [Oryza sativa (japonica
  misc_feature (1)..(218): Homolog of NCBI NO: 30680587 NR Description: expressed protein [Arabidopsis thaliana]
  misc_feature (1)..(218): Homolog of NCBI NO: 15236024 NR Description: putative protein; protein id: At4g25870.1
  misc_feature (1)..(228): Homolog of NCBI NO: 38346557 NR Description: OSJNBa0035M09.18 [Oryza sativa (japonica
  misc_feature (1)..(104): Homolog of NCBI NO: 34911442 NR Description: P0431H09.21 [Oryza sativa (japonica
  misc_feature (1)..(186): Homolog of NCBI NO: 30684956 NR Description: expressed protein [Arabidopsis thaliana]
  misc_feature (1)..(232): Homolog of NCBI NO: 15241437 NR Description: putative protein; protein id: At5g14550.1
  misc_feature (1)..(156): Homolog of NCBI NO: 25402693 NR Description: hypothetical protein [imported] - Arabidopsis
  misc_feature (1)..(107): Homolog of NCBI NO: 22330381 NR Description: hypothetical protein; protein id: At1g62305.1
  misc_feature (1)..(239): Homolog of NCBI NO: 30682534 NR Description: expressed protein [Arabidopsis thaliana]
MIAAERLLLASALEDPSNQRFVLLSDSCVPLYDFGYIYRYLVSSPKSFVDSFLDKDNRYTMKMFPVIRKEKWRKGSQWISLIRSHAKVIVNDDTVFPVFQKFCKRSLPLDPKKNWLYLKKRRHNCIPDEHYVQTLLTMRGLENEMERRTVTYTTWNLSAKKAEAKSWHPLTFTSDNSGPEEIEGIKKINHVYYESEYRTEWCRSNSKPVPCFLFARKFTRGAAMRLLSEGLIESSIDTTTL

SEQ ID NO: 37491 - DNA, 1303 bp, Arabidopsis thaliana
  misc_feature (1)..(1303): Ceres Seq. ID no. 12321886
  misc_feature: MA Experiment ID: 108462 Result: Up-regulated in Transcription
  misc_feature: MA Experiment 108462 PARAMETER Experiment Name: At_Germinating_Seeds_cDNA_P Parameter: Age (day) Value: 2 vs. 0
  misc_feature: MA Experiment 108462 PARAMETER Experiment Name: At_Germinating_Seeds_cDNA_P Parameter: Tissue Value: Germinating Seeds
  misc_feature: MA Experiment ID: 108464 Result: Up-regulated in Transcription
  misc_feature: MA Experiment 108464 PARAMETER Experiment Name: At_Germinating_Seeds_cDNA_P Parameter: Age (day) Value: 4 vs. 0
  misc_feature: MA Experiment 108464 PARAMETER Experiment Name: At_Germinating_Seeds_cDNA_P Parameter: Tissue Value: Germinating Seeds
  misc_feature: MA Experiment ID: 108572 Result: Up-regulated in Transcription
  misc_feature: MA Experiment 108572 PARAMETER Experiment Name: At_Drought_cDNA_P Parameter: Timepoint (hr) Value: 1
  misc_feature: MA Experiment 108572 PARAMETER Experiment Name: At_Drought_cDNA_P Parameter: Tissue Value: Aerial
  misc_feature: MA Experiment 108572 PARAMETER Experiment Name: At_Drought_cDNA_P Parameter: Treatment Value: Drought vs. No Drought
  misc_feature: MA Experiment ID: 108573 Result: Up-regulated in Transcription
  misc_feature: MA Experiment 108573 PARAMETER Experiment Name: At_Drought_cDNA_P Parameter: Timepoint (hr) Value: 6
  misc_feature: MA Experiment 108573 PARAMETER Experiment Name: At_Drought_cDNA_P Parameter: Tissue Value: Aerial
  misc_feature: MA Experiment 108573 PARAMETER Experiment Name: At_Drought_cDNA_P Parameter: Treatment Value: Drought vs. No Drought
  misc_feature: MA Experiment ID: 108579 Result: Down-regulated in Transcription
  misc_feature: MA Experiment 108579 PARAMETER Experiment Name: At_4deg_Cold_cDNA_P Parameter: Temperature (deg C) Value: 4 vs. 22
  misc_feature: MA Experiment 108579 PARAMETER Experiment Name: At_4deg_Cold_cDNA_P Parameter: Timepoint (hr) Value: 6
  misc_feature: MA Experiment 108579 PARAMETER Experiment Name: At_4deg_Cold_cDNA_P Parameter: Tissue Value: Aerial
  misc_feature: MA Experiment ID: 108585 Result: Down-regulated in Transcription
  misc_feature: MA Experiment 108585 PARAMETER Experiment Name: At_5mM_NaNP_cDNA_P Parameter: Timepoint (hr) Value: 6
  misc_feature: MA Experiment 108585 PARAMETER Experiment Name: At_5mM_NaNP_cDNA_P Parameter: Tissue Value: Aerial
  misc_feature: MA Experiment 108585 PARAMETER Experiment Name: At_5mM_NaNP_cDNA_P Parameter: Treatment Value: null
  misc_feature: MA Experiment ID: 108595 Result: Down-regulated in Transcription
  misc_feature: MA Experiment 108595 PARAMETER Experiment Name: At_Ler-pi_Ovule_cDNA_P Parameter: Plant Line Value: null
  misc_feature: MA Experiment ID: 20000069 Result: Down-regulated in Transcription
  misc_feature: MA Experiment 20000069 PARAMETER Experiment Name: At_100uM_ABA_Mutants_cDNA_P Parameter: Plant Line Value: CS23
  misc_feature: MA Experiment 20000069 PARAMETER Experiment Name: At_100uM_ABA_Mutants_cDNA_P Parameter: Timepoint (hr) Value: 6
  misc_feature: MA Experiment 20000069 PARAMETER Experiment Name: At_100uM_ABA_Mutants_cDNA_P Parameter: Tissue Value: Aerial
  misc_feature: MA Experiment 20000069 PARAMETER Experiment Name: At_100uM_ABA_Mutants_cDNA_P Parameter: Treatment Value: 100uM ABA vs. No Treatment
  misc_feature: MA Experiment ID: 20000072 Result: Down-regulated in Transcription
  misc_feature: MA Experiment 20000072 PARAMETER Experiment Name: At_100uM_ABA_Mutants_cDNA_P Parameter: Plant Line Value: CS8105
  misc_feature: MA Experiment 20000072 PARAMETER Experiment Name: At_100uM_ABA_Mutants_cDNA_P Parameter: Timepoint (hr) Value: 6
  misc_feature: MA Experiment 20000072 PARAMETER Experiment Name: At_100uM_ABA_Mutants_cDNA_P Parameter: Tissue Value: Aerial
  misc_feature: MA Experiment 20000072 PARAMETER Experiment Name: At_100uM_ABA_Mutants_cDNA_P Parameter: Treatment Value: 100uM ABA vs. No Treatment
  misc_feature: MA Experiment ID: 20000086 Result: Down-regulated in Transcription
  misc_feature: MA Experiment 20000086 PARAMETER Experiment Name: At_100uM_ABA_Mutants_cDNA_P Parameter: Plant Line Value: CS22
  misc_feature: MA Experiment 20000086 PARAMETER Experiment Name: At_100uM_ABA_Mutants_cDNA_P Parameter: Timepoint (hr) Value: 6
  misc_feature: MA Experiment 20000086 PARAMETER Experiment Name: At_100uM_ABA_Mutants_cDNA_P Parameter: Tissue Value: Aerial
  misc_feature: MA Experiment 20000086 PARAMETER Experiment Name: At_100uM_ABA_Mutants_cDNA_P Parameter: Treatment Value: 100uM ABA vs. No Treatment
  misc_feature: MA Experiment ID: 20000087 Result: Down-regulated in Transcription
  misc_feature: MA Experiment 20000087 PARAMETER Experiment Name: At_100uM_ABA_Mutants_cDNA_P Parameter: Plant Line Value: WS
  misc_feature: MA Experiment 20000087 PARAMETER Experiment Name: At_100uM_ABA_Mutants_cDNA_P Parameter: Timepoint (hr) Value: 6
  misc_feature: MA Experiment 20000087 PARAMETER Experiment Name: At_100uM_ABA_Mutants_cDNA_P Parameter: Tissue Value: Aerial
  misc_feature: MA Experiment 20000087 PARAMETER Experiment Name: At_100uM_ABA_Mutants_cDNA_P Parameter: Treatment Value: 100uM ABA vs. No Treatment
  misc_feature: MA Experiment ID: 20000089 Result: Down-regulated in Transcription
  misc_feature: MA Experiment ID: 20000090 Result: Down-regulated in Transcription
  misc_feature: MA Experiment ID: 20000179 Result: Up-regulated in Transcription
  misc_feature: MA Experiment 20000179 PARAMETER Experiment Name: At_Germinating_Seeds_P Parameter: Age (hr) Value: 6 vs. 0
  misc_feature: MA Experiment 20000179 PARAMETER Experiment Name: At_Germinating_Seeds_P Parameter: Tissue Value: Germinating Seeds
  misc_feature: MA Experiment ID: 20000180 Result: Up-regulated in Transcription
  misc_feature: MA Experiment 20000180 PARAMETER Experiment Name: At_Germinating_Seeds_P Parameter: Age (hr) Value: 24 vs. 0
  misc_feature: MA Experiment 20000180 PARAMETER Experiment Name: At_Germinating_Seeds_P Parameter: Tissue Value: Germinating Seeds
  misc_feature: MA Experiment ID: 20000213 Result: Down-regulated in Transcription
  misc_feature: MA Experiment 20000213 PARAMETER Experiment Name: At_4deg_Cold_P Parameter: Timepoint (hr) Value: 2
  misc_feature: MA Experiment ID: 20000227 Result: Down-regulated in Transcription
  misc_feature: MA Experiment 20000227 PARAMETER Experiment Name: At_Root-Tips-vs-Tops_P Parameter: Tissue Value: Root Tips vs. Root Tops
  misc_feature: MA Experiment ID: 20000234 Result: Down-regulated in Transcription
  misc_feature: MA Experiment 20000234 PARAMETER Experiment Name: At_Siliques_P Parameter: Age (day) Value: 21
  misc_feature: MA Experiment 20000234 PARAMETER Experiment Name: At_Siliques_P Parameter: Organism Value: A. thaliana
  misc_feature: MA Experiment 20000234 PARAMETER Experiment Name: At_Siliques_P Parameter: Plant Line Value: WS
  misc_feature: MA Experiment 20000234 PARAMETER Experiment Name: At_Siliques_P Parameter: Tissue Value: Less Than 5mm Siliques vs. Whole Plant
  misc_feature: MA Experiment ID: 20000235 Result: Down-regulated in Transcription
  misc_feature: MA Experiment 20000235 PARAMETER Experiment Name: At_Siliques_P Parameter: Age (day) Value: 21
  misc_feature: MA Experiment 20000235 PARAMETER Experiment Name: At_Siliques_P Parameter: Organism Value: A. thaliana
  misc_feature: MA Experiment 20000235 PARAMETER Experiment Name: At_Siliques_P Parameter: Plant Line Value: WS
  misc_feature: MA Experiment 20000235 PARAMETER Experiment Name: At_Siliques_P Parameter: Tissue Value: 5-10mm Siliques vs. Whole Plant
  misc_feature: MA Experiment ID: 20000264 Result: Down-regulated in Transcription
  misc_feature: MA Experiment 20000264 PARAMETER Experiment Name: At_Open_Flower_P Parameter: Age (day) Value: 21
  misc_feature: MA Experiment 20000264 PARAMETER Experiment Name: At_Open_Flower_P Parameter: Plant Line Value: WS
  misc_feature: MA Experiment 20000264 PARAMETER Experiment Name: At_Open_Flower_P Parameter: Tissue Value: Open Flower vs. Whole Plant
  misc_feature: MA Experiment ID: 20000265 Result: Down-regulated in Transcription
  misc_feature: MA Experiment 20000265 PARAMETER Experiment Name: At_Open_Flower_P Parameter: Age (day) Value: 21
  misc_feature: MA Experiment 20000265 PARAMETER Experiment Name: At_Open_Flower_P Parameter: Plant Line Value: WS
  misc_feature: MA Experiment 20000265 PARAMETER Experiment Name: At_Open_Flower_P Parameter: Tissue Value: Closed Flower vs. Whole Plant
  misc_feature: MA Experiment ID: 20000286 Result: Down-regulated in Transcription
  misc_feature: MA Experiment 20000286 PARAMETER Experiment Name: At_Open_Flower_P Parameter: Age (day) Value: 21
  misc_feature: MA Experiment 20000286 PARAMETER Experiment Name: At_Open_Flower_P Parameter: Plant Line Value: WS
  misc_feature: MA Experiment 20000286 PARAMETER Experiment Name: At_Open_Flower_P Parameter: Tissue Value: Half Open vs. Whole Plant
  misc_feature: MA Experiment ID: 20000451 Result: Down-regulated in Transcription
  misc_feature: MA Experiment 20000451 PARAMETER Experiment Name: At_CS6879_Shoots-Roots_P Parameter: Age (day) Value: 14
  misc_feature: MA Experiment 20000451 PARAMETER Experiment Name: At_CS6879_Shoots-Roots_P Parameter: Organism Value: A. thaliana
  misc_feature: MA Experiment 20000451 PARAMETER Experiment Name: At_CS6879_Shoots-Roots_P Parameter: Plant Line Value: CS6879 vs. WS
  misc_feature: MA Experiment 20000451 PARAMETER Experiment Name: At_CS6879_Shoots-Roots_P Parameter: Tissue Value: Roots
  misc_feature: MA Experiment ID: 20000574 Result: Down-regulated in Transcription
  misc_feature: MA Experiment 20000574 PARAMETER Experiment Name: At_100uM_ABA_Mutants__P Parameter: Organism Value: A. thaliana
  misc_feature: MA Experiment 20000574 PARAMETER Experiment Name: At_100uM_ABA_Mutants__P Parameter: Plant Line Value: CS23 vs. Ler wt
  misc_feature: MA Experiment 20000574 PARAMETER Experiment Name: At_100uM_ABA_Mutants__P Parameter: Timepoint (hr) Value: N/A
  misc_feature: MA Experiment 20000574 PARAMETER Experiment Name: At_100uM_ABA_Mutants__P Parameter: Tissue Value: Whole Plant
  misc_feature: MA Experiment 20000574 PARAMETER Experiment Name: At_100uM_ABA_Mutants__P Parameter: Treatment Value: None
  misc_feature: MA Experiment ID: 20001557 Result: Down-regulated in Transcription
  misc_feature: MA Experiment 20001557 PARAMETER Experiment Name: At_Drought_Soil_Dry_P Parameter: Age (day) Value: 27
  misc_feature: MA Experiment 20001557 PARAMETER Experiment Name: At_Drought_Soil_Dry_P Parameter: Organism Value: A. thaliana
  misc_feature: MA Experiment 20001557 PARAMETER Experiment Name: At_Drought_Soil_Dry_P Parameter: Plant Line Value: WS
  misc_feature: MA Experiment 20001557 PARAMETER Experiment Name: At_Drought_Soil_Dry_P Parameter: Post Timepoint (hr) Value: 3
  misc_feature: MA Experiment 20001557 PARAMETER Experiment Name: At_Drought_Soil_Dry_P Parameter: Post-Treatment Value: Re-Water vs. No Drought
  misc_feature: MA Experiment 20001557 PARAMETER Experiment Name: At_Drought_Soil_Dry_P Parameter: Timepoint (day) Value: 13
  misc_feature: MA Experiment 20001557 PARAMETER Experiment Name: At_Drought_Soil_Dry_P Parameter: Treatment Value: Drought vs. No Drought
  misc_feature: MA Experiment ID: 20001560 Result: Down-regulated in Transcription
  misc_feature: MA Experiment 20001560 PARAMETER Experiment Name: At_Drought_Soil_Dry_P Parameter: Age (day) Value: 28
  misc_feature: MA Experiment 20001560 PARAMETER Experiment Name: At_Drought_Soil_Dry_P Parameter: Organism Value: A. thaliana
  misc_feature: MA Experiment 20001560 PARAMETER Experiment Name: At_Drought_Soil_Dry_P Parameter: Plant Line Value: WS
  misc_feature: MA Experiment 20001560 PARAMETER Experiment Name: At_Drought_Soil_Dry_P Parameter: Post Timepoint (hr) Value: None
  misc_feature: MA Experiment 20001560 PARAMETER Experiment Name: At_Drought_Soil_Dry_P Parameter: Post-Treatment Value: None
  misc_feature: MA Experiment 20001560 PARAMETER Experiment Name: At_Drought_Soil_Dry_P Parameter: Timepoint (day) Value: 14
  misc_feature: MA Experiment 20001560 PARAMETER Experiment Name: At_Drought_Soil_Dry_P Parameter: Treatment Value: Drought vs. No Drought
agatccactcacacctcgtctcctaatctgtacggttcttatttcgaaagggtaaaaaccaaaagcgacgcaaagggcaaaatcggaaaaagtgttttatttatggccgccgttagtagttcgtcggagaccggagactgcggcgttacgggaaagagagatgagatcatgttgttcggagttagagtcgtggttgatccgatgagaaagtgtgtgagtttgaacaatctctctgattatgaaaagtcttctccggaggatgagatccctaagatagtcaccgccggagctggagatggtgaagataagaacgaaacggatgcgacggtgattgtcgctgacggttacgcctccgccaatgacgctgtccagatttcgtcttcttccgtcgggaggaaacgaggggttccatggacagagaacgagcataagaggttcttgattgggttgcagaaagtaggaaaaggagattggaaaggaatatcaagaaactttgtgaagagtaggactcctactcaagtagctagtcatgctcagaaatacttcctccgacgaaccaacctcaaccgtcgccgaagaagatctagcctttttgatatcactactgagacggttacagaaatggccatggagcaagatcctactcaggagaactcaccactacctgaaaccaacatcagctctggacagcaagcgatgcaagtttttactgacgtgccgacaaaaactgagaatgcaccagagacatttcatctcaacgatccatatctggttccagtaaccttccaagcaaagccaacattcaatctaaacacagatgctgctccactttctctcaacctttgtctggcatcctcatttaatcttaacgagcaacccaactcaagacactcggctttcacgatgatgccaagcttcagcgatggagatagcaatagcagcatcatcagagttgcttagagcttaaacccaaggggaaaaaaaaaacagaacaaaaacagaggaaggctatagagattgatggacaaactgtgtctagggtgcttcatcatctttgtttgtttgtaaaactcttgtcacacacactgttatgagtcattttctgctgtgtgtgttttgttttgtggtgatgtaagttaaaaacaagcgtgattctcatgtggcccatctcaatcaatggttggtgatttgtggggtttttaggcttttctattatcttatcttttggggataagataaaagcctaaaactgtatgtaactatgtatggttcttcgaatattttatcatttatctctaatgtc

SEQ ID NO: 37492 - protein, 319 aa, Arabidopsis thaliana
  peptide (1)..(319): Ceres Seq. ID no. 12321887
  misc_feature (135)..(182): Pfam Name: Myb-like DNA-binding domain Pfam Description: Myb-like DNA-binding domain
  misc_feature (45)..(307): Homolog of NCBI NO: 15228185 NR Description: putative MYB family transcription factor; protein
  misc_feature (39)..(224): Homolog of NCBI NO: 1076660 NR Description: D13F(MYBST1) protein - potato
  misc_feature (39)..(224): Homolog of NCBI NO: 7705206 NR Description: MybSt1 [Solanum tuberosum]
  misc_feature (39)..(262): Homolog of NCBI NO: 24850307 NR Description: transcription factor MYBS3
  misc_feature (39)..(319): Homolog of NCBI NO: 37536856 NR Description: putative Myb-related protein
  misc_feature (56)..(254): Homolog of NCBI NO: 15238083 NR Description: Myb-related transcription activator-like
  misc_feature (55)..(314): Homolog of NCBI NO: 28629811 NR Description: transcription factor Myb1 [Malus xiaojinensis]
  misc_feature (37)..(300): Homolog of NCBI NO: 15221408 NR Description: myb family transcription factor
  misc_feature (35)..(319): Homolog of NCBI NO: 15221922 NR Description: myb family transcription factor
  misc_feature (35)..(319): Homolog of NCBI NO: 21593684 NR Description: Myb-related transcription activator, putative
RSTHTSSPNLYGSYFERVKTKSDAKGKIGKSVLFMAAVSSSSETGDCGVTGKRDEIMLFGVRVVVDPMRKCVSLNNLSDYEKSSPEDEIPKIVTAGAGDGEDKNETDATVIVADGYASANDAVQISSSSVGRKRGVPWTENEHKRFLIGLQKVGKGDWKGISRNFVKSRTPTQVASHAQKYFLRRTNLNRRRRRSSLFDITTETVTEMAMEQDPTQENSPLPETNISSGQQAMQVFTDVPTKTENAPETFHLNDPYLVPVTFQAKPTFNLNTDAAPLSLNLCLASSFNLNEQPNSRHSAFTMMPSFSDGDSNSSIIRVA

SEQ ID NO: 37493 - protein, 285 aa, Arabidopsis thaliana
  peptide (1)..(285): Ceres Seq. ID no. 12321888
  misc_feature (101)..(148): Pfam Name: Myb-like DNA-binding domain Pfam Description: Myb-like DNA-binding domain
  misc_feature (11)..(273): Homolog of NCBI NO: 15228185 NR Description: putative MYB family transcription factor; protein
  misc_feature (5)..(190): Homolog of NCBI NO: 1076660 NR Description: D13F(MYBST1) protein - potato
  misc_feature (5)..(190): Homolog of NCBI NO: 7705206 NR Description: MybSt1 [Solanum tuberosum]
  misc_feature (5)..(228): Homolog of NCBI NO: 24850307 NR Description: transcription factor MYBS3
  misc_feature (5)..(285): Homolog of NCBI NO: 37536856 NR Description: putative Myb-related protein
  misc_feature (22)..(220): Homolog of NCBI NO: 15238083 NR Description: Myb-related transcription activator-like
  misc_feature (21)..(280): Homolog of NCBI NO: 28629811 NR Description: transcription factor Myb1 [Malus xiaojinensis]
  misc_feature (3)..(266): Homolog of NCBI NO: 15221408 NR Description: myb family transcription factor
  misc_feature (1)..(285): Homolog of NCBI NO: 15221922 NR Description: myb family transcription factor
  misc_feature (1)..(285): Homolog of NCBI NO: 21593684 NR Description: Myb-related transcription activator, putative
MAAVSSSSETGDCGVTGKRDEIMLFGVRVVVDPMRKCVSLNNLSDYEKSSPEDEIPKIVTAGAGDGEDKNETDATVIVADGYASANDAVQISSSSVGRKRGVPWTENEHKRFLIGLQKVGKGDWKGISRNFVKSRTPTQVASHAQKYFLRRTNLNRRRRRSSLFDITTETVTEMAMEQDPTQENSPLPETNISSGQQAMQVFTDVPTKTENAPETFHLNDPYLVPVTFQAKPTFNLNTDAAPLSLNLCLASSFNLNEQPNSRHSAFTMMPSFSDGDSNSSIIRVA

SEQ ID NO: 37494 - protein, 263 aa, Arabidopsis thaliana
  peptide (1)..(263): Ceres Seq. ID no. 12321889
  misc_feature (79)..(126): Pfam Name: Myb-like DNA-binding domain Pfam Description: Myb-like DNA-binding domain
  misc_feature (1)..(251): Homolog of NCBI NO: 15228185 NR Description: putative MYB family transcription factor; protein
  misc_feature (1)..(168): Homolog of NCBI NO: 1076660 NR Description: D13F(MYBST1) protein - potato
  misc_feature (1)..(168): Homolog of NCBI NO: 7705206 NR Description: MybSt1 [Solanum tuberosum]
  misc_feature (1)..(206): Homolog of NCBI NO: 24850307 NR Description: transcription factor MYBS3
  misc_feature (1)..(263): Homolog of NCBI NO: 37536856 NR Description: putative Myb-related protein
  misc_feature (1)..(198): Homolog of NCBI NO: 15238083 NR Description: Myb-related transcription activator-like
  misc_feature (1)..(258): Homolog of NCBI NO: 28629811 NR Description: transcription factor Myb1 [Malus xiaojinensis]
  misc_feature (1)..(244): Homolog of NCBI NO: 15221408 NR Description: myb family transcription factor
  misc_feature (1)..(263): Homolog of NCBI NO: 15221922 NR Description: myb family transcription factor
  misc_feature (1)..(263): Homolog of NCBI NO: 21593684 NR Description: Myb-related transcription activator, putative
MLFGVRVVVDPMRKCVSLNNLSDYEKSSPEDEIPKIVTAGAGDGEDKNETDATVIVADGYASANDAVQISSSSVGRKRGVPWTENEHKRFLIGLQKVGKGDWKGISRNFVKSRTPTQVASHAQKYFLRRTNLNRRRRRSSLFDITTETVTEMAMEQDPTQENSPLPETNISSGQQAMQVFTDVPTKTENAPETFHLNDPYLVPVTFQAKPTFNLNTDAAPLSLNLCLASSFNLNEQPNSRHSAFTMMPSFSDGDSNSSIIRVA

SEQ ID NO: 37495 - DNA, 1398 bp, Arabidopsis thaliana
  misc_feature (1)..(1398): Ceres Seq. ID no. 13499706
  misc_feature: MA Experiment ID: 108462 Result: Up-regulated in Transcription
  misc_feature: MA Experiment 108462 PARAMETER Experiment Name: At_Germinating_Seeds_cDNA_P Parameter: Age (day) Value: 2 vs. 0
  misc_feature: MA Experiment 108462 PARAMETER Experiment Name: At_Germinating_Seeds_cDNA_P Parameter: Tissue Value: Germinating Seeds
  misc_feature: MA Experiment ID: 108463 Result: Up-regulated in Transcription
  misc_feature: MA Experiment 108463 PARAMETER Experiment Name: At_Germinating_Seeds_cDNA_P Parameter: Age (day) Value: 3 vs. 0
  misc_feature: MA Experiment 108463 PARAMETER Experiment Name: At_Germinating_Seeds_cDNA_P Parameter: Tissue Value: Germinating Seeds
  misc_feature: MA Experiment ID: 108464 Result: Up-regulated in Transcription
  misc_feature: MA Experiment 108464 PARAMETER Experiment Name: At_Germinating_Seeds_cDNA_P Parameter: Age (day) Value: 4 vs. 0
  misc_feature: MA Experiment 108464 PARAMETER Experiment Name: At_Germinating_Seeds_cDNA_P Parameter: Tissue Value: Germinating Seeds
  misc_feature: MA Experiment ID: 20000234 Result: Up-regulated in Transcription
  misc_feature: MA Experiment 20000234 PARAMETER Experiment Name: At_Siliques_P Parameter: Age (day) Value: 21
  misc_feature: MA Experiment 20000234 PARAMETER Experiment Name: At_Siliques_P Parameter: Organism Value: A. thaliana
  misc_feature: MA Experiment 20000234 PARAMETER Experiment Name: At_Siliques_P Parameter: Plant Line Value: WS
  misc_feature: MA Experiment 20000234 PARAMETER Experiment Name: At_Siliques_P Parameter: Tissue Value: Less Than 5mm Siliques vs. Whole Plant
  misc_feature: MA Experiment ID: 20000235 Result: Up-regulated in Transcription
  misc_feature: MA Experiment 20000235 PARAMETER Experiment Name: At_Siliques_P Parameter: Age (day) Value: 21
  misc_feature: MA Experiment 20000235 PARAMETER Experiment Name: At_Siliques_P Parameter: Organism Value: A. thaliana
  misc_feature: MA Experiment 20000235 PARAMETER Experiment Name: At_Siliques_P Parameter: Plant Line Value: WS
  misc_feature: MA Experiment 20000235 PARAMETER Experiment Name: At_Siliques_P Parameter: Tissue Value: 5-10mm Siliques vs. Whole Plant
  misc_feature: MA Experiment ID: 20000264 Result: Up-regulated in Transcription
  misc_feature: MA Experiment 20000264 PARAMETER Experiment Name: At_Open_Flower_P Parameter: Age (day) Value: 21
  misc_feature: MA Experiment 20000264 PARAMETER Experiment Name: At_Open_Flower_P Parameter: Plant Line Value: WS
  misc_feature: MA Experiment 20000264 PARAMETER Experiment Name: At_Open_Flower_P Parameter: Tissue Value: Open Flower vs. Whole Plant
  misc_feature: MA Experiment ID: 20000265 Result: Up-regulated in Transcription
  misc_feature: MA Experiment 20000265 PARAMETER Experiment Name: At_Open_Flower_P Parameter: Age (day) Value: 21
  misc_feature: MA Experiment 20000265 PARAMETER Experiment Name: At_Open_Flower_P Parameter: Plant Line Value: WS
  misc_feature: MA Experiment 20000265 PARAMETER Experiment Name: At_Open_Flower_P Parameter: Tissue Value: Closed Flower vs. Whole Plant
  misc_feature: MA Experiment ID: 20000286 Result: Up-regulated in Transcription
  misc_feature: MA Experiment 20000286 PARAMETER Experiment Name: At_Open_Flower_P Parameter: Age (day) Value: 21
  misc_feature: MA Experiment 20000286 PARAMETER Experiment Name: At_Open_Flower_P Parameter: Plant Line Value: WS
  misc_feature: MA Experiment 20000286 PARAMETER Experiment Name: At_Open_Flower_P Parameter: Tissue Value: Half Open vs. Whole Plant
  misc_feature: MA Experiment ID: 20000794 Result: Up-regulated in Transcription
  misc_feature: MA Experiment 20000794 PARAMETER Experiment Name: At_Petals_P Parameter: Age (day) Value: 23-25 days
  misc_feature: MA Experiment 20000794 PARAMETER Experiment Name: At_Petals_P Parameter: Plant Line Value: WS
  misc_feature: MA Experiment 20000794 PARAMETER Experiment Name: At_Petals_P Parameter: Tissue Value: Petals vs. Whole plant
  misc_feature: MA Experiment ID: 20001757 Result: Down-regulated in Transcription
  misc_feature: MA Experiment 20001757 PARAMETER Experiment Name: At_50mM_NH4NO3_L-to-H_P Parameter: Timepoint (hr) Value: 6
  misc_feature: MA Experiment 20001757 PARAMETER Experiment Name: At_50mM_NH4NO3_L-to-H_P Parameter: Tissue Value: Leaf
  misc_feature: MA Experiment 20001757 PARAMETER Experiment Name: At_50mM_NH4NO3_L-to-H_P Parameter: Treatment Value: 50mM NH4NO3 vs 100mM Mannitol
  misc_feature: MA Experiment ID: 20001905 Result: Up-regulated in Transcription
  misc_feature: MA Experiment 20001905 PARAMETER Experiment Name: At_Drought_Reproduction_P Parameter: Age (day) Value: 40
  misc_feature: MA Experiment 20001905 PARAMETER Experiment Name: At_Drought_Reproduction_P Parameter: Organism Value: A. thaliana
  misc_feature: MA Experiment 20001905 PARAMETER Experiment Name: At_Drought_Reproduction_P Parameter: Plant Line Value: WS
  misc_feature: MA Experiment 20001905 PARAMETER Experiment Name: At_Drought_Reproduction_P Parameter: Timepoint (day) Value: 10
  misc_feature: MA Experiment 20001905 PARAMETER Experiment Name: At_Drought_Reproduction_P Parameter: Tissue Value: Rosettes
  misc_feature: MA Experiment 20001905 PARAMETER Experiment Name: At_Drought_Reproduction_P Parameter: Treatment Value: Drought vs. No Drought
  misc_feature: MA Experiment ID: 20001910 Result: Up-regulated in Transcription
  misc_feature: MA Experiment 20001910 PARAMETER Experiment Name: At_Drought_Reproduction_P Parameter: Age (day) Value: 37
  misc_feature: MA Experiment 20001910 PARAMETER Experiment Name: At_Drought_Reproduction_P Parameter: Organism Value: A. thaliana
  misc_feature: MA Experiment 20001910 PARAMETER Experiment Name: At_Drought_Reproduction_P Parameter: Plant Line Value: WS
  misc_feature: MA Experiment 20001910 PARAMETER Experiment Name: At_Drought_Reproduction_P Parameter: Timepoint (day) Value: 7
  misc_feature: MA Experiment 20001910 PARAMETER Experiment Name: At_Drought_Reproduction_P Parameter: Tissue Value: Flowers
  misc_feature: MA Experiment 20001910 PARAMETER Experiment Name: At_Drought_Reproduction_P Parameter: Treatment Value: Drought vs. No Drought
tccccccgctcttcttagtaacctcctaagccatgaaatagtcgcaaaggccctttcttcgtcttcgtttctaattgctttcgacgacaatcgatcgtagagaagtctacctcgtagacatctctctcacaaatccaattcaattaccattgtttgttattatctgatgtcgaatatgcaattctctcgtggttttaatccctttgttatcctcttctgtctcgccgtggttgcaccaattatatcggctgatgtcgctatcttgagaacggactattaccaaaaaacatgtcctgatttccacaaaattgtgcgtgaagccgttacaaccaaacaagtccaacaaccaacaactgcggccgggaccctccgtctctttttccatgattgtttccttgaaggttgtgatgcatctgtcttgatcgcgaccaactcgttcaacaaagcggaacgcgatgatgatctcaatgattccctcccgggagatgcttttgacatcgtcacccgcatcaagacagctctcgagttgtcttgtcctggtgtagtatcatgcgcggatattctagcgcaggctacacgtgaccttgtcacaatggtaggaggaccttactttgacgtaaagcttggtcgtaaagacggattcgaatccaaagctcataaagtcagaggaaatgtcccaatggcaaaccagactgttcctgacatccacgggatattcaagaaaaacggttttagtcttcgcgagatggtagcattaagcggggctcacaccattggattctctcactgcaaagagttttccgacagactctacggatcccgtgctgataaagaaatcaacccgcgattcgcagccgctctcaaagatctttgcaaaaaccacaccgtggatgatacaatcgccgcgtttaacgacgtgatgactccaggaaagttcgacaacatgtacttcaagaacctaaagcgagggctagggcttttagcgtctgaccacatccttattaaagacaacagcaccaagccgtttgtggatctatacgcaactaacgagacagcattctttgaggatttcgctcgtgcgatggagaaacttggcacggtcggcgtcaagggcgataaagatggagaagtgagacgtaggtgcgaccacttcaacaatctcaacgtttaagaagaaaaagaaaacacaaaaccatataaatataatattatttctgttttatttgcggaggagttgaggagaagaaaggtttggttggtatatatgtttaataactacctattataagcaagatcttgtaacaattcaagttgggatgtttaatttttccatgaaaattcaaactgttgtattgaaagtatatagataaaataacatattatatatcgaacaattgt

SEQ ID NO: 37496 - protein, 334 aa, Arabidopsis thaliana
  peptide (1)..(334): Ceres Seq. ID no. 13499707
  misc_feature (5)..(330): Homolog of NCBI NO: 7433082 NR Description: probable peroxidase (EC 1.11.1.7) (clone PC55) -
  misc_feature (54)..(330): Homolog of NCBI NO: 1890317 NR Description: peroxidase ATP26a [Arabidopsis thaliana]
  misc_feature (33)..(330): Homolog of NCBI NO: 14334600 NR Description: putative peroxidase [Arabidopsis thaliana]
  misc_feature (33)..(330): Homolog of NCBI NO: 15232929 NR Description: peroxidase, putative [Arabidopsis thaliana]
  misc_feature (14)..(330): Homolog of NCBI NO: 15242580 NR Description: peroxidase, putative [Arabidopsis thaliana]
  misc_feature (18)..(331): Homolog of NCBI NO: 15221670 NR Description: peroxidase, putative [Arabidopsis thaliana]
  misc_feature (15)..(334): Homolog of NCBI NO: 15236620 NR Description: peroxidase, putative [Arabidopsis thaliana]
  misc_feature (4)..(334): Homolog of NCBI NO: 9759442 NR Description: peroxidase [Arabidopsis thaliana]
  misc_feature (1)..(334): Homolog of NCBI NO: 21593687 NR Description: peroxidase [Arabidopsis thaliana]
  misc_feature (1)..(334): Homolog of NCBI NO: 18422742 NR Description: peroxidase, putative [Arabidopsis thaliana]
MSNMQFSRGFNPFVILFCLAVVAPIISADVAILRTDYYQKTCPDFHKIVREAVTTKQVQQPTTAAGTLRLFFHDCFLEGCDASVLIATNSFNKAERDDDLNDSLPGDAFDIVTRIKTALELSCPGVVSCADILAQATRDLVTMVGGPYFDVKLGRKDGFESKAHKVRGNVPMANQTVPDIHGIFKKNGFSLREMVALSGAHTIGFSHCKEFSDRLYGSRADKEINPRFAAALKDLCKNHTVDDTIAAFNDVMTPGKFDNMYFKNLKRGLGLLASDHILIKDNSTKPFVDLYATNETAFFEDFARAMEKLGTVGVKGDKDGEVRRRCDHFNNLNV

SEQ ID NO: 37497 - protein, 331 aa, Arabidopsis thaliana
  peptide (1)..(331): Ceres Seq. ID no. 13499708
  misc_feature (2)..(327): Homolog of NCBI NO: 7433082 NR Description: probable peroxidase (EC 1.11.1.7) (clone PC55) -
  misc_feature (51)..(327): Homolog of NCBI NO: 1890317 NR Description: peroxidase ATP26a [Arabidopsis thaliana]
  misc_feature (30)..(327): Homolog of NCBI NO: 14334600 NR Description: putative peroxidase [Arabidopsis thaliana]
  misc_feature (30)..(327): Homolog of NCBI NO: 15232929 NR Description: peroxidase, putative [Arabidopsis thaliana]
  misc_feature (11)..(327): Homolog of NCBI NO: 15242580 NR Description: peroxidase, putative [Arabidopsis thaliana]
  misc_feature (15)..(328): Homolog of NCBI NO: 15221670 NR Description: peroxidase, putative [Arabidopsis thaliana]
  misc_feature (12)..(331): Homolog of NCBI NO: 15236620 NR Description: peroxidase, putative [Arabidopsis thaliana]
  misc_feature (1)..(331): Homolog of NCBI NO: 9759442 NR Description: peroxidase [Arabidopsis thaliana]
  misc_feature (1)..(331): Homolog of NCBI NO: 21593687 NR Description: peroxidase [Arabidopsis thaliana]
  misc_feature (1)..(331): Homolog of NCBI NO: 18422742 NR Description: peroxidase, putative [Arabidopsis thaliana]
MQFSRGFNPFVILFCLAVVAPIISADVAILRTDYYQKTCPDFHKIVREAVTTKQVQQPTTAAGTLRLFFHDCFLEGCDASVLIATNSFNKAERDDDLNDSLPGDAFDIVTRIKTALELSCPGVVSCADILAQATRDLVTMVGGPYFDVKLGRKDGFESKAHKVRGNVPMANQTVPDIHGIFKKNGFSLREMVALSGAHTIGFSHCKEFSDRLYGSRADKEINPRFAAALKDLCKNHTVDDTIAAFNDVMTPGKFDNMYFKNLKRGLGLLASDHILIKDNSTKPFVDLYATNETAFFEDFARAMEKLGTVGVKGDKDGEVRRRCDHFNNLNV

SEQ ID NO: 37498 - protein, 192 aa, Arabidopsis thaliana
  peptide (1)..(192): Ceres Seq. ID no. 13499709
  misc_feature (1)..(188): Homolog of NCBI NO: 7433082 NR Description: probable peroxidase (EC 1.11.1.7) (clone PC55) -
  misc_feature (1)..(188): Homolog of NCBI NO: 1890317 NR Description: peroxidase ATP26a [Arabidopsis thaliana]
  misc_feature (1)..(188): Homolog of NCBI NO: 14334600 NR Description: putative peroxidase [Arabidopsis thaliana]
  misc_feature (1)..(188): Homolog of NCBI NO: 15232929 NR Description: peroxidase, putative [Arabidopsis thaliana]
  misc_feature (1)..(188): Homolog of NCBI NO: 15242580 NR Description: peroxidase, putative [Arabidopsis thaliana]
  misc_feature (1)..(189): Homolog of NCBI NO: 15221670 NR Description: peroxidase, putative [Arabidopsis thaliana]
  misc_feature (1)..(192): Homolog of NCBI NO: 15236620 NR Description: peroxidase, putative [Arabidopsis thaliana]
  misc_feature (1)..(192): Homolog of NCBI NO: 9759442 NR Description: peroxidase [Arabidopsis thaliana]
  misc_feature (1)..(192): Homolog of NCBI NO: 21593687 NR Description: peroxidase [Arabidopsis thaliana]
  misc_feature (1)..(192): Homolog of NCBI NO: 18422742 NR Description: peroxidase, putative [Arabidopsis thaliana]
MVGGPYFDVKLGRKDGFESKAHKVRGNVPMANQTVPDIHGIFKKNGFSLREMVALSGAHTIGFSHCKEFSDRLYGSRADKEINPRFAAALKDLCKNHTVDDTIAAFNDVMTPGKFDNMYFKNLKRGLGLLASDHILIKDNSTKPFVDLYATNETAFFEDFARAMEKLGTVGVKGDKDGEVRRRCDHFNNLNV

SEQ ID NO: 37499 - DNA, 880 bp, Arabidopsis thaliana
  misc_feature (1)..(880): Ceres Seq. ID no. 12326782
  misc_feature: MA Experiment ID: 108461 Result: Down-regulated in Transcription
  misc_feature: MA Experiment 108461 PARAMETER Experiment Name: At_Germinating_Seeds_cDNA_P Parameter: Age (day) Value: 1 vs. 0
  misc_feature: MA Experiment 108461 PARAMETER Experiment Name: At_Germinating_Seeds_cDNA_P Parameter: Tissue Value: Germinating Seeds
  misc_feature: MA Experiment ID: 108462 Result: Down-regulated in Transcription
  misc_feature: MA Experiment 108462 PARAMETER Experiment Name: At_Germinating_Seeds_cDNA_P Parameter: Age (day) Value: 2 vs. 0
  misc_feature: MA Experiment 108462 PARAMETER Experiment Name: At_Germinating_Seeds_cDNA_P Parameter: Tissue Value: Germinating Seeds
  misc_feature: MA Experiment ID: 108463 Result: Down-regulated in Transcription
  misc_feature: MA Experiment 108463 PARAMETER Experiment Name: At_Germinating_Seeds_cDNA_P Parameter: Age (day) Value: 3 vs. 0
  misc_feature: MA Experiment 108463 PARAMETER Experiment Name: At_Germinating_Seeds_cDNA_P Parameter: Tissue Value: Germinating Seeds
  misc_feature: MA Experiment ID: 108464 Result: Down-regulated in Transcription
  misc_feature: MA Experiment 108464 PARAMETER Experiment Name: At_Germinating_Seeds_cDNA_P Parameter: Age (day) Value: 4 vs. 0
  misc_feature: MA Experiment 108464 PARAMETER Experiment Name: At_Germinating_Seeds_cDNA_P Parameter: Tissue Value: Germinating Seeds
  misc_feature: MA Experiment ID: 108573 Result: Down-regulated in Transcription
  misc_feature: MA Experiment 108573 PARAMETER Experiment Name: At_Drought_cDNA_P Parameter: Timepoint (hr) Value: 6
  misc_feature: MA Experiment 108573 PARAMETER Experiment Name: At_Drought_cDNA_P Parameter: Tissue Value: Aerial
  misc_feature: MA Experiment 108573 PARAMETER Experiment Name: At_Drought_cDNA_P Parameter: Treatment Value: Drought vs. No Drought
  misc_feature: MA Experiment ID: 108595 Result: Up-regulated in Transcription
  misc_feature: MA Experiment 108595 PARAMETER Experiment Name: At_Ler-pi_Ovule_cDNA_P Parameter: Plant Line Value: null
  misc_feature: MA Experiment ID: 20001247 Result: Down-regulated in Transcription
  misc_feature: MA Experiment 20001247 PARAMETER Experiment Name: At_Far-red-induction_P Parameter: Age (day) Value: 7
  misc_feature: MA Experiment 20001247 PARAMETER Experiment Name: At_Far-red-induction_P Parameter: Light Value: Far-red vs. White
  misc_feature: MA Experiment 20001247 PARAMETER Experiment Name: At_Far-red-induction_P Parameter: Organism Value: A. thaliana
  misc_feature: MA Experiment 20001247 PARAMETER Experiment Name: At_Far-red-induction_P Parameter: Plant Line Value: Columbia
  misc_feature: MA Experiment 20001247 PARAMETER Experiment Name: At_Far-red-induction_P Parameter: Timepoint (hr) Value: 1
  misc_feature: MA Experiment 20001247 PARAMETER Experiment Name: At_Far-red-induction_P Parameter: Tissue Value: Whole Plant
  misc_feature: MA Experiment ID: 20001556 Result: Up-regulated in Transcription
  misc_feature: MA Experiment 20001556 PARAMETER Experiment Name: At_Drought_Soil_Dry_P Parameter: Age (day) Value: 26
  misc_feature: MA Experiment 20001556 PARAMETER Experiment Name: At_Drought_Soil_Dry_P Parameter: Organism Value: A. thaliana
  misc_feature: MA Experiment 20001556 PARAMETER Experiment Name: At_Drought_Soil_Dry_P Parameter: Plant Line Value: WS
  misc_feature: MA Experiment 20001556 PARAMETER Experiment Name: At_Drought_Soil_Dry_P Parameter: Post Timepoint (hr) Value: None
  misc_feature: MA Experiment 20001556 PARAMETER Experiment Name: At_Drought_Soil_Dry_P Parameter: Post-Treatment Value: None
  misc_feature: MA Experiment 20001556 PARAMETER Experiment Name: At_Drought_Soil_Dry_P Parameter: Timepoint (day) Value: 12
  misc_feature: MA Experiment 20001556 PARAMETER Experiment Name: At_Drought_Soil_Dry_P Parameter: Treatment Value: Drought vs. No Drought
  misc_feature: MA Experiment ID: 20001904 Result: Up-regulated in Transcription
  misc_feature: MA Experiment 20001904 PARAMETER Experiment Name: At_Drought_Reproduction_P Parameter: Age (day) Value: 37
  misc_feature: MA Experiment 20001904 PARAMETER Experiment Name: At_Drought_Reproduction_P Parameter: Organism Value: A. thaliana
  misc_feature: MA Experiment 20001904 PARAMETER Experiment Name: At_Drought_Reproduction_P Parameter: Plant Line Value: WS
  misc_feature: MA Experiment 20001904 PARAMETER Experiment Name: At_Drought_Reproduction_P Parameter: Timepoint (day) Value: 7
  misc_feature: MA Experiment 20001904 PARAMETER Experiment Name: At_Drought_Reproduction_P Parameter: Tissue Value: Rosettes
  misc_feature: MA Experiment 20001904 PARAMETER Experiment Name: At_Drought_Reproduction_P Parameter: Treatment Value: Drought vs. No Drought
  misc_feature: MA Experiment ID: 20001908 Result: Up-regulated in Transcription
  misc_feature: MA Experiment 20001908 PARAMETER Experiment Name: At_Drought_Reproduction_P Parameter: Age (day) Value: 40
  misc_feature: MA Experiment 20001908 PARAMETER Experiment Name: At_Drought_Reproduction_P Parameter: Organism Value: A. thaliana
  misc_feature: MA Experiment 20001908 PARAMETER Experiment Name: At_Drought_Reproduction_P Parameter: Plant Line Value: WS
  misc_feature: MA Experiment 20001908 PARAMETER Experiment Name: At_Drought_Reproduction_P Parameter: Timepoint (day) Value: 10
  misc_feature: MA Experiment 20001908 PARAMETER Experiment Name: At_Drought_Reproduction_P Parameter: Tissue Value: Siliques
  misc_feature: MA Experiment 20001908 PARAMETER Experiment Name: At_Drought_Reproduction_P Parameter: Treatment Value: Drought vs. No Drought
  misc_feature: MA Experiment ID: 20001910 Result: Up-regulated in Transcription
  misc_feature: MA Experiment 20001910 PARAMETER Experiment Name: At_Drought_Reproduction_P Parameter: Age (day) Value: 37
  misc_feature: MA Experiment 20001910 PARAMETER Experiment Name: At_Drought_Reproduction_P Parameter: Organism Value: A. thaliana
  misc_feature: MA Experiment 20001910 PARAMETER Experiment Name: At_Drought_Reproduction_P Parameter: Plant Line Value: WS
  misc_feature: MA Experiment 20001910 PARAMETER Experiment Name: At_Drought_Reproduction_P Parameter: Timepoint (day) Value: 7
  misc_feature: MA Experiment 20001910 PARAMETER Experiment Name: At_Drought_Reproduction_P Parameter: Tissue Value: Flowers
  misc_feature: MA Experiment 20001910 PARAMETER Experiment Name: At_Drought_Reproduction_P Parameter: Treatment Value: Drought vs. No Drought
  misc_feature: MA Experiment ID: 20001911 Result: Up-regulated in Transcription
  misc_feature: MA Experiment 20001911 PARAMETER Experiment Name: At_Drought_Reproduction_P Parameter: Age (day) Value: 40
  misc_feature: MA Experiment 20001911 PARAMETER Experiment Name: At_Drought_Reproduction_P Parameter: Organism Value: A. thaliana
  misc_feature: MA Experiment 20001911 PARAMETER Experiment Name: At_Drought_Reproduction_P Parameter: Plant Line Value: WS
  misc_feature: MA Experiment 20001911 PARAMETER Experiment Name: At_Drought_Reproduction_P Parameter: Timepoint (day) Value: 10
  misc_feature: MA Experiment 20001911 PARAMETER Experiment Name: At_Drought_Reproduction_P Parameter: Tissue Value: Flowers
  misc_feature: MA Experiment 20001911 PARAMETER Experiment Name: At_Drought_Reproduction_P Parameter: Treatment Value: Drought vs. No Drought
aactctgtcttagttttgagcagcagcagctatggttaacgtcagattctaccgaaactatgggaaaacattcaagaagccacgtcgtccttatgagaaagagcgtcttgatgctgagctaaagcttgttggagaatacggtcttcgttgtaagagagagctttggagagttcaatatacacttagcagaatccgtaatgctgcaagagaactcttaactcttgatgagaagaatcctcgtcgtatctttgaaggtgaagctcttcttaggagaatgaatcgatatggtcttcttgatgaaacccagaacaagcttgattatgttcttgctttgactgttgagaatttccttgaacgtcgtctccaaactattgtctttaagtctggtatggctaagtccattcaccacgctcgtgtccttatccgacaaaggcatatcagggttgggaggcaacttgtgaacattccatcgtttatggtgagagtagagtcacagaagcacgtagacttttctctaaccagtccattcggtggtggtcgacctggaagagtgaagagaaggaacgagagagccggagctaagaaagcttctggtggtgatggagatgaggatgatgaagagtgaaaagtaccaaacccttaaaaaaatccctaagatgaaacactacctagctaaacctatcaaaatgcttttagttgataatagtttggttttgttacctctttttgtgagatatttggtttgttagtgttcttaattagtagtagaagtgaagtgttttctttttttttttataatgttttggaccttgtgttcttgaaccatgtcactttcgaatcttgcttcttataagatactagtagttgatattattatgtc

SEQ ID NO: 37500 - protein, 197 aa, Arabidopsis thaliana [sequence omitted]

SEQ ID NO: 37501 - protein, 116 aa, Arabidopsis thaliana
  peptide (1)..(116): Ceres Seq. ID no. 12326784
  misc_feature (28)..(75): Pfam Name: S4 domain Pfam Description: S4 domain
  misc_feature (1)..(116): Homolog of NCBI NO: 24661707 NR Description: Ribosomal protein S9 CG3395-PA
  misc_feature (1)..(116): Homolog of NCBI NO: 13592067 NR Description: ribosomal protein S9 [Rattus norvegicus]
  misc_feature (1)..(114): Homolog of NCBI NO: 15294029 NR Description: 40S ribosomal protein S9 [Ictalurus punctatus]
  misc_feature (1)..(116): Homolog of NCBI NO: 14141193 NR Description: ribosomal protein S9; 40S ribosomal protein S9
  misc_feature (1)..(116): Homolog of NCBI NO: 32417322 NR Description: hypothetical protein [Neurospora crassa]
  misc_feature (1)..(116): Homolog of NCBI NO: 40741183 NR Description: RS9_PODAN 40S ribosomal protein S9 (S7)
  misc_feature (1)..(116): Homolog of NCBI NO: 1710780 NR Description: 40S ribosomal protein S9 (S7)
  misc_feature (1)..(115): Homolog of NCBI NO: 6440857 NR Description: 40S ribosomal protein S9 [Chlamydomonas sp. HS-5]
  misc_feature (1)..(116): Homolog of NCBI NO: 15242241 NR Description: 40S ribosomal protein - like; protein id:
  misc_feature (1)..(116): Homolog of NCBI NO: 15242498 NR Description: 40S ribosomal protein S9-like
MNRYGLLDETQNKLDYVLALTVENFLERRLQTIVFKSGMAKSIHHARVLIRQRHIRVGRQLVNIPSFMVRVESQKHVDFSLTSPFGGGRPGRVKRRNERAGAKKASGGDGDEDDEE

SEQ ID NO: 37502 - DNA, 1246 bp, Arabidopsis thaliana
  misc_feature (1)..(1246): Ceres Seq. ID no. 12488424
  misc_feature: MA Experiment ID: 20000173 Result: Down-regulated in Transcription
  misc_feature: MA Experiment 20000173 PARAMETER Experiment Name: At_42deg_Heat_P Parameter: Age (day) Value: 14
  misc_feature: MA Experiment 20000173 PARAMETER Experiment Name: At_42deg_Heat_P Parameter: Organism Value: A. thaliana
  misc_feature: MA Experiment 20000173 PARAMETER Experiment Name: At_42deg_Heat_P Parameter: Plant Line Value: WS
  misc_feature: MA Experiment 20000173 PARAMETER Experiment Name: At_42deg_Heat_P Parameter: Temperature (deg C) Value: 42 vs. 22
  misc_feature: MA Experiment 20000173 PARAMETER Experiment Name: At_42deg_Heat_P Parameter: Timepoint (hr) Value: 6
  misc_feature: MA Experiment 20000173 PARAMETER Experiment Name: At_42deg_Heat_P Parameter: Tissue Value: Aerial
  misc_feature: MA Experiment ID: 20000180 Result: Down-regulated in Transcription
  misc_feature: MA Experiment 20000180 PARAMETER Experiment Name: At_Germinating_Seeds_P Parameter: Age (hr) Value: 24 vs. 0
  misc_feature: MA Experiment 20000180 PARAMETER Experiment Name: At_Germinating_Seeds_P Parameter: Tissue Value: Germinating Seeds
  misc_feature: MA Experiment ID: 20000184 Result: Down-regulated in Transcription
  misc_feature: MA Experiment 20000184 PARAMETER Experiment Name: At_Shoots__P Parameter: Age (day) Value: 7
  misc_feature: MA Experiment 20000184 PARAMETER Experiment Name: At_Shoots__P Parameter: Tissue Value: Shoots vs. Whole Plant
  misc_feature: MA Experiment ID: 20000211 Result: Up-regulated in Transcription
  misc_feature: MA Experiment 20000211 PARAMETER Experiment Name: At_0.001percent_MeJA__P Parameter: Age (day) Value: 14
  misc_feature: MA Experiment 20000211 PARAMETER Experiment Name: At_0.001percent_MeJA__P Parameter: Organism Value: A. thaliana
  misc_feature: MA Experiment 20000211 PARAMETER Experiment Name: At_0.001percent_MeJA__P Parameter: Plant Line Value: WS
  misc_feature: MA Experiment 20000211 PARAMETER Experiment Name: At_0.001percent_MeJA__P Parameter: Timepoint (hr) Value: 1
  misc_feature: MA Experiment 20000211 PARAMETER Experiment Name: At_0.001percent_MeJA__P Parameter: Tissue Value: Aerial
  misc_feature: MA Experiment 20000211 PARAMETER Experiment Name: At_0.001percent_MeJA__P Parameter: Treatment Value: 0.001percent MeJA vs. No Treatment
  misc_feature: MA Experiment ID: 20000234 Result: Down-regulated in Transcription
  misc_feature: MA Experiment 20000234 PARAMETER Experiment Name: At_Siliques_P Parameter: Age (day) Value: 21
  misc_feature: MA Experiment 20000234 PARAMETER Experiment Name: At_Siliques_P Parameter: Organism Value: A. thaliana
  misc_feature: MA Experiment 20000234 PARAMETER Experiment Name: At_Siliques_P Parameter: Plant Line Value: WS
  misc_feature: MA Experiment 20000234 PARAMETER Experiment Name: At_Siliques_P Parameter: Tissue Value: Less Than 5mm Siliques vs. Whole Plant
  misc_feature: MA Experiment ID: 20000496 Result: Down-regulated in Transcription
  misc_feature: MA Experiment 20000496 PARAMETER Experiment Name: At_Guard_Cells_P Parameter: Harvest Date Value: 7/19/2002
  misc_feature: MA Experiment 20000496 PARAMETER Experiment Name: At_Guard_Cells_P Parameter: Organism Value: Canola
  misc_feature: MA Experiment 20000496 PARAMETER Experiment Name: At_Guard_Cells_P Parameter: Tissue Value: Guard Cells vs. Leaves
  misc_feature: MA Experiment ID: 20001450 Result: Up-regulated in Transcription
  misc_feature: MA Experiment 20001450 PARAMETER Experiment Name: At_Far-red-induction_P Parameter: Age (day) Value: 7
  misc_feature: MA Experiment 20001450 PARAMETER Experiment Name: At_Far-red-induction_P Parameter: Light Value: Far-red vs. White
  misc_feature: MA Experiment 20001450 PARAMETER Experiment Name: At_Far-red-induction_P Parameter: Organism Value: A. thaliana
  misc_feature: MA Experiment 20001450 PARAMETER Experiment Name: At_Far-red-induction_P Parameter: Plant Line Value: Columbia
  misc_feature: MA Experiment 20001450 PARAMETER Experiment Name: At_Far-red-induction_P Parameter: Timepoint (hr) Value: 8
  misc_feature: MA Experiment 20001450 PARAMETER Experiment Name: At_Far-red-induction_P Parameter: Tissue Value: Whole Plant
ctgggtcctccgcaatttgagaatcggagatatctcaagtttcgcaaagtctcgtggatttgatcttcgtctccttgatcgatggattcaccttgagcaatcgttgatcgagcttcgaagatgtcgaatcactccagagatgagcctagtactgccccgaagacagatcaatggtatgatcttgtccttggttcctctgccaaagatgactcctcccataaattctgcactttgcgatatgaatttaagccggcttcaatcgataagaacaggtcaggatcaatgcacaagaagaaggataacagagtttcagttgagtttcagaataaccaaccaggtaaacccaaggtgacatttgaaggtagtagtgaggattacaaagaaagcgatgcggtgttgtttttcgatggggagaagtttcgtttagagaggttgcatcgggctgttacgcagctgcgacatgttaggacacctggtgaatctgctgcggcttctcaatctgcggtgcctgtggagcatcggttatctcctgttggtcgtgctgctaaatctccacaagtcaatagaagtttgcttcctgatgtgcctgttgaggtggaaagaatcgaaattgggaagccagagaactcagctgaacctgccaacactggaaacgtgcctgcaacctcaccagtcgaggacaagaacgatgatggagatgagcatcaagagatcgatctggttgaaatatttggctcatttacaccagagaacgacaatgcagagaaagagaacgctgatggtggagaatatgtagaaagcttaaataaacagcttagcatgacggaagaagagattgcagatgtagatgacgatagcggcggtgaaggagaaaaaggtcttaacgcagcagaagcacttagagcacaagtgaacgcagaggtgcaaaagagtcaaacctcaagctcaagcagtagcagtggaagtagcagcggaagtgacagtgatggtcgtagcaaaagcgtaagcagcggaagtggcagcggcggccaaagcagtagtggaagcagtagccgtggaagtggaggaagtgacgatgaagatgaagtcaactccgtataacaaccagctcccaacaactttgtcaaacaatatttccatatttgagacactttgtctgaataatttggttgaagaatccaaaagggtaaaaatttatgttttactacgaaagtagtaaatacaaatgatataaagatccagttac

SEQ ID NO: 37503 - protein, 326 aa, Arabidopsis thaliana
  peptide (1)..(326): Ceres Seq. ID no. 12488425
  misc_feature (226)..(314): Pfam Name: Lipoprotein amino terminal region Pfam Description: Lipoprotein amino terminal region
  misc_feature (168)..(321): Homolog of NCBI NO: 39979238 NR Description: putative protein [Neurospora crassa]
  misc_feature (223)..(326): Homolog of NCBI NO: 21357919 NR Description: CG5516-PA [Drosophila melanogaster]
  misc_feature (21)..(243): Homolog of NCBI NO: 21361796 NR Description: ELL-associated factor 2
  misc_feature (242)..(300): Homolog of NCBI NO: 20129745 NR Description: CG11166-PD [Drosophila melanogaster]
  misc_feature (20)..(116): Homolog of NCBI NO: 20129745 NR Description: CG11166-PD [Drosophila melanogaster]
  misc_feature (159)..(320): Homolog of NCBI NO: 15240826 NR Description: putative protein; protein id: At5g38050.1
  misc_feature (1)..(288): Homolog of NCBI NO: 15240826 NR Description: putative protein; protein id: At5g38050.1
  misc_feature (1)..(321): Homolog of NCBI NO: 34914534 NR Description: OSJNBa0094H06.13 [Oryza sativa (japonica
  misc_feature (1)..(326): Homolog of NCBI NO: 18409756 NR Description: expressed protein
MSNHSRDEPSTAPKTDQWYDLVLGSSAKDDSSHKFCTLRYEFKPASIDKNRSGSMHKKKDNRVSVEFQNNQPGKPKVTFEGSSEDYKESDAVLFFDGEKFRLERLHRAVTQLRHVRTPGESAAASQSAVPVEHRLSPVGRAAKSPQVNRSLLPDVPVEVERIEIGKPENSAEPANTGNVPATSPVEDKNDDGDEHQEIDLVEIFGSFTPENDNAEKENADGGEYVESLNKQLSMTEEEIADVDDDSGGEGEKGLNAAEALRAQVNAEVQKSQTSSSSSSSGSSSGSDSDGRSKSVSSGSGSGGQSSSGSSSRGSGGSDDEDEVNSV

SEQ ID NO: 37504 - protein, 272 aa, Arabidopsis thaliana
  peptide (1)..(272): Ceres Seq. ID no. 12488426
  misc_feature (172)..(260): Pfam Name: Lipoprotein amino terminal region Pfam Description: Lipoprotein amino terminal region
  misc_feature (114)..(267): Homolog of NCBI NO: 39979238 NR Description: putative protein [Neurospora crassa]
  misc_feature (169)..(272): Homolog of NCBI NO: 21357919 NR Description: CG5516-PA [Drosophila melanogaster]
  misc_feature (1)..(189): Homolog of NCBI NO: 21361796 NR Description: ELL-associated factor 2
  misc_feature (188)..(246): Homolog of NCBI NO: 20129745 NR Description: CG11166-PD [Drosophila melanogaster]
  misc_feature (1)..(62): Homolog of NCBI NO: 20129745 NR Description: CG11166-PD [Drosophila melanogaster]
  misc_feature (105)..(266): Homolog of NCBI NO: 15240826 NR Description: putative protein; protein id: At5g38050.1
  misc_feature (1)..(234): Homolog of NCBI NO: 15240826 NR Description: putative protein; protein id: At5g38050.1
  misc_feature (1)..(267): Homolog of NCBI NO: 34914534 NR Description: OSJNBa0094H06.13 [Oryza sativa (japonica
  misc_feature (1)..(272): Homolog of NCBI NO: 18409756 NR Description: expressed protein
MHKKKDNRVSVEFQNNQPGKPKVTFEGSSEDYKESDAVLFFDGEKFRLERLHRAVTQLRHVRTPGESAAASQSAVPVEHRLSPVGRAAKSPQVNRSLLPDVPVEVERIEIGKPENSAEPANTGNVPATSPVEDKNDDGDEHQEIDLVEIFGSFTPENDNAEKENADGGEYVESLNKQLSMTEEEIADVDDDSGGEGEKGLNAAEALRAQVNAEVQKSQTSSSSSSSGSSSGSDSDGRSKSVSSGSGSGGQSSSGSSSRGSGGSDDEDEVNSV

SEQ ID NO: 37505 - DNA, 1142 bp, Arabidopsis thaliana
  misc_feature (1)..(1142): Ceres Seq. ID no. 13492937
  misc_feature: MA Experiment ID: 108434 Result: Down-regulated in Transcription
  misc_feature: MA Experiment 108434 PARAMETER Experiment Name: At_Root_Tips_cDNA_P Parameter: Tissue Value: Root Tips
  misc_feature: MA Experiment ID: 108463 Result: Up-regulated in Transcription
  misc_feature: MA Experiment 108463 PARAMETER Experiment Name: At_Germinating_Seeds_cDNA_P Parameter: Age (day) Value: 3 vs. 0
  misc_feature: MA Experiment 108463 PARAMETER Experiment Name: At_Germinating_Seeds_cDNA_P Parameter: Tissue Value: Germinating Seeds
  misc_feature: MA Experiment ID: 108464 Result: Up-regulated in Transcription
  misc_feature: MA Experiment 108464 PARAMETER Experiment Name: At_Germinating_Seeds_cDNA_P Parameter: Age (day) Value: 4 vs. 0
  misc_feature: MA Experiment 108464 PARAMETER Experiment Name: At_Germinating_Seeds_cDNA_P Parameter: Tissue Value: Germinating Seeds
  misc_feature: MA Experiment ID: 108474 Result: Down-regulated in Transcription
  misc_feature: MA Experiment 108474 PARAMETER Experiment Name: At_Drought_Flowers_cDNA_P Parameter: Timepoint (hr) Value: null
  misc_feature: MA Experiment 108474 PARAMETER Experiment Name: At_Drought_Flowers_cDNA_P Parameter: Treatment Value: Drought vs. No Drought
  misc_feature: MA Experiment ID: 108488 Result: Down-regulated in Transcription
  misc_feature: MA Experiment ID: 108489 Result: Up-regulated in Transcription
  misc_feature: MA Experiment ID: 108501 Result: Down-regulated in Transcription
  misc_feature: MA Experiment 108501 PARAMETER Experiment Name: At_ap2_floral_buds_cDNA_P Parameter: Plant Line Value: ap2 (Ler.)
  misc_feature: MA Experiment 108501 PARAMETER Experiment Name: At_ap2_floral_buds_cDNA_P Parameter: Tissue Value: Closed Flower
  misc_feature: MA Experiment ID: 108561 Result: Up-regulated in Transcription
  misc_feature: MA Experiment 108561 PARAMETER Experiment Name: At_100uM_ABA_cDNA_P Parameter: Timepoint (hr) Value: 6
  misc_feature: MA Experiment 108561 PARAMETER Experiment Name: At_100uM_ABA_cDNA_P Parameter: Tissue Value: Aerial
  misc_feature: MA Experiment 108561 PARAMETER Experiment Name: At_100uM_ABA_cDNA_P Parameter: Treatment Value: 100uM ABA vs. No Treatment
  misc_feature: MA Experiment ID: 108572 Result: Up-regulated in Transcription
  misc_feature: MA Experiment 108572 PARAMETER Experiment Name: At_Drought_cDNA_P Parameter: Timepoint (hr) Value: 1
  misc_feature: MA Experiment 108572 PARAMETER Experiment Name: At_Drought_cDNA_P Parameter: Tissue Value: Aerial
  misc_feature: MA Experiment 108572 PARAMETER Experiment Name: At_Drought_cDNA_P Parameter: Treatment Value: Drought vs. No Drought
  misc_feature: MA Experiment ID: 108573 Result: Up-regulated in Transcription
  misc_feature: MA Experiment 108573 PARAMETER Experiment Name: At_Drought_cDNA_P Parameter: Timepoint (hr) Value: 6
  misc_feature: MA Experiment 108573 PARAMETER Experiment Name: At_Drought_cDNA_P Parameter: Tissue Value: Aerial
  misc_feature: MA Experiment 108573 PARAMETER Experiment Name: At_Drought_cDNA_P Parameter: Treatment Value: Drought vs. No Drought
  misc_feature: MA Experiment ID: 108585 Result: Up-regulated in Transcription
  misc_feature: MA Experiment 108585 PARAMETER Experiment Name: At_5mM_NaNP_cDNA_P Parameter: Timepoint (hr) Value: 6
  misc_feature: MA Experiment 108585 PARAMETER Experiment Name: At_5mM_NaNP_cDNA_P Parameter: Tissue Value: Aerial
  misc_feature: MA Experiment 108585 PARAMETER Experiment Name: At_5mM_NaNP_cDNA_P Parameter: Treatment Value: null
  misc_feature: MA Experiment ID: 108594 Result: Down-regulated in Transcription
  misc_feature: MA Experiment 108594 PARAMETER Experiment Name: At_Ler-rhl_Root_cDNA_P Parameter: Plant Line Value: null
  misc_feature: MA Experiment ID: 108595 Result: Up-regulated in Transcription
  misc_feature: MA Experiment 108595 PARAMETER Experiment Name: At_Ler-pi_Ovule_cDNA_P Parameter: Plant Line Value: null
  misc_feature: MA Experiment ID: 108605 Result: Up-regulated in Transcription
  misc_feature: MA Experiment 108605 PARAMETER Experiment Name: At_100uM_ABA_cDNA_P Parameter: Timepoint (hr) Value: 6
  misc_feature: MA Experiment 108605 PARAMETER Experiment Name: At_100uM_ABA_cDNA_P Parameter: Tissue Value: Aerial
  misc_feature: MA Experiment 108605 PARAMETER Experiment Name: At_100uM_ABA_cDNA_P Parameter: Treatment Value: 100uM ABA vs. No Treatment
  misc_feature: MA Experiment ID: 108607 Result: Up-regulated in Transcription
  misc_feature: MA Experiment 108607 PARAMETER Experiment Name: At_100uM_ABA_cDNA_P Parameter: Timepoint (hr) Value: 4
  misc_feature: MA Experiment 108607 PARAMETER Experiment Name: At_100uM_ABA_cDNA_P Parameter: Tissue Value: Aerial
  misc_feature: MA Experiment 108607 PARAMETER Experiment Name: At_100uM_ABA_cDNA_P Parameter: Treatment Value: 100uM ABA vs. No Treatment
  misc_feature: MA Experiment ID: 108608 Result: Up-regulated in Transcription
  misc_feature: MA Experiment 108608 PARAMETER Experiment Name: At_100uM_ABA_cDNA_P Parameter: Timepoint (hr) Value: 1
  misc_feature: MA Experiment 108608 PARAMETER Experiment Name: At_100uM_ABA_cDNA_P Parameter: Tissue Value: Aerial
  misc_feature: MA Experiment 108608 PARAMETER Experiment Name: At_100uM_ABA_cDNA_P Parameter: Treatment Value: 100uM ABA vs. No Treatment
  misc_feature: MA Experiment ID: 108668 Result: Up-regulated in Transcription
  misc_feature: MA Experiment 108668 PARAMETER Experiment Name: At_2mM_SA_cDNA_P Parameter: Plant Line Value: WS
  misc_feature: MA Experiment 108668 PARAMETER Experiment Name: At_2mM_SA_cDNA_P Parameter: Timepoint (hr) Value: 6
  misc_feature: MA Experiment 108668 PARAMETER Experiment Name: At_2mM_SA_cDNA_P Parameter: Treatment Value: 2mM SA vs. No Treatment
  misc_feature: MA Experiment ID: 20000069 Result: Up-regulated in Transcription
  misc_feature: MA Experiment 20000069 PARAMETER Experiment Name: At_100uM_ABA_Mutants_cDNA_P Parameter: Plant Line Value: CS23
  misc_feature: MA Experiment 20000069 PARAMETER Experiment Name: At_100uM_ABA_Mutants_cDNA_P Parameter: Timepoint (hr) Value: 6
  misc_feature: MA Experiment 20000069 PARAMETER Experiment Name: At_100uM_ABA_Mutants_cDNA_P Parameter: Tissue Value: Aerial
  misc_feature: MA Experiment 20000069 PARAMETER Experiment Name: At_100uM_ABA_Mutants_cDNA_P Parameter: Treatment Value: 100uM ABA vs. No Treatment
  misc_feature: MA Experiment ID: 20000070 Result: Up-regulated in Transcription
  misc_feature: MA Experiment 20000070 PARAMETER Experiment Name: At_100uM_ABA_Mutants_cDNA_P Parameter: Plant Line Value: CS24
  misc_feature: MA Experiment 20000070 PARAMETER Experiment Name: At_100uM_ABA_Mutants_cDNA_P Parameter: Timepoint (hr) Value: 6
  misc_feature: MA Experiment 20000070 PARAMETER Experiment Name: At_100uM_ABA_Mutants_cDNA_P Parameter: Tissue Value: Aerial
  misc_feature: MA Experiment 20000070 PARAMETER Experiment Name: At_100uM_ABA_Mutants_cDNA_P Parameter: Treatment Value: 100uM ABA vs. No Treatment
  misc_feature: MA Experiment ID: 20000071 Result: Up-regulated in Transcription
  misc_feature: MA Experiment 20000071 PARAMETER Experiment Name: At_100uM_ABA_Mutants_cDNA_P Parameter: Plant Line Value: CS8104
  misc_feature: MA Experiment 20000071 PARAMETER Experiment Name: At_100uM_ABA_Mutants_cDNA_P Parameter: Timepoint (hr) Value: 6
  misc_feature: MA Experiment 20000071 PARAMETER Experiment Name: At_100uM_ABA_Mutants_cDNA_P Parameter: Tissue Value: Aerial
  misc_feature: MA Experiment 20000071 PARAMETER Experiment Name: At_100uM_ABA_Mutants_cDNA_P Parameter: Treatment Value: 100uM ABA vs. No Treatment
  misc_feature: MA Experiment ID: 20000072 Result: Up-regulated in Transcription
  misc_feature: MA Experiment 20000072 PARAMETER Experiment Name: At_100uM_ABA_Mutants_cDNA_P Parameter: Plant Line Value: CS8105
  misc_feature: MA Experiment 20000072 PARAMETER Experiment Name: At_100uM_ABA_Mutants_cDNA_P Parameter: Timepoint (hr) Value: 6
  misc_feature: MA Experiment 20000072 PARAMETER Experiment Name: At_100uM_ABA_Mutants_cDNA_P Parameter: Tissue Value: Aerial
  misc_feature: MA Experiment 20000072 PARAMETER Experiment Name: At_100uM_ABA_Mutants_cDNA_P Parameter: Treatment Value: 100uM ABA vs. No Treatment
  misc_feature: MA Experiment ID: 20000087 Result: Up-regulated in Transcription
  misc_feature: MA Experiment 20000087 PARAMETER Experiment Name: At_100uM_ABA_Mutants_cDNA_P Parameter: Plant Line Value: WS
  misc_feature: MA Experiment 20000087 PARAMETER Experiment Name: At_100uM_ABA_Mutants_cDNA_P Parameter: Timepoint (hr) Value: 6
  misc_feature: MA Experiment 20000087 PARAMETER Experiment Name: At_100uM_ABA_Mutants_cDNA_P Parameter: Tissue Value: Aerial
  misc_feature: MA Experiment 20000087 PARAMETER Experiment Name: At_100uM_ABA_Mutants_cDNA_P Parameter: Treatment Value: 100uM ABA vs. No Treatment
  misc_feature: MA Experiment ID: 20000089 Result: Down-regulated in Transcription
  misc_feature: MA Experiment ID: 20000111 Result: Up-regulated in Transcription
  misc_feature: MA Experiment 20000111 PARAMETER Experiment Name: At_42deg_Heat_cDNA_P Parameter: Temperature (deg C) Value: 42 vs. 22
  misc_feature: MA Experiment 20000111 PARAMETER Experiment Name: At_42deg_Heat_cDNA_P Parameter: Timepoint (hr) Value: 6
  misc_feature: MA Experiment 20000111 PARAMETER Experiment Name: At_42deg_Heat_cDNA_P Parameter: Tissue Value: Aerial
  misc_feature: MA Experiment ID: 20000113 Result: Up-regulated in Transcription
  misc_feature: MA Experiment 20000113 PARAMETER Experiment Name: At_42deg_Heat_cDNA_P Parameter: Temperature (deg C) Value: 42 vs. 22
  misc_feature: MA Experiment 20000113 PARAMETER Experiment Name: At_42deg_Heat_cDNA_P Parameter: Timepoint (hr) Value: 8
  misc_feature: MA Experiment 20000113 PARAMETER Experiment Name: At_42deg_Heat_cDNA_P Parameter: Tissue Value: Aerial
  misc_feature: MA Experiment ID: 20000117 Result: Up-regulated in Transcription
  misc_feature: MA Experiment 20000117 PARAMETER Experiment Name: At_100uM_ABA_Mutants_cDNA_P Parameter: Plant Line Value: Columbia
  misc_feature: MA Experiment 20000117 PARAMETER Experiment Name: At_100uM_ABA_Mutants_cDNA_P Parameter: Timepoint (hr) Value: 6
  misc_feature: MA Experiment 20000117 PARAMETER Experiment Name: At_100uM_ABA_Mutants_cDNA_P Parameter: Tissue Value: Aerial
  misc_feature: MA Experiment 20000117 PARAMETER Experiment Name: At_100uM_ABA_Mutants_cDNA_P Parameter: Treatment Value: 100uM ABA vs. No Treatment
  misc_feature: MA Experiment ID: 20000166 Result: Up-regulated in Transcription
  misc_feature: MA Experiment 20000166 PARAMETER Experiment Name: At_100uM_ABA_P Parameter: Age (day) Value: 14
  misc_feature: MA Experiment 20000166 PARAMETER Experiment Name: At_100uM_ABA_P Parameter: Organism Value: A. thaliana
  misc_feature: MA Experiment 20000166 PARAMETER Experiment Name: At_100uM_ABA_P Parameter: Plant Line Value: WS
  misc_feature: MA Experiment 20000166 PARAMETER Experiment Name: At_100uM_ABA_P Parameter: Timepoint (hr) Value: 1
  misc_feature: MA Experiment 20000166 PARAMETER Experiment Name: At_100uM_ABA_P Parameter: Tissue Value: Aerial
  misc_feature: MA Experiment 20000166 PARAMETER Experiment Name: At_100uM_ABA_P Parameter: Treatment Value: 100uM ABA vs. No Treatment
  misc_feature: MA Experiment ID: 20000169 Result: Up-regulated in Transcription
  misc_feature: MA Experiment 20000169 PARAMETER Experiment Name: At_100uM_ABA_P Parameter: Age (day) Value: 14
  misc_feature: MA Experiment 20000169 PARAMETER Experiment Name: At_100uM_ABA_P Parameter: Organism Value: A. thaliana
  misc_feature: MA Experiment 20000169 PARAMETER Experiment Name: At_100uM_ABA_P Parameter: Plant Line Value: WS
  misc_feature: MA Experiment 20000169 PARAMETER Experiment Name: At_100uM_ABA_P Parameter: Timepoint (hr) Value: 6
  misc_feature: MA Experiment 20000169 PARAMETER Experiment Name: At_100uM_ABA_P Parameter: Tissue Value: Aerial
  misc_feature: MA Experiment 20000169 PARAMETER Experiment Name: At_100uM_ABA_P Parameter: Treatment Value: 100uM ABA vs. No Treatment
  misc_feature: MA Experiment ID: 20000173 Result: Up-regulated in Transcription
  misc_feature: MA Experiment 20000173 PARAMETER Experiment Name: At_42deg_Heat_P Parameter: Age (day) Value: 14
  misc_feature: MA Experiment 20000173 PARAMETER Experiment Name: At_42deg_Heat_P Parameter: Organism Value: A. thaliana
  misc_feature: MA Experiment 20000173 PARAMETER Experiment Name: At_42deg_Heat_P Parameter: Plant Line Value: WS
  misc_feature: MA Experiment 20000173 PARAMETER Experiment Name: At_42deg_Heat_P Parameter: Temperature (deg C) Value: 42 vs. 22
  misc_feature: MA Experiment 20000173 PARAMETER Experiment Name: At_42deg_Heat_P Parameter: Timepoint (hr) Value: 6
  misc_feature: MA Experiment 20000173 PARAMETER Experiment Name: At_42deg_Heat_P Parameter: Tissue Value: Aerial
  misc_feature: MA Experiment ID: 20000182 Result: Up-regulated in Transcription
  misc_feature: MA Experiment 20000182 PARAMETER Experiment Name: At_2mM_SA_P Parameter: Age (day) Value: 14
  misc_feature: MA Experiment 20000182 PARAMETER Experiment Name: At_2mM_SA_P Parameter: Organism Value: A. thaliana
  misc_feature: MA Experiment 20000182 PARAMETER Experiment Name: At_2mM_SA_P Parameter: Plant Line Value: WS
  misc_feature: MA Experiment 20000182 PARAMETER Experiment Name: At_2mM_SA_P Parameter: Timepoint (hr) Value: 6
  misc_feature: MA Experiment 20000182 PARAMETER Experiment Name: At_2mM_SA_P Parameter: Tissue Value: Aerial
  misc_feature: MA Experiment 20000182 PARAMETER Experiment Name: At_2mM_SA_P Parameter: Treatment Value: 2mM SA vs. No Treatment
  misc_feature: MA Experiment ID: 20000184 Result: Down-regulated in Transcription
  misc_feature: MA Experiment 20000184 PARAMETER Experiment Name: At_Shoots__P Parameter: Age (day) Value: 7
  misc_feature: MA Experiment 20000184 PARAMETER Experiment Name: At_Shoots__P Parameter: Tissue Value: Shoots vs. Whole Plant
  misc_feature: MA Experiment ID: 20000227 Result: Down-regulated in Transcription
  misc_feature: MA Experiment 20000227 PARAMETER Experiment Name: At_Root-Tips-vs-Tops_P Parameter: Tissue Value: Root Tips vs. Root Tops
  misc_feature: MA Experiment ID: 20000234 Result: Down-regulated in Transcription
  misc_feature: MA Experiment 20000234 PARAMETER Experiment Name: At_Siliques_P Parameter: Age (day) Value: 21
  misc_feature: MA Experiment 20000234 PARAMETER Experiment Name: At_Siliques_P Parameter: Organism Value: A. thaliana
  misc_feature: MA Experiment 20000234 PARAMETER Experiment Name: At_Siliques_P Parameter: Plant Line Value: WS
  misc_feature: MA Experiment 20000234 PARAMETER Experiment Name: At_Siliques_P Parameter: Tissue Value: Less Than 5mm Siliques vs. Whole Plant
  misc_feature: MA Experiment ID: 20000235 Result: Down-regulated in Transcription
  misc_feature: MA Experiment 20000235 PARAMETER Experiment Name: At_Siliques_P Parameter: Age (day) Value: 21
  misc_feature: MA Experiment 20000235 PARAMETER Experiment Name: At_Siliques_P Parameter: Organism Value: A. thaliana
  misc_feature: MA Experiment 20000235 PARAMETER Experiment Name: At_Siliques_P Parameter: Plant Line Value: WS
  misc_feature: MA Experiment 20000235 PARAMETER Experiment Name: At_Siliques_P Parameter: Tissue Value: 5-10mm Siliques vs. Whole Plant
  misc_feature: MA Experiment ID: 20000265 Result: Down-regulated in Transcription
  misc_feature: MA Experiment 20000265 PARAMETER Experiment Name: At_Open_Flower_P Parameter: Age (day) Value: 21
  misc_feature: MA Experiment 20000265 PARAMETER Experiment Name: At_Open_Flower_P Parameter: Plant Line Value: WS
  misc_feature: MA Experiment 20000265 PARAMETER Experiment Name: At_Open_Flower_P Parameter: Tissue Value: Closed Flower vs. Whole Plant
  misc_feature: MA Experiment ID: 20000267 Result: Up-regulated in Transcription
  misc_feature: MA Experiment 20000267 PARAMETER Experiment Name: At_Drought_P Parameter: Age (day) Value: 7
  misc_feature: MA Experiment 20000267 PARAMETER Experiment Name: At_Drought_P Parameter: Organism Value: A. thaliana
  misc_feature: MA Experiment 20000267 PARAMETER Experiment Name: At_Drought_P Parameter: Plant Line Value: WS
  misc_feature: MA Experiment 20000267 PARAMETER Experiment Name: At_Drought_P Parameter: Timepoint (hr) Value: 6
  misc_feature: MA Experiment 20000267 PARAMETER Experiment Name: At_Drought_P Parameter: Tissue Value: Whole Plant
  misc_feature: MA Experiment 20000267 PARAMETER Experiment Name: At_Drought_P Parameter: Treatment Value: Drought vs. No Drought
  misc_feature: MA Experiment ID: 20000286 Result: Down-regulated in Transcription
  misc_feature: MA Experiment 20000286 PARAMETER Experiment Name: At_Open_Flower_P Parameter: Age (day) Value: 21
  misc_feature: MA Experiment 20000286 PARAMETER Experiment Name: At_Open_Flower_P Parameter: Plant Line Value: WS
  misc_feature: MA Experiment 20000286 PARAMETER Experiment Name: At_Open_Flower_P Parameter: Tissue Value: Half Open vs. Whole Plant
  misc_feature: MA Experiment ID: 20000436 Result: Up-regulated in Transcription
  misc_feature: MA Experiment 20000436 PARAMETER Experiment Name: At_Drought_P Parameter: Age (day) Value: 7
  misc_feature: MA Experiment 20000436 PARAMETER Experiment Name: At_Drought_P Parameter: Organism Value: A. thaliana
  misc_feature: MA Experiment 20000436 PARAMETER Experiment Name: At_Drought_P Parameter: Plant Line Value: WS
  misc_feature: MA Experiment 20000436 PARAMETER Experiment Name: At_Drought_P Parameter: Timepoint (hr) Value: 12
  misc_feature: MA Experiment 20000436 PARAMETER Experiment Name: At_Drought_P Parameter: Tissue Value: Whole Plant
  misc_feature: MA Experiment 20000436 PARAMETER Experiment Name: At_Drought_P Parameter: Treatment Value: Drought vs. No Drought
  misc_feature: MA Experiment ID: 20000437 Result: Up-regulated in Transcription
  misc_feature: MA Experiment 20000437 PARAMETER Experiment Name: At_Drought_P Parameter: Age (day) Value: 8
  misc_feature: MA Experiment 20000437 PARAMETER Experiment Name: At_Drought_P Parameter: Organism Value: A. thaliana
  misc_feature: MA Experiment 20000437 PARAMETER Experiment Name: At_Drought_P Parameter: Plant Line Value: WS
  misc_feature: MA Experiment 20000437 PARAMETER Experiment Name: At_Drought_P Parameter: Timepoint (hr) Value: 24
  misc_feature: MA Experiment 20000437 PARAMETER Experiment Name: At_Drought_P Parameter: Tissue Value: Whole Plant
  misc_feature: MA Experiment 20000437 PARAMETER Experiment Name: At_Drought_P Parameter: Treatment Value: Drought vs. No Drought
  misc_feature: MA Experiment ID: 20000438 Result: Down-regulated in Transcription
  misc_feature: MA Experiment 20000438 PARAMETER Experiment Name: At_Shoots__P Parameter: Age (day) Value: 14
  misc_feature: MA Experiment 20000438 PARAMETER Experiment Name: At_Shoots__P Parameter: Tissue Value: Shoots vs. Whole Plant
  misc_feature: MA Experiment ID: 20000439 Result: Down-regulated in Transcription
  misc_feature: MA Experiment 20000439 PARAMETER Experiment Name: At_Roots__P Parameter: Age (day) Value: 14 vs. 21
  misc_feature: MA Experiment 20000439 PARAMETER Experiment Name: At_Roots__P Parameter: Organism Value: A. thaliana
  misc_feature: MA Experiment 20000439 PARAMETER Experiment Name: At_Roots__P Parameter: Tissue Value: Roots vs. Whole Plant
  misc_feature: MA Experiment ID: 20000460 Result: Up-regulated in Transcription
  misc_feature: MA Experiment 20000460 PARAMETER Experiment Name: At_10percent_PEG_P Parameter: Age (day) Value: 12
  misc_feature: MA Experiment 20000460 PARAMETER Experiment Name: At_10percent_PEG_P Parameter: Organism Value: A. thaliana
  misc_feature: MA Experiment 20000460 PARAMETER Experiment Name: At_10percent_PEG_P Parameter: Plant Line Value: WS
  misc_feature: MA Experiment 20000460 PARAMETER Experiment Name: At_10percent_PEG_P Parameter: Timepoint (day) Value: 12
  misc_feature: MA Experiment 20000460 PARAMETER Experiment Name: At_10percent_PEG_P Parameter: Tissue Value: Whole Plant
  misc_feature: MA Experiment 20000460 PARAMETER Experiment Name: At_10percent_PEG_P Parameter: Treatment Value: 10percent PEG vs. No Treatment
  misc_feature: MA Experiment ID: 20000495 Result: Down-regulated in Transcription
  misc_feature: MA Experiment 20000495 PARAMETER Experiment Name: At_Guard_Cells_P Parameter: Harvest Date Value: 8/2/2002
  misc_feature: MA Experiment 20000495 PARAMETER Experiment Name: At_Guard_Cells_P Parameter: Organism Value: A. thaliana
  misc_feature: MA Experiment 20000495 PARAMETER Experiment Name: At_Guard_Cells_P Parameter: Tissue Value: Guard Cells vs. Leaves
  misc_feature: MA Experiment ID: 20000573 Result: Down-regulated in Transcription
  misc_feature: MA Experiment 20000573 PARAMETER Experiment Name: At_100uM_ABA_Mutants__P Parameter: Organism Value: A. thaliana
  misc_feature: MA Experiment 20000573 PARAMETER Experiment Name: At_100uM_ABA_Mutants__P Parameter: Plant Line Value: CS22 vs. Ler wt
  misc_feature: MA Experiment 20000573 PARAMETER Experiment Name: At_100uM_ABA_Mutants__P Parameter: Timepoint (hr) Value: N/A
  misc_feature: MA Experiment 20000573 PARAMETER Experiment Name: At_100uM_ABA_Mutants__P Parameter: Tissue Value: Whole Plant
  misc_feature: MA Experiment 20000573 PARAMETER Experiment Name: At_100uM_ABA_Mutants__P Parameter: Treatment Value: None
  misc_feature: MA Experiment ID: 20000574 Result: Down-regulated in Transcription
  misc_feature: MA Experiment 20000574 PARAMETER Experiment Name: At_100uM_ABA_Mutants__P Parameter: Organism Value: A. thaliana
  misc_feature: MA Experiment 20000574 PARAMETER Experiment Name: At_100uM_ABA_Mutants__P Parameter: Plant Line Value: CS23 vs. Ler wt
  misc_feature: MA Experiment 20000574 PARAMETER Experiment Name: At_100uM_ABA_Mutants__P Parameter: Timepoint (hr) Value: N/A
  misc_feature: MA Experiment 20000574 PARAMETER Experiment Name: At_100uM_ABA_Mutants__P Parameter: Tissue Value: Whole Plant
  misc_feature: MA Experiment 20000574 PARAMETER Experiment Name: At_100uM_ABA_Mutants__P Parameter: Treatment Value: None
  misc_feature: MA Experiment ID: 20000794 Result: Up-regulated in Transcription
  misc_feature: MA Experiment 20000794 PARAMETER Experiment Name: At_Petals_P Parameter: Age (day) Value: 23-25 days
  misc_feature: MA Experiment 20000794 PARAMETER Experiment Name: At_Petals_P Parameter: Plant Line Value: WS
  misc_feature: MA Experiment 20000794 PARAMETER Experiment Name: At_Petals_P Parameter: Tissue Value: Petals vs. Whole plant
  misc_feature: MA Experiment ID: 20001247 Result: Up-regulated in Transcription
  misc_feature: MA Experiment 20001247 PARAMETER Experiment Name: At_Far-red-induction_P Parameter: Age (day) Value: 7
  misc_feature: MA Experiment 20001247 PARAMETER Experiment Name: At_Far-red-induction_P Parameter: Light Value: Far-red vs. White
  misc_feature: MA Experiment 20001247 PARAMETER Experiment Name: At_Far-red-induction_P Parameter: Organism Value: A. thaliana
  misc_feature: MA Experiment 20001247 PARAMETER Experiment Name: At_Far-red-induction_P Parameter: Plant Line Value: Columbia
  misc_feature: MA Experiment 20001247 PARAMETER Experiment Name: At_Far-red-induction_P Parameter: Timepoint (hr) Value: 1
  misc_feature: MA Experiment 20001247 PARAMETER Experiment Name: At_Far-red-induction_P Parameter: Tissue Value: Whole Plant
  misc_feature: MA Experiment ID: 20001248 Result: Up-regulated in Transcription
  misc_feature: MA Experiment 20001248 PARAMETER Experiment Name: At_Far-red-induction_P Parameter: Age (day) Value: 7
  misc_feature: MA Experiment 20001248 PARAMETER Experiment Name: At_Far-red-induction_P Parameter: Light Value: Far-red vs. White
  misc_feature: MA Experiment 20001248 PARAMETER Experiment Name: At_Far-red-induction_P Parameter: Organism Value: A. thaliana
  misc_feature: MA Experiment 20001248 PARAMETER Experiment Name: At_Far-red-induction_P Parameter: Plant Line Value: Columbia
  misc_feature: MA Experiment 20001248 PARAMETER Experiment Name: At_Far-red-induction_P Parameter: Timepoint (hr) Value: 4
  misc_feature: MA Experiment 20001248 PARAMETER Experiment Name: At_Far-red-induction_P Parameter: Tissue Value: Whole Plant
  misc_feature: MA Experiment ID: 20001451 Result: Up-regulated in Transcription
  misc_feature: MA Experiment 20001451 PARAMETER Experiment Name: At_Far-red-induction_P Parameter: Age (day) Value: 7
  misc_feature: MA Experiment 20001451 PARAMETER Experiment Name: At_Far-red-induction_P Parameter: Light Value: Far-red vs. White
  misc_feature: MA Experiment 20001451 PARAMETER Experiment Name: At_Far-red-induction_P Parameter: Organism Value: A. thaliana
  misc_feature: MA Experiment 20001451 PARAMETER Experiment Name: At_Far-red-induction_P Parameter: Plant Line Value: Columbia
  misc_feature: MA Experiment 20001451 PARAMETER Experiment Name: At_Far-red-induction_P Parameter: Timepoint (hr) Value: 24
  misc_feature: MA Experiment 20001451 PARAMETER Experiment Name: At_Far-red-induction_P Parameter: Tissue Value: Whole Plant
  misc_feature: MA Experiment ID: 20001554 Result: Up-regulated in Transcription
  misc_feature: MA Experiment 20001554 PARAMETER Experiment Name: At_Drought_Soil_Dry_P Parameter: Age (day) Value: 21
  misc_feature: MA Experiment 20001554 PARAMETER Experiment Name: At_Drought_Soil_Dry_P Parameter: Organism Value: A. thaliana
  misc_feature: MA Experiment 20001554 PARAMETER Experiment Name: At_Drought_Soil_Dry_P Parameter: Plant Line Value: WS
  misc_feature: MA Experiment 20001554 PARAMETER Experiment Name: At_Drought_Soil_Dry_P Parameter: Post Timepoint (hr) Value: None
  misc_feature: MA Experiment 20001554 PARAMETER Experiment Name: At_Drought_Soil_Dry_P Parameter: Post-Treatment Value: None
  misc_feature: MA Experiment 20001554 PARAMETER Experiment Name: At_Drought_Soil_Dry_P Parameter: Timepoint (day) Value: 7
  misc_feature: MA Experiment 20001554 PARAMETER Experiment Name: At_Drought_Soil_Dry_P Parameter: Treatment Value: Drought vs. No Drought
  misc_feature: MA Experiment ID: 20001904 Result: Up-regulated in Transcription
  misc_feature: MA Experiment 20001904 PARAMETER Experiment Name: At_Drought_Reproduction_P Parameter: Age (day) Value: 37
  misc_feature: MA Experiment 20001904 PARAMETER Experiment Name: At_Drought_Reproduction_P Parameter: Organism Value: A. thaliana
  misc_feature: MA Experiment 20001904 PARAMETER Experiment Name: At_Drought_Reproduction_P Parameter: Plant Line Value: WS
  misc_feature: MA Experiment 20001904 PARAMETER Experiment Name: At_Drought_Reproduction_P Parameter: Timepoint (day) Value: 7
  misc_feature: MA Experiment 20001904 PARAMETER Experiment Name: At_Drought_Reproduction_P Parameter: Tissue Value: Rosettes
  misc_feature: MA Experiment 20001904 PARAMETER Experiment Name: At_Drought_Reproduction_P Parameter: Treatment Value: Drought vs. No Drought
  misc_feature: MA Experiment ID: 20001905 Result: Up-regulated in Transcription
  misc_feature: MA Experiment 20001905 PARAMETER Experiment Name: At_Drought_Reproduction_P Parameter: Age (day) Value: 40
  misc_feature: MA Experiment 20001905 PARAMETER Experiment Name: At_Drought_Reproduction_P Parameter: Organism Value: A. thaliana
  misc_feature: MA Experiment 20001905 PARAMETER Experiment Name: At_Drought_Reproduction_P Parameter: Plant Line Value: WS
  misc_feature: MA Experiment 20001905 PARAMETER Experiment Name: At_Drought_Reproduction_P Parameter: Timepoint (day) Value: 10
  misc_feature: MA Experiment 20001905 PARAMETER Experiment Name: At_Drought_Reproduction_P Parameter: Tissue Value: Rosettes
  misc_feature: MA Experiment 20001905 PARAMETER Experiment Name: At_Drought_Reproduction_P Parameter: Treatment Value: Drought vs. No Drought
  misc_feature: MA Experiment ID: 20001906 Result: Up-regulated in Transcription
  misc_feature: MA Experiment 20001906 PARAMETER Experiment Name: At_Drought_Reproduction_P Parameter: Age (day) Value: 35
  misc_feature: MA Experiment 20001906 PARAMETER Experiment Name: At_Drought_Reproduction_P Parameter: Organism Value: A. thaliana
  misc_feature: MA Experiment 20001906 PARAMETER Experiment Name: At_Drought_Reproduction_P Parameter: Plant Line Value: WS
  misc_feature: MA Experiment 20001906 PARAMETER Experiment Name: At_Drought_Reproduction_P Parameter: Timepoint (day) Value: 5
  misc_feature: MA Experiment 20001906 PARAMETER Experiment Name: At_Drought_Reproduction_P Parameter: Tissue Value: Siliques
  misc_feature: MA Experiment 20001906 PARAMETER Experiment Name: At_Drought_Reproduction_P Parameter: Treatment Value: Drought vs. No Drought
  misc_feature: MA Experiment ID: 20001908 Result: Up-regulated in Transcription
  misc_feature: MA Experiment 20001908 PARAMETER Experiment Name: At_Drought_Reproduction_P Parameter: Age (day) Value: 40
  misc_feature: MA Experiment 20001908 PARAMETER Experiment Name: At_Drought_Reproduction_P Parameter: Organism Value: A. thaliana
  misc_feature: MA Experiment 20001908 PARAMETER Experiment Name: At_Drought_Reproduction_P Parameter: Plant Line Value: WS
  misc_feature: MA Experiment 20001908 PARAMETER Experiment Name: At_Drought_Reproduction_P Parameter: Timepoint (day) Value: 10
  misc_feature: MA Experiment 20001908 PARAMETER Experiment Name: At_Drought_Reproduction_P Parameter: Tissue Value: Siliques
  misc_feature: MA Experiment 20001908 PARAMETER Experiment Name: At_Drought_Reproduction_P Parameter: Treatment Value: Drought vs. No Drought
  misc_feature: MA Experiment ID: 20001911 Result: Up-regulated in Transcription
  misc_feature: MA Experiment 20001911 PARAMETER Experiment Name: At_Drought_Reproduction_P Parameter: Age (day) Value: 40
  misc_feature: MA Experiment 20001911 PARAMETER Experiment Name: At_Drought_Reproduction_P Parameter: Organism Value: A. thaliana
  misc_feature: MA Experiment 20001911 PARAMETER Experiment Name: At_Drought_Reproduction_P Parameter: Plant Line Value: WS
  misc_feature: MA Experiment 20001911 PARAMETER Experiment Name: At_Drought_Reproduction_P Parameter: Timepoint (day) Value: 10
  misc_feature: MA Experiment 20001911 PARAMETER Experiment Name: At_Drought_Reproduction_P Parameter: Tissue Value: Flowers
  misc_feature: MA Experiment 20001911 PARAMETER Experiment Name: At_Drought_Reproduction_P Parameter: Treatment Value: Drought vs. No Drought
  misc_feature: Phenotype: INFLORESCENCE Flowering Time-Late Flowering
  misc_feature: Phenotype: ROSETTE LEAVES Petiole Length-Short Petioles
  misc_feature: Phenotype: ROSETTE LEAVES Shape-Oval
  misc_feature: Phenotype: WHOLE PLANT Color-Dark Green
  misc_feature: Phenotype: WHOLE PLANT Size-Small
  misc_feature: Phenotype: INFLORESCENCE Flowering Time-Late Flowering
  misc_feature: Phenotype: INFLORESCENCE Flowering Time-Late Flowering
  misc_feature: Phenotype: INFLORESCENCE Flowering Time-Late Flowering
  misc_feature: Phenotype: WHOLE PLANT Color-Dark Green
  misc_feature: Phenotype: WHOLE PLANT Size-Small
  misc_feature: Phenotype: INFLORESCENCE Flowering Time-Late Flowering
  misc_feature: Phenotype: WHOLE PLANT Size-Small
  misc_feature: Phenotype: WHOLE PLANT Other
  misc_feature: Phenotype: WHOLE PLANT Size-Small
  misc_feature: Phenotype: WHOLE PLANT Other
  misc_feature: Phenotype: WHOLE PLANT Size-Small
  misc_feature: Phenotype: WHOLE PLANT Other
aagcacttcactctctaatttccttctctctatctctcaccatattcgcgattaaaaactctcaacttttctctcaaatttctgatcctttgatccaacagttagaagaagattcatctgatcatggccctcgaagcgatgaacactccaacttcttctttcaccagaatcgaaacgaaagaagatttgatgaacgacgccgttttcattgagccgtggcttaaacgcaaacgctccaaacgtcagcgttctcacagcccttcttcgtcttcttcctcaccgcctcgatctcgacccaaatcccagaatcaagatcttacggaagaagagtatctcgctctttgtctcctcatgctcgctaaagatcaaccgtcgcaaacgcgatttcatcaacagtcgcaatcgttaacgccgccgccagaatcaaagaaccttccgtacaagtgtaacgtctgtgaaaaagcgtttccttcctatcaggctttaggcggtcacaaagcaagtcaccgaatcaaaccaccaaccgtaatctcaacaactgccgatgattcaacagctccgaccatctccatcgtcgccggagaaaaacatccgattgctgcctccggaaagatccacgagtgttcaatctgtcataaagtgtttccgacgggtcaagctttaggcggtcacaaacgttgtcactacgaaggcaacctcggcggcggaggaggaggaggaagcaaatcaatcagtcacagtggaagcgtgtcgagcacggtatcggaagaaaggagccaccgtggattcatcgatctaaacctaccggcgttacctgaactcagccttcatcacaatccaatcgtcgacgaagagatcttgagtccgttgaccggtaaaaaaccgcttttgttgaccgatcacgaccaagtcatcaagaaagaagatttatctttaaaaatctaatactcgactattaattcttgtgttttcattttcatttttttagttacaaatttttaattgttctgatttggattgaatattggtatattgttagggattgatacaaaaatttgatgattgattaagtcagaatttctttttaattatggtaactaatctcttgatcagtccactctgtataaatattgcgtggcatt

SEQ ID NO: 37506 - protein, 273 aa, Arabidopsis thaliana
  peptide (1)..(273): Ceres Seq. ID no. 13492938
  misc_feature (165)..(187): Pfam Name: Zinc finger, C2H2 type Pfam Description: Zinc finger, C2H2 type
  misc_feature (46)..(257): Homolog of NCBI NO: 4666360 NR Description: zinc-finger protein 1 [Datisca glomerata]
  misc_feature (55)..(254): Homolog of NCBI NO: 1418323 NR Description: zinc finger protein [Arabidopsis thaliana]
  misc_feature (1)..(256): Homolog of NCBI NO: 33331578 NR Description: zinc finger protein [Capsicum annuum]
  misc_feature (55)..(254): Homolog of NCBI NO: 15217692 NR Description: salt-tolerance zinc finger protein [Arabidopsis
  misc_feature (55)..(254): Homolog of NCBI NO: 6693033 NR Description: T22C5.18 [Arabidopsis thaliana]
  misc_feature (48)..(253): Homolog of NCBI NO: 26452746 NR Description: putative C2H2 zinc finger transcription factor
  misc_feature (48)..(253): Homolog of NCBI NO: 15237692 NR Description: c2h2 zinc finger transcription factor -related
  misc_feature (21)..(256): Homolog of NCBI NO: 7228329 NR Description: putative TFIIIA (or kruppel)-like zinc finger
  misc_feature (1)..(256): Homolog of NCBI NO: 439493 NR Description: zinc-finger protein [Petunia x hybrida]
  misc_feature (1)..(273): Homolog of NCBI NO: 15230889 NR Description: zinc finger protein -related [Arabidopsis
MALEAMNTPTSSFTRIETKEDLMNDAVFIEPWLKRKRSKRQRSHSPSSSSSSPPRSRPKSQNQDLTEEEYLALCLLMLAKDQPSQTRFHQQSQSLTPPPESKNLPYKCNVCEKAFPSYQALGGHKASHRIKPPTVISTTADDSTAPTISIVAGEKHPIAASGKIHECSICHKVFPTGQALGGHKRCHYEGNLGGGGGGGSKSISHSGSVSSTVSEERSHRGFIDLNLPALPELSLHHNPIVDEEILSPLTGKKPLLLTDHDQVIKKEDLSLKI

SEQ ID NO: 37507 - protein, 268 aa, Arabidopsis thaliana
  peptide (1)..(268): Ceres Seq. ID no. 13492939
  misc_feature (160)..(182): Pfam Name: Zinc finger, C2H2 type Pfam Description: Zinc finger, C2H2 type
  misc_feature (41)..(252): Homolog of NCBI NO: 4666360 NR Description: zinc-finger protein 1 [Datisca glomerata]
  misc_feature (50)..(249): Homolog of NCBI NO: 1418323 NR Description: zinc finger protein [Arabidopsis thaliana]
  misc_feature (1)..(251): Homolog of NCBI NO: 33331578 NR Description: zinc finger protein [Capsicum annuum]
  misc_feature (50)..(249): Homolog of NCBI NO: 15217692 NR Description: salt-tolerance zinc finger protein [Arabidopsis
  misc_feature (50)..(249): Homolog of NCBI NO: 6693033 NR Description: T22C5.18 [Arabidopsis thaliana]
  misc_feature (43)..(248): Homolog of NCBI NO: 26452746 NR Description: putative C2H2 zinc finger transcription factor
  misc_feature (43)..(248): Homolog of NCBI NO: 15237692 NR Description: c2h2 zinc finger transcription factor -related
  misc_feature (16)..(251): Homolog of NCBI NO: 7228329 NR Description: putative TFIIIA (or kruppel)-like zinc finger
  misc_feature (1)..(251): Homolog of NCBI NO: 439493 NR Description: zinc-finger protein [Petunia x hybrida]
  misc_feature (1)..(268): Homolog of NCBI NO: 15230889 NR Description: zinc finger protein -related [Arabidopsis
MNTPTSSFTRIETKEDLMNDAVFIEPWLKRKRSKRQRSHSPSSSSSSPPRSRPKSQNQDLTEEEYLALCLLMLAKDQPSQTRFHQQSQSLTPPPESKNLPYKCNVCEKAFPSYQALGGHKASHRIKPPTVISTTADDSTAPTISIVAGEKHPIAASGKIHECSICHKVFPTGQALGGHKRCHYEGNLGGGGGGGSKSISHSGSVSSTVSEERSHRGFIDLNLPALPELSLHHNPIVDEEILSPLTGKKPLLLTDHDQVIKKEDLSLKI

SEQ ID NO: 37508 - protein, 251 aa, Arabidopsis thaliana
  peptide (1)..(251): Ceres Seq. ID no. 13492940
  misc_feature (143)..(165): Pfam Name: Zinc finger, C2H2 type Pfam Description: Zinc finger, C2H2 type
  misc_feature (24)..(235): Homolog of NCBI NO: 4666360 NR Description: zinc-finger protein 1 [Datisca glomerata]
  misc_feature (33)..(232): Homolog of NCBI NO: 1418323 NR Description: zinc finger protein [Arabidopsis thaliana]
  misc_feature (1)..(234): Homolog of NCBI NO: 33331578 NR Description: zinc finger protein [Capsicum annuum]
  misc_feature (33)..(232): Homolog of NCBI NO: 15217692 NR Description: salt-tolerance zinc finger protein [Arabidopsis
  misc_feature (33)..(232): Homolog of NCBI NO: 6693033 NR Description: T22C5.18 [Arabidopsis thaliana]
  misc_feature (26)..(231): Homolog of NCBI NO: 26452746 NR Description: putative C2H2 zinc finger transcription factor
  misc_feature (26)..(231): Homolog of NCBI NO: 15237692 NR Description: c2h2 zinc finger transcription factor -related
  misc_feature (1)..(234): Homolog of NCBI NO: 7228329 NR Description: putative TFIIIA (or kruppel)-like zinc finger
  misc_feature (1)..(234): Homolog of NCBI NO: 439493 NR Description: zinc-finger protein [Petunia x hybrida]
  misc_feature (1)..(251): Homolog of NCBI NO: 15230889 NR Description: zinc finger protein -related [Arabidopsis
MNDAVFIEPWLKRKRSKRQRSHSPSSSSSSPPRSRPKSQNQDLTEEEYLALCLLMLAKDQPSQTRFHQQSQSLTPPPESKNLPYKCNVCEKAFPSYQALGGHKASHRIKPPTVISTTADDSTAPTISIVAGEKHPIAASGKIHECSICHKVFPTGQALGGHKRCHYEGNLGGGGGGGSKSISHSGSVSSTVSEERSHRGFIDLNLPALPELSLHHNPIVDEEILSPLTGKKPLLLTDHDQVIKKEDLSLKI

SEQ ID NO: 37509 - DNA, 1126 bp, Arabidopsis thaliana
  misc_feature (1)..(1126): Ceres Seq. ID no. 12396454
  misc_feature: MA Experiment ID: 108576 Result: Up-regulated in Transcription
  misc_feature: MA Experiment 108576 PARAMETER Experiment Name: At_42deg_Heat_cDNA_P Parameter: Temperature (deg C) Value: 42 vs. 22
  misc_feature: MA Experiment 108576 PARAMETER Experiment Name: At_42deg_Heat_cDNA_P Parameter: Timepoint (hr) Value: 1
  misc_feature: MA Experiment 108576 PARAMETER Experiment Name: At_42deg_Heat_cDNA_P Parameter: Tissue Value: Aerial
  misc_feature: MA Experiment ID: 108594 Result: Down-regulated in Transcription
  misc_feature: MA Experiment 108594 PARAMETER Experiment Name: At_Ler-rhl_Root_cDNA_P Parameter: Plant Line Value: null
  misc_feature: MA Experiment ID: 20000286 Result: Up-regulated in Transcription
  misc_feature: MA Experiment 20000286 PARAMETER Experiment Name: At_Open_Flower_P Parameter: Age (day) Value: 21
  misc_feature: MA Experiment 20000286 PARAMETER Experiment Name: At_Open_Flower_P Parameter: Plant Line Value: WS
  misc_feature: MA Experiment 20000286 PARAMETER Experiment Name: At_Open_Flower_P Parameter: Tissue Value: Half Open vs. Whole Plant
  misc_feature: MA Experiment ID: 20000451 Result: Up-regulated in Transcription
  misc_feature: MA Experiment 20000451 PARAMETER Experiment Name: At_CS6879_Shoots-Roots_P Parameter: Age (day) Value: 14
  misc_feature: MA Experiment 20000451 PARAMETER Experiment Name: At_CS6879_Shoots-Roots_P Parameter: Organism Value: A. thaliana
  misc_feature: MA Experiment 20000451 PARAMETER Experiment Name: At_CS6879_Shoots-Roots_P Parameter: Plant Line Value: CS6879 vs. WS
  misc_feature: MA Experiment 20000451 PARAMETER Experiment Name: At_CS6879_Shoots-Roots_P Parameter: Tissue Value: Roots
acattgcaacactttctacaaaaacaagatgaagattgcaaagttttctgttctactcttgcttttatttattttccccgtggcattagcgcagctgaaatttaagttttacagtgaatcgtgccctaatgcagagactatcgtagaaaacctggttcgccagcagtttgctcgtgacccttcaatcacggccgccttgactcgtatgcattttcacgactgttttgtccagggctgcgcacgcttctctcctcatagacccaacgacgtctcaactatcggaaaaaaacgccggcccaaactttagcgtgagagggttcgagctgatcgacgagatcaagacggcactcgaagctcaatgtccctctacggtctcgtgctccgatatagtcacgctcgccacacgtgacgccgtgttcttaggtggaggaccaagctacgtggtccccaccggacgtcgcgatggctttgtgtcgaatcctgaagacgccaatgagatcctccctccaccattcatatccgtcgaaggcatgttaagttttttcggcaacaaaggaatgaatgtttttgattccgtagctcttttgggggcgcacacggttgggatcgcgtcttgtggtaattttgtggaccgggtcacgaactttcaaggaaccggactgcccgacccatccatggaccccactttggctggcaggctaaggaacacatgtgcggttccaggcggcttcgcggcactggaccagtcgatgccagtaacgccggtctcattcgacaacttgttctttggtcagatcagagagaggaaaggaattttgcttattgaccaactgatcgcaagcgacccggccacttctggtgttgtacttcagtatgcgtccaacaacgaactattcaaacgtcagttcgcaatcgcaatggtgaagatgggagccgttgacgtgcttaccggttcagctggtgagatcaggacgaattgtagagcattcaactaaagctttataacaagtttctatatctgattattgattgtttttcccttaatttccgcttctgatgatgaattgtgaatggtgattgtttgcctatatatgtatgtacgtatatctttaaaataaggtttggc

SEQ ID NO: 37510 - protein, 154 aa, Arabidopsis thaliana
  peptide (1)..(154): Ceres Seq. ID no. 12396455
  misc_feature (1)..(118): Pfam Name: Peroxidase Pfam Description: Peroxidase
  misc_feature (1)..(154): Homolog of NCBI NO: 5002348 NR Description: peroxidase 5 precursor [Phaseolus vulgaris]
  misc_feature (1)..(154): Homolog of NCBI NO: 15240140 NR Description: peroxidase, putative
  misc_feature (1)..(154): Homolog of NCBI NO: 21593262 NR Description: peroxidase [Arabidopsis thaliana]
  misc_feature (1)..(154): Homolog of NCBI NO: 15218665 NR Description: peroxidase, putative; protein id: At1g34510.1
  misc_feature (1)..(154): Homolog of NCBI NO: 7433094 NR Description: peroxidase homolog F20B18.120 - Arabidopsis
  misc_feature (1)..(154): Homolog of NCBI NO: 18416663 NR Description: peroxidase, putative
  misc_feature (1)..(154): Homolog of NCBI NO: 21593467 NR Description: peroxidase ATP13a [Arabidopsis thaliana]
  misc_feature (1)..(154): Homolog of NCBI NO: 15238030 NR Description: peroxidase, putative
  misc_feature (1)..(154): Homolog of NCBI NO: 15228606 NR Description: peroxidase, putative
  misc_feature (1)..(154): Homolog of NCBI NO: 21593692 NR Description: putative peroxidase [Arabidopsis thaliana]
MLSFFGNKGMNVFDSVALLGAHTVGIASCGNFVDRVTNFQGTGLPDPSMDPTLAGRLRNTCAVPGGFAALDQSMPVTPVSFDNLFFGQIRERKGILLIDQLIASDPATSGVVLQYASNNELFKRQFAIAMVKMGAVDVLTGSAGEIRTNCRAFN

SEQ ID NO: 37511 - protein, 145 aa, Arabidopsis thaliana
  peptide (1)..(145): Ceres Seq. ID no. 12396456
  misc_feature (1)..(109): Pfam Name: Peroxidase Pfam Description: Peroxidase
  misc_feature (1)..(145): Homolog of NCBI NO: 5002348 NR Description: peroxidase 5 precursor [Phaseolus vulgaris]
  misc_feature (1)..(145): Homolog of NCBI NO: 15240140 NR Description: peroxidase, putative
  misc_feature (1)..(145): Homolog of NCBI NO: 21593262 NR Description: peroxidase [Arabidopsis thaliana]
  misc_feature (1)..(145): Homolog of NCBI NO: 15218665 NR Description: peroxidase, putative; protein id: At1g34510.1
  misc_feature (1)..(145): Homolog of NCBI NO: 7433094 NR Description: peroxidase homolog F20B18.120 - Arabidopsis
  misc_feature (1)..(145): Homolog of NCBI NO: 18416663 NR Description: peroxidase, putative
  misc_feature (1)..(145): Homolog of NCBI NO: 21593467 NR Description: peroxidase ATP13a [Arabidopsis thaliana]
  misc_feature (1)..(145): Homolog of NCBI NO: 15238030 NR Description: peroxidase, putative
  misc_feature (1)..(145): Homolog of NCBI NO: 15228606 NR Description: peroxidase, putative
  misc_feature (1)..(145): Homolog of NCBI NO: 21593692 NR Description: putative peroxidase [Arabidopsis thaliana]
MNVFDSVALLGAHTVGIASCGNFVDRVTNFQGTGLPDPSMDPTLAGRLRNTCAVPGGFAALDQSMPVTPVSFDNLFFGQIRERKGILLIDQLIASDPATSGVVLQYASNNELFKRQFAIAMVKMGAVDVLTGSAGEIRTNCRAFN

SEQ ID NO: 37512 - protein, 106 aa, Arabidopsis thaliana
  peptide (1)..(106): Ceres Seq. ID no. 12396457
  misc_feature (1)..(70): Pfam Name: Peroxidase Pfam Description: Peroxidase
  misc_feature (1)..(106): Homolog of NCBI NO: 5002348 NR Description: peroxidase 5 precursor [Phaseolus vulgaris]
  misc_feature (1)..(106): Homolog of NCBI NO: 15240140 NR Description: peroxidase, putative
  misc_feature (1)..(106): Homolog of NCBI NO: 21593262 NR Description: peroxidase [Arabidopsis thaliana]
  misc_feature (1)..(106): Homolog of NCBI NO: 15218665 NR Description: peroxidase, putative; protein id: At1g34510.1
  misc_feature (1)..(106): Homolog of NCBI NO: 7433094 NR Description: peroxidase homolog F20B18.120 - Arabidopsis
  misc_feature (1)..(106): Homolog of NCBI NO: 18416663 NR Description: peroxidase, putative
  misc_feature (1)..(106): Homolog of NCBI NO: 21593467 NR Description: peroxidase ATP13a [Arabidopsis thaliana]
  misc_feature (1)..(106): Homolog of NCBI NO: 15238030 NR Description: peroxidase, putative
  misc_feature (1)..(106): Homolog of NCBI NO: 15228606 NR Description: peroxidase, putative
  misc_feature (1)..(106): Homolog of NCBI NO: 21593692 NR Description: putative peroxidase [Arabidopsis thaliana]
MDPTLAGRLRNTCAVPGGFAALDQSMPVTPVSFDNLFFGQIRERKGILLIDQLIASDPATSGVVLQYASNNELFKRQFAIAMVKMGAVDVLTGSAGEIRTNCRAFN

SEQ ID NO: 37513 - DNA, 1881 bp, Arabidopsis thaliana
  misc_feature (1)..(1881): Ceres Seq. ID no. 12330296
  misc_feature: MA Experiment ID: 108434 Result: Up-regulated in Transcription
  misc_feature: MA Experiment 108434 PARAMETER Experiment Name: At_Root_Tips_cDNA_P Parameter: Tissue Value: Root Tips
  misc_feature: MA Experiment ID: 108462 Result: Down-regulated in Transcription
  misc_feature: MA Experiment 108462 PARAMETER Experiment Name: At_Germinating_Seeds_cDNA_P Parameter: Age (day) Value: 2 vs. 0
  misc_feature: MA Experiment 108462 PARAMETER Experiment Name: At_Germinating_Seeds_cDNA_P Parameter: Tissue Value: Germinating Seeds
  misc_feature: MA Experiment ID: 108463 Result: Down-regulated in Transcription
  misc_feature: MA Experiment 108463 PARAMETER Experiment Name: At_Germinating_Seeds_cDNA_P Parameter: Age (day) Value: 3 vs. 0
  misc_feature: MA Experiment 108463 PARAMETER Experiment Name: At_Germinating_Seeds_cDNA_P Parameter: Tissue Value: Germinating Seeds
  misc_feature: MA Experiment ID: 108464 Result: Down-regulated in Transcription
  misc_feature: MA Experiment 108464 PARAMETER Experiment Name: At_Germinating_Seeds_cDNA_P Parameter: Age (day) Value: 4 vs. 0
  misc_feature: MA Experiment 108464 PARAMETER Experiment Name: At_Germinating_Seeds_cDNA_P Parameter: Tissue Value: Germinating Seeds
  misc_feature: MA Experiment ID: 20000227 Result: Up-regulated in Transcription
  misc_feature: MA Experiment 20000227 PARAMETER Experiment Name: At_Root-Tips-vs-Tops_P Parameter: Tissue Value: Root Tips vs. Root Tops
  misc_feature: MA Experiment ID: 20001451 Result: Down-regulated in Transcription
  misc_feature: MA Experiment 20001451 PARAMETER Experiment Name: At_Far-red-induction_P Parameter: Age (day) Value: 7
  misc_feature: MA Experiment 20001451 PARAMETER Experiment Name: At_Far-red-induction_P Parameter: Light Value: Far-red vs. White
  misc_feature: MA Experiment 20001451 PARAMETER Experiment Name: At_Far-red-induction_P Parameter: Organism Value: A. thaliana
  misc_feature: MA Experiment 20001451 PARAMETER Experiment Name: At_Far-red-induction_P Parameter: Plant Line Value: Columbia
  misc_feature: MA Experiment 20001451 PARAMETER Experiment Name: At_Far-red-induction_P Parameter: Timepoint (hr) Value: 24
  misc_feature: MA Experiment 20001451 PARAMETER Experiment Name: At_Far-red-induction_P Parameter: Tissue Value: Whole Plant
  misc_feature: MA Experiment ID: 20001556 Result: Up-regulated in Transcription
  misc_feature: MA Experiment 20001556 PARAMETER Experiment Name: At_Drought_Soil_Dry_P Parameter: Age (day) Value: 26
  misc_feature: MA Experiment 20001556 PARAMETER Experiment Name: At_Drought_Soil_Dry_P Parameter: Organism Value: A. thaliana
  misc_feature: MA Experiment 20001556 PARAMETER Experiment Name: At_Drought_Soil_Dry_P Parameter: Plant Line Value: WS
  misc_feature: MA Experiment 20001556 PARAMETER Experiment Name: At_Drought_Soil_Dry_P Parameter: Post Timepoint (hr) Value: None
  misc_feature: MA Experiment 20001556 PARAMETER Experiment Name: At_Drought_Soil_Dry_P Parameter: Post-Treatment Value: None
  misc_feature: MA Experiment 20001556 PARAMETER Experiment Name: At_Drought_Soil_Dry_P Parameter: Timepoint (day) Value: 12
  misc_feature: MA Experiment 20001556 PARAMETER Experiment Name: At_Drought_Soil_Dry_P Parameter: Treatment Value: Drought vs. No Drought
  misc_feature: MA Experiment ID: 20001557 Result: Up-regulated in Transcription
  misc_feature: MA Experiment 20001557 PARAMETER Experiment Name: At_Drought_Soil_Dry_P Parameter: Age (day) Value: 27
  misc_feature: MA Experiment 20001557 PARAMETER Experiment Name: At_Drought_Soil_Dry_P Parameter: Organism Value: A. thaliana
  misc_feature: MA Experiment 20001557 PARAMETER Experiment Name: At_Drought_Soil_Dry_P Parameter: Plant Line Value: WS
  misc_feature: MA Experiment 20001557 PARAMETER Experiment Name: At_Drought_Soil_Dry_P Parameter: Post Timepoint (hr) Value: 3
  misc_feature: MA Experiment 20001557 PARAMETER Experiment Name: At_Drought_Soil_Dry_P Parameter: Post-Treatment Value: Re-Water vs. No Drought
  misc_feature: MA Experiment 20001557 PARAMETER Experiment Name: At_Drought_Soil_Dry_P Parameter: Timepoint (day) Value: 13
  misc_feature: MA Experiment 20001557 PARAMETER Experiment Name: At_Drought_Soil_Dry_P Parameter: Treatment Value: Drought vs. No Drought
  misc_feature: MA Experiment ID: 20001558 Result: Up-regulated in Transcription
  misc_feature: MA Experiment 20001558 PARAMETER Experiment Name: At_Drought_Soil_Dry_P Parameter: Age (day) Value: 27
  misc_feature: MA Experiment 20001558 PARAMETER Experiment Name: At_Drought_Soil_Dry_P Parameter: Organism Value: A. thaliana
  misc_feature: MA Experiment 20001558 PARAMETER Experiment Name: At_Drought_Soil_Dry_P Parameter: Plant Line Value: WS
  misc_feature: MA Experiment 20001558 PARAMETER Experiment Name: At_Drought_Soil_Dry_P Parameter: Post Timepoint (hr) Value: 6
  misc_feature: MA Experiment 20001558 PARAMETER Experiment Name: At_Drought_Soil_Dry_P Parameter: Post-Treatment Value: Re-Water vs. No Drought
  misc_feature: MA Experiment 20001558 PARAMETER Experiment Name: At_Drought_Soil_Dry_P Parameter: Timepoint (day) Value: 13
  misc_feature: MA Experiment 20001558 PARAMETER Experiment Name: At_Drought_Soil_Dry_P Parameter: Treatment Value: Drought vs. No Drought
aatcgccagtgtttacgaaagttcttgaaatttgaagagatctcacagatgagaagtgctataggaagaagattctcaaaccctaatggcttcaccattgcatccttagtcaaacaaactccatttctcacccaatccacatctcatttctcctcttcctccgactcctccggccgtggtcgtggacgcggttccggtgaagatggaggatttcccgccgctggaagaggacaattcggtgtaaatcgtgaaccggtggttcctggacgtgaaccgtcatctgccggaggttatggtcatggtcgtggtcgtccgatccaatctgattcgatttctcctgcgtttacgtcatttgtcaaatcagattctcctagtattggccgtggaagaggatccgttggatcagacaccgtttcacctttcgctgctgaacctcctcgccaatcgccgcctccaccgcagcaacaacagtctcaatcgcagcaacagcgttcacaaccacaacagcagcagccgcgttcgcaaccacagcagcagcctaatgatgaatctcagggaagtcctgtatttgtgaagctgcaggagatgcaggacgcaacttcgtctccaccaccaccagagtctaaacctggtcaagctgatccacctgataacatattcaatgcattaggaaacgaattttcacatcctagtggagcaggtcgaggaaagcctcttgtggaatctgctccaatccgacaagaagataaccgccaaattcgacgccctccgcctccaccgcagcagcagagagtacaacctcagcagaagcgggctccaacggtcaaagatggaactcctaagccgcaattgagtgcggaagaggctggaagaagagcaaggagtgagctttcgcgtggtgaagctgaaggaagcagtgtgggaggaagaggagggagagggagagggagaggaagaggagcaagagggagaggcagaggaagaggtggtgatggatggagagatgataagaaagaagaagaaggtgaacaagaggctatgcgtatatttgctggagattcagctgatggagagaagtttgctgagaaaatgggacctgaattgatgaaaacgcttgcggaaggttttgaggaaatttgcgaaaaggcgttgccttctactactcacgatgccattatagatgcttatgataccaatctcatgattgagtgtgagcctgaatacattatgccagactttggatcaaatcctgacattgatgagaaaccaccaatgtctctgcgtgagtgccttgagaaggtgaagcctttcatagtggcttacgaaggaatcaaggatcaagaagaatgggaggaagcaattaatgaagcgatgacacaggctccccttatgaaagagattgttgatcactacagtggtcctgatcgtgtaactgctaagaaacagaacgaggaactcgatagaattgctacaacgcttcccgcaagtgcacctgattccgtgaaacgatttgcagatcgtgcagctcttactcttaagagtaatccaggttggggatttgataagaaataccagttcatggacaagctcgttttagaggtgtcacaaagctacaaatagagaactcaggtttcaaacttcttaaaaaacttcatcgccggttgagtttatagatcgtactctagatcttgcctctacttaaaacggtacccatttcttttgaactagtactcaaaatttgggcgttagctttttcgtcatacgttttgagggtttccgtaataacggcattgttctttcgatctttgttactgaggagattgtattgtatcccttttcatcaatgggttattaagggtttaagcctgtttttggatgtgt

SEQ ID NO: 37514 - protein, 539 aa, Arabidopsis thaliana
  peptide (1)..(539): Ceres Seq. ID no. 12330297
  misc_feature (58)..(343): Pfam Name: High molecular weight glutenin subunit Pfam Description: High molecular weight glutenin subunit
  misc_feature (290)..(346): Homolog of NCBI NO: 25404999 NR Description: protein T4O12.22 [imported] - Arabidopsis
  misc_feature (58)..(104): Homolog of NCBI NO: 18410994 NR Description: expressed protein
  misc_feature (290)..(346): Homolog of NCBI NO: 18410994 NR Description: expressed protein
  misc_feature (62)..(273): Homolog of NCBI NO: 13702294 NR Description: Nadrin E2 [Rattus norvegicus]
  misc_feature (62)..(273): Homolog of NCBI NO: 11560044 NR Description: nadrin; neuron-specific GTPase activating protein
  misc_feature (62)..(311): Homolog of NCBI NO: 13702292 NR Description: Nadrin E1 [Rattus norvegicus]
  misc_feature (62)..(311): Homolog of NCBI NO: 19071871 NR Description: Nadrin-102 [Rattus norvegicus]
  misc_feature (17)..(539): Homolog of NCBI NO: 21593693 NR Description: Contains similarity to RNA-binding protein from
  misc_feature (17)..(539): Homolog of NCBI NO: 18404554 NR Description: Expressed protein
  misc_feature (1)..(539): Homolog of NCBI NO: 8671859 NR Description: Contains similarity to RNA-binding protein from thaliana gi|2129727 and contains RNA recognition PF|00076 domain.
NRQCLRKFLKFEEISQMRSAIGRRFSNPNGFTIASLVKQTPFLTQSTSHFSSSSDSSGRGRGRGSGEDGGFPAAGRGQFGVNREPVVPGREPSSAGGYGHGRGRPIQSDSISPAFTSFVKSDSPSIGRGRGSVGSDTVSPFAAEPPRQSPPPPQQQQSQSQQQRSQPQQQQPRSQPQQQPNDESQGSPVFVKLQEMQDATSSPPPPESKPGQADPPDNIFNALGNEFSHPSGAGRGKPLVESAPIRQEDNRQIRRPPPPPQQQRVQPQQKRAPTVKDGTPKPQLSAEEAGRRARSELSRGEAEGSSVGGRGGRGRGRGRGARGRGRGRGGDGWRDDKKEEEGEQEAMRIFAGDSADGEKFAEKMGPELMKTLAEGFEEICEKALPSTTHDAIIDAYDTNLMIECEPEYIMPDFGSNPDIDEKPPMSLRECLEKVKPFIVAYEGIKDQEEWEEAINEAMTQAPLMKEIVDHYSGPDRVTAKKQNEELDRIATTLPASAPDSVKRFADRAALTLKSNPGWGFDKKYQFMDKLVLEVSQSYK

SEQ ID NO: 37515 - protein, 523 aa, Arabidopsis thaliana
  peptide (1)..(523): Ceres Seq. ID no. 12330298
  misc_feature (42)..(327): Pfam Name: High molecular weight glutenin subunit Pfam Description: High molecular weight glutenin subunit
  misc_feature (274)..(330): Homolog of NCBI NO: 25404999 NR Description: protein T4O12.22 [imported] - Arabidopsis
  misc_feature (42)..(88): Homolog of NCBI NO: 18410994 NR Description: expressed protein
  misc_feature (274)..(330): Homolog of NCBI NO: 18410994 NR Description: expressed protein
  misc_feature (46)..(257): Homolog of NCBI NO: 13702294 NR Description: Nadrin E2 [Rattus norvegicus]
  misc_feature (46)..(257): Homolog of NCBI NO: 11560044 NR Description: nadrin; neuron-specific GTPase activating protein
  misc_feature (46)..(295): Homolog of NCBI NO: 13702292 NR Description: Nadrin E1 [Rattus norvegicus]
  misc_feature (46)..(295): Homolog of NCBI NO: 19071871 NR Description: Nadrin-102 [Rattus norvegicus]
  misc_feature (1)..(523): Homolog of NCBI NO: 21593693 NR Description: Contains similarity to RNA-binding protein from
  misc_feature (1)..(523): Homolog of NCBI NO: 18404554 NR Description: Expressed protein
  misc_feature (1)..(523): Homolog of NCBI NO: 8671859 NR Description: Contains similarity to RNA-binding protein from thaliana gi|2129727 and contains RNA recognition PF|00076 domain.
MRSAIGRRFSNPNGFTIASLVKQTPFLTQSTSHFSSSSDSSGRGRGRGSGEDGGFPAAGRGQFGVNREPVVPGREPSSAGGYGHGRGRPIQSDSISPAFTSFVKSDSPSIGRGRGSVGSDTVSPFAAEPPRQSPPPPQQQQSQSQQQRSQPQQQQPRSQPQQQPNDESQGSPVFVKLQEMQDATSSPPPPESKPGQADPPDNIFNALGNEFSHPSGAGRGKPLVESAPIRQEDNRQIRRPPPPPQQQRVQPQQKRAPTVKDGTPKPQLSAEEAGRRARSELSRGEAEGSSVGGRGGRGRGRGRGARGRGRGRGGDGWRDDKKEEEGEQEAMRIFAGDSADGEKFAEKMGPELMKTLAEGFEEICEKALPSTTHDAIIDAYDTNLMIECEPEYIMPDFGSNPDIDEKPPMSLRECLEKVKPFIVAYEGIKDQEEWEEAINEAMTQAPLMKEIVDHYSGPDRVTAKKQNEELDRIATTLPASAPDSVKRFADRAALTLKSNPGWGFDKKYQFMDKLVLEVSQSYK

SEQ ID NO: 37516 - protein, 344 aa, Arabidopsis thaliana
  peptide (1)..(344): Ceres Seq. ID no. 12330299
  misc_feature (1)..(148): Pfam Name: High molecular weight glutenin subunit Pfam Description: High molecular weight glutenin subunit
  misc_feature (1)..(88): Homolog of NCBI NO: 23480318 NR Description: Drosophila melanogaster CG8797 gene
  misc_feature (95)..(151): Homolog of NCBI NO: 25404999 NR Description: protein T4O12.22 [imported] - Arabidopsis
  misc_feature (95)..(151): Homolog of NCBI NO: 18410994 NR Description: expressed protein
  misc_feature (1)..(78): Homolog of NCBI NO: 13702294 NR Description: Nadrin E2 [Rattus norvegicus]
  misc_feature (1)..(78): Homolog of NCBI NO: 11560044 NR Description: nadrin; neuron-specific GTPase activating protein
  misc_feature (1)..(116): Homolog of NCBI NO: 13702292 NR Description: Nadrin E1 [Rattus norvegicus]
  misc_feature (1)..(116): Homolog of NCBI NO: 19071871 NR Description: Nadrin-102 [Rattus norvegicus]
  misc_feature (1)..(344): Homolog of NCBI NO: 21593693 NR Description: Contains similarity to RNA-binding protein from
  misc_feature (1)..(344): Homolog of NCBI NO: 18404554 NR Description: Expressed protein
  misc_feature (1)..(344): Homolog of NCBI NO: 8671859 NR Description: Contains similarity to RNA-binding protein from thaliana gi|2129727 and contains RNA recognition PF|00076 domain.
MQDATSSPPPPESKPGQADPPDNIFNALGNEFSHPSGAGRGKPLVESAPIRQEDNRQIRRPPPPPQQQRVQPQQKRAPTVKDGTPKPQLSAEEAGRRARSELSRGEAEGSSVGGRGGRGRGRGRGARGRGRGRGGDGWRDDKKEEEGEQEAMRIFAGDSADGEKFAEKMGPELMKTLAEGFEEICEKALPSTTHDAIIDAYDTNLMIECEPEYIMPDFGSNPDIDEKPPMSLRECLEKVKPFIVAYEGIKDQEEWEEAINEAMTQAPLMKEIVDHYSGPDRVTAKKQNEELDRIATTLPASAPDSVKRFADRAALTLKSNPGWGFDKKYQFMDKLVLEVSQSYK

SEQ ID NO: 37517 - DNA, 1603 bp, Arabidopsis thaliana
  misc_feature (1)..(1603): Ceres Seq. ID no. 12335449
  misc_feature: MA Experiment ID: 108577 Result: Down-regulated in Transcription
  misc_feature: MA Experiment 108577 PARAMETER Experiment Name: At_42deg_Heat_cDNA_P Parameter: Temperature (deg C) Value: 42 vs. 22
  misc_feature: MA Experiment 108577 PARAMETER Experiment Name: At_42deg_Heat_cDNA_P Parameter: Timepoint (hr) Value: 6
  misc_feature: MA Experiment 108577 PARAMETER Experiment Name: At_42deg_Heat_cDNA_P Parameter: Tissue Value: Aerial
  misc_feature: MA Experiment ID: 20000184 Result: Down-regulated in Transcription
  misc_feature: MA Experiment 20000184 PARAMETER Experiment Name: At_Shoots__P Parameter: Age (day) Value: 7
  misc_feature: MA Experiment 20000184 PARAMETER Experiment Name: At_Shoots__P Parameter: Tissue Value: Shoots vs. Whole Plant
  misc_feature: MA Experiment ID: 20000185 Result: Down-regulated in Transcription
  misc_feature: MA Experiment 20000185 PARAMETER Experiment Name: At_Roots__P Parameter: Age (day) Value: 7 vs. 21
  misc_feature: MA Experiment 20000185 PARAMETER Experiment Name: At_Roots__P Parameter: Organism Value: A. thaliana
  misc_feature: MA Experiment 20000185 PARAMETER Experiment Name: At_Roots__P Parameter: Tissue Value: Roots vs. Whole Plant
  misc_feature: MA Experiment ID: 20000227 Result: Down-regulated in Transcription
  misc_feature: MA Experiment 20000227 PARAMETER Experiment Name: At_Root-Tips-vs-Tops_P Parameter: Tissue Value: Root Tips vs. Root Tops
  misc_feature: MA Experiment ID: 20000234 Result: Down-regulated in Transcription
  misc_feature: MA Experiment 20000234 PARAMETER Experiment Name: At_Siliques_P Parameter: Age (day) Value: 21
  misc_feature: MA Experiment 20000234 PARAMETER Experiment Name: At_Siliques_P Parameter: Organism Value: A. thaliana
  misc_feature: MA Experiment 20000234 PARAMETER Experiment Name: At_Siliques_P Parameter: Plant Line Value: WS
  misc_feature: MA Experiment 20000234 PARAMETER Experiment Name: At_Siliques_P Parameter: Tissue Value: Less Than 5mm Siliques vs. Whole Plant
  misc_feature: MA Experiment ID: 20000235 Result: Down-regulated in Transcription
  misc_feature: MA Experiment 20000235 PARAMETER Experiment Name: At_Siliques_P Parameter: Age (day) Value: 21
  misc_feature: MA Experiment 20000235 PARAMETER Experiment Name: At_Siliques_P Parameter: Organism Value: A. thaliana
  misc_feature: MA Experiment 20000235 PARAMETER Experiment Name: At_Siliques_P Parameter: Plant Line Value: WS
  misc_feature: MA Experiment 20000235 PARAMETER Experiment Name: At_Siliques_P Parameter: Tissue Value: 5-10mm Siliques vs. Whole Plant
  misc_feature: MA Experiment ID: 20000264 Result: Down-regulated in Transcription
  misc_feature: MA Experiment 20000264 PARAMETER Experiment Name: At_Open_Flower_P Parameter: Age (day) Value: 21
  misc_feature: MA Experiment 20000264 PARAMETER Experiment Name: At_Open_Flower_P Parameter: Plant Line Value: WS
  misc_feature: MA Experiment 20000264 PARAMETER Experiment Name: At_Open_Flower_P Parameter: Tissue Value: Open Flower vs. Whole Plant
  misc_feature: MA Experiment ID: 20000265 Result: Down-regulated in Transcription
  misc_feature: MA Experiment 20000265 PARAMETER Experiment Name: At_Open_Flower_P Parameter: Age (day) Value: 21
  misc_feature: MA Experiment 20000265 PARAMETER Experiment Name: At_Open_Flower_P Parameter: Plant Line Value: WS
  misc_feature: MA Experiment 20000265 PARAMETER Experiment Name: At_Open_Flower_P Parameter: Tissue Value: Closed Flower vs. Whole Plant
  misc_feature: MA Experiment ID: 20000286 Result: Down-regulated in Transcription
  misc_feature: MA Experiment 20000286 PARAMETER Experiment Name: At_Open_Flower_P Parameter: Age (day) Value: 21
  misc_feature: MA Experiment 20000286 PARAMETER Experiment Name: At_Open_Flower_P Parameter: Plant Line Value: WS
  misc_feature: MA Experiment 20000286 PARAMETER Experiment Name: At_Open_Flower_P Parameter: Tissue Value: Half Open vs. Whole Plant
  misc_feature: MA Experiment ID: 20000438 Result: Down-regulated in Transcription
  misc_feature: MA Experiment 20000438 PARAMETER Experiment Name: At_Shoots__P Parameter: Age (day) Value: 14
  misc_feature: MA Experiment 20000438 PARAMETER Experiment Name: At_Shoots__P Parameter: Tissue Value: Shoots vs. Whole Plant
  misc_feature: MA Experiment ID: 20000794 Result: Down-regulated in Transcription
  misc_feature: MA Experiment 20000794 PARAMETER Experiment Name: At_Petals_P Parameter: Age (day) Value: 23-25 days
  misc_feature: MA Experiment 20000794 PARAMETER Experiment Name: At_Petals_P Parameter: Plant Line Value: WS
  misc_feature: MA Experiment 20000794 PARAMETER Experiment Name: At_Petals_P Parameter: Tissue Value: Petals vs. Whole plant
  misc_feature: MA Experiment ID: 20001248 Result: Up-regulated in Transcription
  misc_feature: MA Experiment 20001248 PARAMETER Experiment Name: At_Far-red-induction_P Parameter: Age (day) Value: 7
  misc_feature: MA Experiment 20001248 PARAMETER Experiment Name: At_Far-red-induction_P Parameter: Light Value: Far-red vs. White
  misc_feature: MA Experiment 20001248 PARAMETER Experiment Name: At_Far-red-induction_P Parameter: Organism Value: A. thaliana
  misc_feature: MA Experiment 20001248 PARAMETER Experiment Name: At_Far-red-induction_P Parameter: Plant Line Value: Columbia
  misc_feature: MA Experiment 20001248 PARAMETER Experiment Name: At_Far-red-induction_P Parameter: Timepoint (hr) Value: 4
  misc_feature: MA Experiment 20001248 PARAMETER Experiment Name: At_Far-red-induction_P Parameter: Tissue Value: Whole Plant
  misc_feature: MA Experiment ID: 20001450 Result: Up-regulated in Transcription
  misc_feature: MA Experiment 20001450 PARAMETER Experiment Name: At_Far-red-induction_P Parameter: Age (day) Value: 7
  misc_feature: MA Experiment 20001450 PARAMETER Experiment Name: At_Far-red-induction_P Parameter: Light Value: Far-red vs. White
  misc_feature: MA Experiment 20001450 PARAMETER Experiment Name: At_Far-red-induction_P Parameter: Organism Value: A. thaliana
  misc_feature: MA Experiment 20001450 PARAMETER Experiment Name: At_Far-red-induction_P Parameter: Plant Line Value: Columbia
  misc_feature: MA Experiment 20001450 PARAMETER Experiment Name: At_Far-red-induction_P Parameter: Timepoint (hr) Value: 8
  misc_feature: MA Experiment 20001450 PARAMETER Experiment Name: At_Far-red-induction_P Parameter: Tissue Value: Whole Plant
  misc_feature: MA Experiment ID: 20001557 Result: Down-regulated in Transcription
  misc_feature: MA Experiment 20001557 PARAMETER Experiment Name: At_Drought_Soil_Dry_P Parameter: Age (day) Value: 27
  misc_feature: MA Experiment 20001557 PARAMETER Experiment Name: At_Drought_Soil_Dry_P Parameter: Organism Value: A. thaliana
  misc_feature: MA Experiment 20001557 PARAMETER Experiment Name: At_Drought_Soil_Dry_P Parameter: Plant Line Value: WS
  misc_feature: MA Experiment 20001557 PARAMETER Experiment Name: At_Drought_Soil_Dry_P Parameter: Post Timepoint (hr) Value: 3
  misc_feature: MA Experiment 20001557 PARAMETER Experiment Name: At_Drought_Soil_Dry_P Parameter: Post-Treatment Value: Re-Water vs. No Drought
  misc_feature: MA Experiment 20001557 PARAMETER Experiment Name: At_Drought_Soil_Dry_P Parameter: Timepoint (day) Value: 13
  misc_feature: MA Experiment 20001557 PARAMETER Experiment Name: At_Drought_Soil_Dry_P Parameter: Treatment Value: Drought vs. No Drought
  misc_feature: MA Experiment ID: 20001558 Result: Down-regulated in Transcription
  misc_feature: MA Experiment 20001558 PARAMETER Experiment Name: At_Drought_Soil_Dry_P Parameter: Age (day) Value: 27
  misc_feature: MA Experiment 20001558 PARAMETER Experiment Name: At_Drought_Soil_Dry_P Parameter: Organism Value: A. thaliana
  misc_feature: MA Experiment 20001558 PARAMETER Experiment Name: At_Drought_Soil_Dry_P Parameter: Plant Line Value: WS
  misc_feature: MA Experiment 20001558 PARAMETER Experiment Name: At_Drought_Soil_Dry_P Parameter: Post Timepoint (hr) Value: 6
  misc_feature: MA Experiment 20001558 PARAMETER Experiment Name: At_Drought_Soil_Dry_P Parameter: Post-Treatment Value: Re-Water vs. No Drought
  misc_feature: MA Experiment 20001558 PARAMETER Experiment Name: At_Drought_Soil_Dry_P Parameter: Timepoint (day) Value: 13
  misc_feature: MA Experiment 20001558 PARAMETER Experiment Name: At_Drought_Soil_Dry_P Parameter: Treatment Value: Drought vs. No Drought
  misc_feature: MA Experiment ID: 20001560 Result: Down-regulated in Transcription
  misc_feature: MA Experiment 20001560 PARAMETER Experiment Name: At_Drought_Soil_Dry_P Parameter: Age (day) Value: 28
  misc_feature: MA Experiment 20001560 PARAMETER Experiment Name: At_Drought_Soil_Dry_P Parameter: Organism Value: A. thaliana
  misc_feature: MA Experiment 20001560 PARAMETER Experiment Name: At_Drought_Soil_Dry_P Parameter: Plant Line Value: WS
  misc_feature: MA Experiment 20001560 PARAMETER Experiment Name: At_Drought_Soil_Dry_P Parameter: Post Timepoint (hr) Value: None
  misc_feature: MA Experiment 20001560 PARAMETER Experiment Name: At_Drought_Soil_Dry_P Parameter: Post-Treatment Value: None
  misc_feature: MA Experiment 20001560 PARAMETER Experiment Name: At_Drought_Soil_Dry_P Parameter: Timepoint (day) Value: 14
  misc_feature: MA Experiment 20001560 PARAMETER Experiment Name: At_Drought_Soil_Dry_P Parameter: Treatment Value: Drought vs. No Drought
  misc_feature: MA Experiment ID: 20001904 Result: Down-regulated in Transcription
  misc_feature: MA Experiment 20001904 PARAMETER Experiment Name: At_Drought_Reproduction_P Parameter: Age (day) Value: 37
  misc_feature: MA Experiment 20001904 PARAMETER Experiment Name: At_Drought_Reproduction_P Parameter: Organism Value: A. thaliana
  misc_feature: MA Experiment 20001904 PARAMETER Experiment Name: At_Drought_Reproduction_P Parameter: Plant Line Value: WS
  misc_feature: MA Experiment 20001904 PARAMETER Experiment Name: At_Drought_Reproduction_P Parameter: Timepoint (day) Value: 7
  misc_feature: MA Experiment 20001904 PARAMETER Experiment Name: At_Drought_Reproduction_P Parameter: Tissue Value: Rosettes
  misc_feature: MA Experiment 20001904 PARAMETER Experiment Name: At_Drought_Reproduction_P Parameter: Treatment Value: Drought vs. No Drought
  misc_feature: MA Experiment ID: 20001905 Result: Down-regulated in Transcription
  misc_feature: MA Experiment 20001905 PARAMETER Experiment Name: At_Drought_Reproduction_P Parameter: Age (day) Value: 40
  misc_feature: MA Experiment 20001905 PARAMETER Experiment Name: At_Drought_Reproduction_P Parameter: Organism Value: A. thaliana
  misc_feature: MA Experiment 20001905 PARAMETER Experiment Name: At_Drought_Reproduction_P Parameter: Plant Line Value: WS
  misc_feature: MA Experiment 20001905 PARAMETER Experiment Name: At_Drought_Reproduction_P Parameter: Timepoint (day) Value: 10
  misc_feature: MA Experiment 20001905 PARAMETER Experiment Name: At_Drought_Reproduction_P Parameter: Tissue Value: Rosettes
  misc_feature: MA Experiment 20001905 PARAMETER Experiment Name: At_Drought_Reproduction_P Parameter: Treatment Value: Drought vs. No Drought
acttctactgtatcaagaagctccgttttgcttagccatagtgcgtctagggtttggttggtgggaagaaggttccgatcatggcgtcggtgtcgtcgtcggatcaaggacctaagacagaagcaggatgtagcggcggaggaggaggagagagctcggagacagtggcggcgagtgatcagatgttgttgtatagaggttttaagaaggcgaagaaggagagaggttgtacagctaaggagcgtattagtaaaatgcctccgtgcactgctggaaaaaggagttccatataccggggagtcaccagacatagatggacaggtcgttatgaagctcacctttgggataagagtacctggaaccaaaaccagaacaagaagggaaaacaagtttatctaggagcatatgatgatgaagaggctgctgctagagcttacgaccttgctgccttaaaatattggggtcctgggacacttataaattttccggtgactgattataccagggatttagaagaaatgcaaaatctctcaagggaagaataccttgcatctttacgtagaaaaagcagcggtttctctaggggaatagcgaaatatcgtggacttcaaagccgatgggacgcatcagccagtcgtatgcctggacctgaatacttcagtaacattcattacggggcaggtgatgatcgtggaacagaaggtgactttctaggtagcttttgtctggaaagaaagattgatctaacaggatacataaagtggtggggagccaacaagaaccgtcaaccagaatcttcatcaaaagcatcagaggatgcaaacgtcgaagatgctggtactgagcttaaaacactggaacacacatcccatgcaacagaaccatacaaggcgccaaaccttggcgtccttcgtggaactcagagaaaagaaaaagaaatatcatcaccatcaagctcttctgctttaagcatcttgtctcagtcgcctgccttcaagagcctagaggagaaagtgttgaagatccaagaaagctgcaataatgaaaacgatgagaatgcaaaccgtaacatcatcaatatggagaagtataacggcaaggcaatagagaaaccagttgtgagtcatggagttgctttaggcggtgctgctgctttgtctcttcagaaaagcatgtacccacttacctctctcttaacggctccattgctcaccaactacaatacattggatcctcttgcagaccctattctctggacaccatttcttccttcaggatcctctcttacttcagaggtgacaaagacagagaccagctgttccacgtacagctacctcccacaagagaaatgagccgttccctttagactttatgtatgccagattctccttttttgagatgaattcgtcgacttgacatctctttgtctcttttatggagaaaaagttgggaaaagtgtgacaatggtctgaagcaggaatgtacaggttttgttagtggttgtgtttttttttttttttccagtgtggaatatagaatcatgatattttgtgtaaaacagaaaaaagttatcattatagtatagaagtttgctcttaatatc

SEQ ID NO: 37518 - protein, 423 aa, Arabidopsis thaliana
  peptide (1)..(423): Ceres Seq. ID no. 12335450
  misc_feature (68)..(141): Pfam Name: AP2 domain Pfam Description: AP2 domain
  misc_feature (52)..(192): Homolog of NCBI NO: 25518475 NR Description: hypothetical protein T24D18.16 - Arabidopsis
  misc_feature (23)..(187): Homolog of NCBI NO: 34221733 NR Description: putative AP2 domain transcription factor
  misc_feature (52)..(192): Homolog of NCBI NO: 18394319 NR Description: ovule development protein, putative
  misc_feature (23)..(199): Homolog of NCBI NO: 26449695 NR Description: unknown protein [Arabidopsis thaliana]
  misc_feature (13)..(192): Homolog of NCBI NO: 15232481 NR Description: aintegumaenta-like protein; protein id:
  misc_feature (1)..(423): Homolog of NCBI NO: 25408750 NR Description: probable AP2 domain transcription factor
  misc_feature (1)..(423): Homolog of NCBI NO: 26452593 NR Description: putative AP2 domain transcription factor
  misc_feature (1)..(423): Homolog of NCBI NO: 30688760 NR Description: ovule development protein, putative [Arabidopsis
  misc_feature (1)..(423): Homolog of NCBI NO: 18405784 NR Description: putative AP2 domain transcription factor
  misc_feature (1)..(423): Homolog of NCBI NO: 21593696 NR Description: putative AP2 domain transcription factor
MASVSSSDQGPKTEAGCSGGGGGESSETVAASDQMLLYRGFKKAKKERGCTAKERISKMPPCTAGKRSSIYRGVTRHRWTGRYEAHLWDKSTWNQNQNKKGKQVYLGAYDDEEAAARAYDLAALKYWGPGTLINFPVTDYTRDLEEMQNLSREEYLASLRRKSSGFSRGIAKYRGLQSRWDASASRMPGPEYFSNIHYGAGDDRGTEGDFLGSFCLERKIDLTGYIKWWGANKNRQPESSSKASEDANVEDAGTELKTLEHTSHATEPYKAPNLGVLRGTQRKEKEISSPSSSSALSILSQSPAFKSLEEKVLKIQESCNNENDENANRNIINMEKYNGKAIEKPVVSHGVALGGAAALSLQKSMYPLTSLLTAPLLTNYNTLDPLADPILWTPFLPSGSSLTSEVTKTETSCSTYSYLPQEK

SEQ ID NO: 37519 - protein, 389 aa, Arabidopsis thaliana
  peptide (1)..(389): Ceres Seq. ID no. 12335451
  misc_feature (34)..(107): Pfam Name: AP2 domain Pfam Description: AP2 domain
  misc_feature (18)..(158): Homolog of NCBI NO: 25518475 NR Description: hypothetical protein T24D18.16 - Arabidopsis
  misc_feature (1)..(153): Homolog of NCBI NO: 34221733 NR Description: putative AP2 domain transcription factor
  misc_feature (18)..(158): Homolog of NCBI NO: 18394319 NR Description: ovule development protein, putative
  misc_feature (1)..(165): Homolog of NCBI NO: 26449695 NR Description: unknown protein [Arabidopsis thaliana]
  misc_feature (1)..(158): Homolog of NCBI NO: 15232481 NR Description: aintegumaenta-like protein; protein id:
  misc_feature (1)..(389): Homolog of NCBI NO: 25408750 NR Description: probable AP2 domain transcription factor
  misc_feature (1)..(389): Homolog of NCBI NO: 26452593 NR Description: putative AP2 domain transcription factor
  misc_feature (1)..(389): Homolog of NCBI NO: 30688760 NR Description: ovule development protein, putative [Arabidopsis
  misc_feature (1)..(389): Homolog of NCBI NO: 18405784 NR Description: putative AP2 domain transcription factor
  misc_feature (1)..(389): Homolog of NCBI NO: 21593696 NR Description: putative AP2 domain transcription factor
MLLYRGFKKAKKERGCTAKERISKMPPCTAGKRSSIYRGVTRHRWTGRYEAHLWDKSTWNQNQNKKGKQVYLGAYDDEEAAARAYDLAALKYWGPGTLINFPVTDYTRDLEEMQNLSREEYLASLRRKSSGFSRGIAKYRGLQSRWDASASRMPGPEYFSNIHYGAGDDRGTEGDFLGSFCLERKIDLTGYIKWWGANKNRQPESSSKASEDANVEDAGTELKTLEHTSHATEPYKAPNLGVLRGTQRKEKEISSPSSSSALSILSQSPAFKSLEEKVLKIQESCNNENDENANRNIINMEKYNGKAIEKPVVSHGVALGGAAALSLQKSMYPLTSLLTAPLLTNYNTLDPLADPILWTPFLPSGSSLTSEVTKTETSCSTYSYLPQEK

SEQ ID NO: 37520 - protein, 365 aa, Arabidopsis thaliana
  peptide (1)..(365): Ceres Seq. ID no. 12335452
  misc_feature (10)..(83): Pfam Name: AP2 domain Pfam Description: AP2 domain
  misc_feature (1)..(134): Homolog of NCBI NO: 25518475 NR Description: hypothetical protein T24D18.16 - Arabidopsis
  misc_feature (1)..(129): Homolog of NCBI NO: 34221733 NR Description: putative AP2 domain transcription factor
  misc_feature (1)..(134): Homolog of NCBI NO: 18394319 NR Description: ovule development protein, putative
  misc_feature (1)..(141): Homolog of NCBI NO: 26449695 NR Description: unknown protein [Arabidopsis thaliana]
  misc_feature (1)..(134): Homolog of NCBI NO: 15232481 NR Description: aintegumaenta-like protein; protein id:
  misc_feature (1)..(365): Homolog of NCBI NO: 25408750 NR Description: probable AP2 domain transcription factor
  misc_feature (1)..(365): Homolog of NCBI NO: 26452593 NR Description: putative AP2 domain transcription factor
  misc_feature (1)..(365): Homolog of NCBI NO: 30688760 NR Description: ovule development protein, putative [Arabidopsis
  misc_feature (1)..(365): Homolog of NCBI NO: 18405784 NR Description: putative AP2 domain transcription factor
  misc_feature (1)..(365): Homolog of NCBI NO: 21593696 NR Description: putative AP2 domain transcription factor
MPPCTAGKRSSIYRGVTRHRWTGRYEAHLWDKSTWNQNQNKKGKQVYLGAYDDEEAAARAYDLAALKYWGPGTLINFPVTDYTRDLEEMQNLSREEYLASLRRKSSGFSRGIAKYRGLQSRWDASASRMPGPEYFSNIHYGAGDDRGTEGDFLGSFCLERKIDLTGYIKWWGANKNRQPESSSKASEDANVEDAGTELKTLEHTSHATEPYKAPNLGVLRGTQRKEKEISSPSSSSALSILSQSPAFKSLEEKVLKIQESCNNENDENANRNIINMEKYNGKAIEKPVVSHGVALGGAAALSLQKSMYPLTSLLTAPLLTNYNTLDPLADPILWTPFLPSGSSLTSEVTKTETSCSTYSYLPQEK

SEQ ID NO: 37521 - DNA, 850 bp, Arabidopsis thaliana
  misc_feature (1)..(850): Ceres Seq. ID no. 12738172
  misc_feature: MA Experiment ID: 108464 Result: Down-regulated in Transcription
  misc_feature: MA Experiment 108464 PARAMETER Experiment Name: At_Germinating_Seeds_cDNA_P Parameter: Age (day) Value: 4 vs. 0
  misc_feature: MA Experiment 108464 PARAMETER Experiment Name: At_Germinating_Seeds_cDNA_P Parameter: Tissue Value: Germinating Seeds
  misc_feature: MA Experiment ID: 108488 Result: Down-regulated in Transcription
  misc_feature: MA Experiment ID: 108605 Result: Up-regulated in Transcription
  misc_feature: MA Experiment 108605 PARAMETER Experiment Name: At_100uM_ABA_cDNA_P Parameter: Timepoint (hr) Value: 6
  misc_feature: MA Experiment 108605 PARAMETER Experiment Name: At_100uM_ABA_cDNA_P Parameter: Tissue Value: Aerial
  misc_feature: MA Experiment 108605 PARAMETER Experiment Name: At_100uM_ABA_cDNA_P Parameter: Treatment Value: 100uM ABA vs. No Treatment
  misc_feature: MA Experiment ID: 108607 Result: Up-regulated in Transcription
  misc_feature: MA Experiment 108607 PARAMETER Experiment Name: At_100uM_ABA_cDNA_P Parameter: Timepoint (hr) Value: 4
  misc_feature: MA Experiment 108607 PARAMETER Experiment Name: At_100uM_ABA_cDNA_P Parameter: Tissue Value: Aerial
  misc_feature: MA Experiment 108607 PARAMETER Experiment Name: At_100uM_ABA_cDNA_P Parameter: Treatment Value: 100uM ABA vs. No Treatment
  misc_feature: MA Experiment ID: 20000069 Result: Up-regulated in Transcription
  misc_feature: MA Experiment 20000069 PARAMETER Experiment Name: At_100uM_ABA_Mutants_cDNA_P Parameter: Plant Line Value: CS23
  misc_feature: MA Experiment 20000069 PARAMETER Experiment Name: At_100uM_ABA_Mutants_cDNA_P Parameter: Timepoint (hr) Value: 6
  misc_feature: MA Experiment 20000069 PARAMETER Experiment Name: At_100uM_ABA_Mutants_cDNA_P Parameter: Tissue Value: Aerial
  misc_feature: MA Experiment 20000069 PARAMETER Experiment Name: At_100uM_ABA_Mutants_cDNA_P Parameter: Treatment Value: 100uM ABA vs. No Treatment
  misc_feature: MA Experiment ID: 20000072 Result: Up-regulated in Transcription
  misc_feature: MA Experiment 20000072 PARAMETER Experiment Name: At_100uM_ABA_Mutants_cDNA_P Parameter: Plant Line Value: CS8105
  misc_feature: MA Experiment 20000072 PARAMETER Experiment Name: At_100uM_ABA_Mutants_cDNA_P Parameter: Timepoint (hr) Value: 6
  misc_feature: MA Experiment 20000072 PARAMETER Experiment Name: At_100uM_ABA_Mutants_cDNA_P Parameter: Tissue Value: Aerial
  misc_feature: MA Experiment 20000072 PARAMETER Experiment Name: At_100uM_ABA_Mutants_cDNA_P Parameter: Treatment Value: 100uM ABA vs. No Treatment
  misc_feature: MA Experiment ID: 20000087 Result: Up-regulated in Transcription
  misc_feature: MA Experiment 20000087 PARAMETER Experiment Name: At_100uM_ABA_Mutants_cDNA_P Parameter: Plant Line Value: WS
  misc_feature: MA Experiment 20000087 PARAMETER Experiment Name: At_100uM_ABA_Mutants_cDNA_P Parameter: Timepoint (hr) Value: 6
  misc_feature: MA Experiment 20000087 PARAMETER Experiment Name: At_100uM_ABA_Mutants_cDNA_P Parameter: Tissue Value: Aerial
  misc_feature: MA Experiment 20000087 PARAMETER Experiment Name: At_100uM_ABA_Mutants_cDNA_P Parameter: Treatment Value: 100uM ABA vs. No Treatment
  misc_feature: MA Experiment ID: 20000113 Result: Down-regulated in Transcription
  misc_feature: MA Experiment 20000113 PARAMETER Experiment Name: At_42deg_Heat_cDNA_P Parameter: Temperature (deg C) Value: 42 vs. 22
  misc_feature: MA Experiment 20000113 PARAMETER Experiment Name: At_42deg_Heat_cDNA_P Parameter: Timepoint (hr) Value: 8
  misc_feature: MA Experiment 20000113 PARAMETER Experiment Name: At_42deg_Heat_cDNA_P Parameter: Tissue Value: Aerial
  misc_feature: MA Experiment ID: 20000185 Result: Up-regulated in Transcription
  misc_feature: MA Experiment 20000185 PARAMETER Experiment Name: At_Roots__P Parameter: Age (day) Value: 7 vs. 21
  misc_feature: MA Experiment 20000185 PARAMETER Experiment Name: At_Roots__P Parameter: Organism Value: A. thaliana
  misc_feature: MA Experiment 20000185 PARAMETER Experiment Name: At_Roots__P Parameter: Tissue Value: Roots vs. Whole Plant
  misc_feature: MA Experiment ID: 20000224 Result: Up-regulated in Transcription
  misc_feature: MA Experiment ID: 20000234 Result: Up-regulated in Transcription
  misc_feature: MA Experiment 20000234 PARAMETER Experiment Name: At_Siliques_P Parameter: Age (day) Value: 21
  misc_feature: MA Experiment 20000234 PARAMETER Experiment Name: At_Siliques_P Parameter: Organism Value: A. thaliana
  misc_feature: MA Experiment 20000234 PARAMETER Experiment Name: At_Siliques_P Parameter: Plant Line Value: WS
  misc_feature: MA Experiment 20000234 PARAMETER Experiment Name: At_Siliques_P Parameter: Tissue Value: Less Than 5mm Siliques vs. Whole Plant
  misc_feature: MA Experiment ID: 20000264 Result: Up-regulated in Transcription
  misc_feature: MA Experiment 20000264 PARAMETER Experiment Name: At_Open_Flower_P Parameter: Age (day) Value: 21
  misc_feature: MA Experiment 20000264 PARAMETER Experiment Name: At_Open_Flower_P Parameter: Plant Line Value: WS
  misc_feature: MA Experiment 20000264 PARAMETER Experiment Name: At_Open_Flower_P Parameter: Tissue Value: Open Flower vs. Whole Plant
  misc_feature: MA Experiment ID: 20000286 Result: Up-regulated in Transcription
  misc_feature: MA Experiment 20000286 PARAMETER Experiment Name: At_Open_Flower_P Parameter: Age (day) Value: 21
  misc_feature: MA Experiment 20000286 PARAMETER Experiment Name: At_Open_Flower_P Parameter: Plant Line Value: WS
  misc_feature: MA Experiment 20000286 PARAMETER Experiment Name: At_Open_Flower_P Parameter: Tissue Value: Half Open vs. Whole Plant
  misc_feature: MA Experiment ID: 20000436 Result: Up-regulated in Transcription
  misc_feature: MA Experiment 20000436 PARAMETER Experiment Name: At_Drought_P Parameter: Age (day) Value: 7
  misc_feature: MA Experiment 20000436 PARAMETER Experiment Name: At_Drought_P Parameter: Organism Value: A. thaliana
  misc_feature: MA Experiment 20000436 PARAMETER Experiment Name: At_Drought_P Parameter: Plant Line Value: WS
  misc_feature: MA Experiment 20000436 PARAMETER Experiment Name: At_Drought_P Parameter: Timepoint (hr) Value: 12
  misc_feature: MA Experiment 20000436 PARAMETER Experiment Name: At_Drought_P Parameter: Tissue Value: Whole Plant
  misc_feature: MA Experiment 20000436 PARAMETER Experiment Name: At_Drought_P Parameter: Treatment Value: Drought vs. No Drought
  misc_feature: MA Experiment ID: 20000437 Result: Up-regulated in Transcription
  misc_feature: MA Experiment 20000437 PARAMETER Experiment Name: At_Drought_P Parameter: Age (day) Value: 8
  misc_feature: MA Experiment 20000437 PARAMETER Experiment Name: At_Drought_P Parameter: Organism Value: A. thaliana
  misc_feature: MA Experiment 20000437 PARAMETER Experiment Name: At_Drought_P Parameter: Plant Line Value: WS
  misc_feature: MA Experiment 20000437 PARAMETER Experiment Name: At_Drought_P Parameter: Timepoint (hr) Value: 24
  misc_feature: MA Experiment 20000437 PARAMETER Experiment Name: At_Drought_P Parameter: Tissue Value: Whole Plant
  misc_feature: MA Experiment 20000437 PARAMETER Experiment Name: At_Drought_P Parameter: Treatment Value: Drought vs. No Drought
  misc_feature: MA Experiment ID: 20000439 Result: Up-regulated in Transcription
  misc_feature: MA Experiment 20000439 PARAMETER Experiment Name: At_Roots__P Parameter: Age (day) Value: 14 vs. 21
  misc_feature: MA Experiment 20000439 PARAMETER Experiment Name: At_Roots__P Parameter: Organism Value: A. thaliana
  misc_feature: MA Experiment 20000439 PARAMETER Experiment Name: At_Roots__P Parameter: Tissue Value: Roots vs. Whole Plant
  misc_feature: MA Experiment ID: 20000794 Result: Up-regulated in Transcription
  misc_feature: MA Experiment 20000794 PARAMETER Experiment Name: At_Petals_P Parameter: Age (day) Value: 23-25 days
  misc_feature: MA Experiment 20000794 PARAMETER Experiment Name: At_Petals_P Parameter: Plant Line Value: WS
  misc_feature: MA Experiment 20000794 PARAMETER Experiment Name: At_Petals_P Parameter: Tissue Value: Petals vs. Whole plant
  misc_feature: MA Experiment ID: 20001557 Result: Up-regulated in Transcription
  misc_feature: MA Experiment 20001557 PARAMETER Experiment Name: At_Drought_Soil_Dry_P Parameter: Age (day) Value: 27
  misc_feature: MA Experiment 20001557 PARAMETER Experiment Name: At_Drought_Soil_Dry_P Parameter: Organism Value: A. thaliana
  misc_feature: MA Experiment 20001557 PARAMETER Experiment Name: At_Drought_Soil_Dry_P Parameter: Plant Line Value: WS
  misc_feature: MA Experiment 20001557 PARAMETER Experiment Name: At_Drought_Soil_Dry_P Parameter: Post Timepoint (hr) Value: 3
  misc_feature: MA Experiment 20001557 PARAMETER Experiment Name: At_Drought_Soil_Dry_P Parameter: Post-Treatment Value: Re-Water vs. No Drought
  misc_feature: MA Experiment 20001557 PARAMETER Experiment Name: At_Drought_Soil_Dry_P Parameter: Timepoint (day) Value: 13
  misc_feature: MA Experiment 20001557 PARAMETER Experiment Name: At_Drought_Soil_Dry_P Parameter: Treatment Value: Drought vs. No Drought
  misc_feature: MA Experiment ID: 20001757 Result: Down-regulated in Transcription
  misc_feature: MA Experiment 20001757 PARAMETER Experiment Name: At_50mM_NH4NO3_L-to-H_P Parameter: Timepoint (hr) Value: 6
  misc_feature: MA Experiment 20001757 PARAMETER Experiment Name: At_50mM_NH4NO3_L-to-H_P Parameter: Tissue Value: Leaf
  misc_feature: MA Experiment 20001757 PARAMETER Experiment Name: At_50mM_NH4NO3_L-to-H_P Parameter: Treatment Value: 50mM NH4NO3 vs 100mM Mannitol
  misc_feature: MA Experiment ID: 20001904 Result: Up-regulated in Transcription
  misc_feature: MA Experiment 20001904 PARAMETER Experiment Name: At_Drought_Reproduction_P Parameter: Age (day) Value: 37
  misc_feature: MA Experiment 20001904 PARAMETER Experiment Name: At_Drought_Reproduction_P Parameter: Organism Value: A. thaliana
  misc_feature: MA Experiment 20001904 PARAMETER Experiment Name: At_Drought_Reproduction_P Parameter: Plant Line Value: WS
  misc_feature: MA Experiment 20001904 PARAMETER Experiment Name: At_Drought_Reproduction_P Parameter: Timepoint (day) Value: 7
  misc_feature: MA Experiment 20001904 PARAMETER Experiment Name: At_Drought_Reproduction_P Parameter: Tissue Value: Rosettes
  misc_feature: MA Experiment 20001904 PARAMETER Experiment Name: At_Drought_Reproduction_P Parameter: Treatment Value: Drought vs. No Drought
  misc_feature: MA Experiment ID: 20001905 Result: Up-regulated in Transcription
  misc_feature: MA Experiment 20001905 PARAMETER Experiment Name: At_Drought_Reproduction_P Parameter: Age (day) Value: 40
  misc_feature: MA Experiment 20001905 PARAMETER Experiment Name: At_Drought_Reproduction_P Parameter: Organism Value: A. thaliana
  misc_feature: MA Experiment 20001905 PARAMETER Experiment Name: At_Drought_Reproduction_P Parameter: Plant Line Value: WS
  misc_feature: MA Experiment 20001905 PARAMETER Experiment Name: At_Drought_Reproduction_P Parameter: Timepoint (day) Value: 10
  misc_feature: MA Experiment 20001905 PARAMETER Experiment Name: At_Drought_Reproduction_P Parameter: Tissue Value: Rosettes
  misc_feature: MA Experiment 20001905 PARAMETER Experiment Name: At_Drought_Reproduction_P Parameter: Treatment Value: Drought vs. No Drought
cgtatttggtcgtgcttgtgcaaatagggttgcagagataagcaaaccaggggagaaacagaaacctcttgagaaggatgcgggtgagaagactattgcatggctggacaggttgagaaactcaaacgggtctctacctacttcaactatcagattgaacatgcagaggattatgcagaacaacgcagctgtgttccgcacgcaagaaacattggaagaaggttgtcagttgattgacaaggcctgggaaagttttggggacgtccaggtgaaagatcggagtatgatatggaactcggatttgatagagacattggaactggagaaccttttgataaacgcatccataacaatgcattcagcagaagcacgaaaggaaagcagaggagcacatgctcgggaagacttcacgaaaagagaggatggagaatggatgaagcatacattgggatattgggaagatgagaaagtgagattggattataggcctgttcacatggacactctcgacgatgagatcgacactttccctcccaaagctcgtgtctattgatcgagcccatgtttttattttatctgttatcggaataataataataatcaggaaccccccaaaaaaagggaattaggagaagaagacggagttatgagctgatggagcacaaaggactgttctgaaactgggtttacgttttacaccagaaacgatgaaaataaattgatagaagaggaaaaaacactacaattcttattttctttatcagttcctgaaattgttacattctttgttacctgttaattacgccttggtgatattcatttttttttttaaatcaaaatgttcgaactc

SEQ ID NO: 37522 - protein, 183 aa, Arabidopsis thaliana
  peptide (1)..(183): Ceres Seq. ID no. 12738173
  misc_feature (51)..(183): Pfam Name: Fumarate reductase/succinate dehydrogenase Pfam Description: Fumarate reductase/succinate dehydrogenase
  misc_feature (1)..(183): Homolog of NCBI NO: 22995327 NR Description: hypothetical protein [Xylella fastidiosa Dixon]
  misc_feature (1)..(183): Homolog of NCBI NO: 23011974 NR Description: hypothetical protein [Magnetospirillum
  misc_feature (1)..(183): Homolog of NCBI NO: 28198269 NR Description: succinate dehydrogenase flavoprotein subunit
  misc_feature (1)..(183): Homolog of NCBI NO: 21231574 NR Description: succinate dehydrogenase flavoprotein subunit
  misc_feature (1)..(183): Homolog of NCBI NO: 22996847 NR Description: hypothetical protein [Xylella fastidiosa Ann-1]
  misc_feature (1)..(183): Homolog of NCBI NO: 15837674 NR Description: succinate dehydrogenase, flavoprotein subunit
  misc_feature (1)..(183): Homolog of NCBI NO: 21242816 NR Description: succinate dehydrogenase flavoprotein subunit
  misc_feature (1)..(183): Homolog of NCBI NO: 34394418 NR Description: putative succinate dehydrogenase flavoprotein
  misc_feature (1)..(183): Homolog of NCBI NO: 15224174 NR Description: putative succinate dehydrogenase flavoprotein
  misc_feature (1)..(183): Homolog of NCBI NO: 15240075 NR Description: succinate dehydrogenase flavoprotein alpha
VFGRACANRVAEISKPGEKQKPLEKDAGEKTIAWLDRLRNSNGSLPTSTIRLNMQRIMQNNAAVFRTQETLEEGCQLIDKAWESFGDVQVKDRSMIWNSDLIETLELENLLINASITMHSAEARKESRGAHAREDFTKREDGEWMKHTLGYWEDEKVRLDYRPVHMDTLDDEIDTFPPKARVY

SEQ ID NO: 37523 - protein, 130 aa, Arabidopsis thaliana
  peptide (1)..(130): Ceres Seq. ID no. 12738174
  misc_feature (1)..(130): Pfam Name: Fumarate reductase/succinate dehydrogenase Pfam Description: Fumarate reductase/succinate dehydrogenase
  misc_feature (1)..(130): Homolog of NCBI NO: 22995327 NR Description: hypothetical protein [Xylella fastidiosa Dixon]
  misc_feature (1)..(130): Homolog of NCBI NO: 23011974 NR Description: hypothetical protein [Magnetospirillum
  misc_feature (1)..(130): Homolog of NCBI NO: 28198269 NR Description: succinate dehydrogenase flavoprotein subunit
  misc_feature (1)..(130): Homolog of NCBI NO: 21231574 NR Description: succinate dehydrogenase flavoprotein subunit
  misc_feature (1)..(130): Homolog of NCBI NO: 22996847 NR Description: hypothetical protein [Xylella fastidiosa Ann-1]
  misc_feature (1)..(130): Homolog of NCBI NO: 15837674 NR Description: succinate dehydrogenase, flavoprotein subunit
  misc_feature (1)..(130): Homolog of NCBI NO: 21242816 NR Description: succinate dehydrogenase flavoprotein subunit
  misc_feature (1)..(130): Homolog of NCBI NO: 34394418 NR Description: putative succinate dehydrogenase flavoprotein
  misc_feature (1)..(130): Homolog of NCBI NO: 15224174 NR Description: putative succinate dehydrogenase flavoprotein
  misc_feature (1)..(130): Homolog of NCBI NO: 15240075 NR Description: succinate dehydrogenase flavoprotein alpha
MQRIMQNNAAVFRTQETLEEGCQLIDKAWESFGDVQVKDRSMIWNSDLIETLELENLLINASITMHSAEARKESRGAHAREDFTKREDGEWMKHTLGYWEDEKVRLDYRPVHMDTLDDEIDTFPPKARVY

SEQ ID NO: 37524 - protein, 126 aa, Arabidopsis thaliana
  peptide (1)..(126): Ceres Seq. ID no. 12738175
  misc_feature (1)..(126): Pfam Name: Fumarate reductase/succinate dehydrogenase Pfam Description: Fumarate reductase/succinate dehydrogenase
  misc_feature (1)..(126): Homolog of NCBI NO: 22995327 NR Description: hypothetical protein [Xylella fastidiosa Dixon]
  misc_feature (1)..(126): Homolog of NCBI NO: 23011974 NR Description: hypothetical protein [Magnetospirillum
  misc_feature (1)..(126): Homolog of NCBI NO: 28198269 NR Description: succinate dehydrogenase flavoprotein subunit
  misc_feature (1)..(126): Homolog of NCBI NO: 21231574 NR Description: succinate dehydrogenase flavoprotein subunit
  misc_feature (1)..(126): Homolog of NCBI NO: 22996847 NR Description: hypothetical protein [Xylella fastidiosa Ann-1]
  misc_feature (1)..(126): Homolog of NCBI NO: 15837674 NR Description: succinate dehydrogenase, flavoprotein subunit
  misc_feature (1)..(126): Homolog of NCBI NO: 21242816 NR Description: succinate dehydrogenase flavoprotein subunit
  misc_feature (1)..(126): Homolog of NCBI NO: 34394418 NR Description: putative succinate dehydrogenase flavoprotein
  misc_feature (1)..(126): Homolog of NCBI NO: 15224174 NR Description: putative succinate dehydrogenase flavoprotein
  misc_feature (1)..(126): Homolog of NCBI NO: 15240075 NR Description: succinate dehydrogenase flavoprotein alpha
MQNNAAVFRTQETLEEGCQLIDKAWESFGDVQVKDRSMIWNSDLIETLELENLLINASITMHSAEARKESRGAHAREDFTKREDGEWMKHTLGYWEDEKVRLDYRPVHMDTLDDEIDTFPPKARVY

SEQ ID NO: 37525 - DNA, 787 bp, Arabidopsis thaliana
  misc_feature (1)..(787): Ceres Seq. ID no. 12739078
  misc_feature: MA Experiment ID: 108434 Result: Up-regulated in Transcription
  misc_feature: MA Experiment 108434 PARAMETER Experiment Name: At_Root_Tips_cDNA_P Parameter: Tissue Value: Root Tips
  misc_feature: MA Experiment ID: 108462 Result: Down-regulated in Transcription
  misc_feature: MA Experiment 108462 PARAMETER Experiment Name: At_Germinating_Seeds_cDNA_P Parameter: Age (day) Value: 2 vs. 0
  misc_feature: MA Experiment 108462 PARAMETER Experiment Name: At_Germinating_Seeds_cDNA_P Parameter: Tissue Value: Germinating Seeds
  misc_feature: MA Experiment ID: 108464 Result: Down-regulated in Transcription
  misc_feature: MA Experiment 108464 PARAMETER Experiment Name: At_Germinating_Seeds_cDNA_P Parameter: Age (day) Value: 4 vs. 0
  misc_feature: MA Experiment 108464 PARAMETER Experiment Name: At_Germinating_Seeds_cDNA_P Parameter: Tissue Value: Germinating Seeds
  misc_feature: MA Experiment ID: 108569 Result: Down-regulated in Transcription
  misc_feature: MA Experiment 108569 PARAMETER Experiment Name: At_0.001%_MeJA__cDNA_P Parameter: Timepoint (hr) Value: 6
  misc_feature: MA Experiment 108569 PARAMETER Experiment Name: At_0.001%_MeJA__cDNA_P Parameter: Tissue Value: Aerial
  misc_feature: MA Experiment 108569 PARAMETER Experiment Name: At_0.001%_MeJA__cDNA_P Parameter: Treatment Value: 0.001% MeJA vs. No Treatment
  misc_feature: MA Experiment ID: 108576 Result: Up-regulated in Transcription
  misc_feature: MA Experiment 108576 PARAMETER Experiment Name: At_42deg_Heat_cDNA_P Parameter: Temperature (deg C) Value: 42 vs. 22
  misc_feature: MA Experiment 108576 PARAMETER Experiment Name: At_42deg_Heat_cDNA_P Parameter: Timepoint (hr) Value: 1
  misc_feature: MA Experiment 108576 PARAMETER Experiment Name: At_42deg_Heat_cDNA_P Parameter: Tissue Value: Aerial
  misc_feature: MA Experiment ID: 108577 Result: Up-regulated in Transcription
  misc_feature: MA Experiment 108577 PARAMETER Experiment Name: At_42deg_Heat_cDNA_P Parameter: Temperature (deg C) Value: 42 vs. 22
  misc_feature: MA Experiment 108577 PARAMETER Experiment Name: At_42deg_Heat_cDNA_P Parameter: Timepoint (hr) Value: 6
  misc_feature: MA Experiment 108577 PARAMETER Experiment Name: At_42deg_Heat_cDNA_P Parameter: Tissue Value: Aerial
  misc_feature: MA Experiment ID: 108579 Result: Down-regulated in Transcription
  misc_feature: MA Experiment 108579 PARAMETER Experiment Name: At_4deg_Cold_cDNA_P Parameter: Temperature (deg C) Value: 4 vs. 22
  misc_feature: MA Experiment 108579 PARAMETER Experiment Name: At_4deg_Cold_cDNA_P Parameter: Timepoint (hr) Value: 6
  misc_feature: MA Experiment 108579 PARAMETER Experiment Name: At_4deg_Cold_cDNA_P Parameter: Tissue Value: Aerial
  misc_feature: MA Experiment ID: 20000111 Result: Up-regulated in Transcription
  misc_feature: MA Experiment 20000111 PARAMETER Experiment Name: At_42deg_Heat_cDNA_P Parameter: Temperature (deg C) Value: 42 vs. 22
  misc_feature: MA Experiment 20000111 PARAMETER Experiment Name: At_42deg_Heat_cDNA_P Parameter: Timepoint (hr) Value: 6
  misc_feature: MA Experiment 20000111 PARAMETER Experiment Name: At_42deg_Heat_cDNA_P Parameter: Tissue Value: Aerial
  misc_feature: MA Experiment ID: 20000112 Result: Up-regulated in Transcription
  misc_feature: MA Experiment 20000112 PARAMETER Experiment Name: At_42deg_Heat_cDNA_P Parameter: Temperature (deg C) Value: 42 vs. 22
  misc_feature: MA Experiment 20000112 PARAMETER Experiment Name: At_42deg_Heat_cDNA_P Parameter: Timepoint (hr) Value: 2
  misc_feature: MA Experiment 20000112 PARAMETER Experiment Name: At_42deg_Heat_cDNA_P Parameter: Tissue Value: Aerial
  misc_feature: MA Experiment ID: 20000113 Result: Up-regulated in Transcription
  misc_feature: MA Experiment 20000113 PARAMETER Experiment Name: At_42deg_Heat_cDNA_P Parameter: Temperature (deg C) Value: 42 vs. 22
  misc_feature: MA Experiment 20000113 PARAMETER Experiment Name: At_42deg_Heat_cDNA_P Parameter: Timepoint (hr) Value: 8
  misc_feature: MA Experiment 20000113 PARAMETER Experiment Name: At_42deg_Heat_cDNA_P Parameter: Tissue Value: Aerial
  misc_feature: MA Experiment ID: 20000144 Result: Up-regulated in Transcription
  misc_feature: MA Experiment 20000144 PARAMETER Experiment Name: At_42deg_Heat_cDNA_P Parameter: Temperature (deg C) Value: 42 vs. 22
  misc_feature: MA Experiment 20000144 PARAMETER Experiment Name: At_42deg_Heat_cDNA_P Parameter: Timepoint (hr) Value: 1
  misc_feature: MA Experiment 20000144 PARAMETER Experiment Name: At_42deg_Heat_cDNA_P Parameter: Tissue Value: Aerial
  misc_feature: MA Experiment ID: 20000171 Result: Up-regulated in Transcription
  misc_feature: MA Experiment 20000171 PARAMETER Experiment Name: At_42deg_Heat_P Parameter: Age (day) Value: 14
  misc_feature: MA Experiment 20000171 PARAMETER Experiment Name: At_42deg_Heat_P Parameter: Organism Value: A. thaliana
  misc_feature: MA Experiment 20000171 PARAMETER Experiment Name: At_42deg_Heat_P Parameter: Plant Line Value: WS
  misc_feature: MA Experiment 20000171 PARAMETER Experiment Name: At_42deg_Heat_P Parameter: Temperature (deg C) Value: 42 vs. 22
  misc_feature: MA Experiment 20000171 PARAMETER Experiment Name: At_42deg_Heat_P Parameter: Timepoint (hr) Value: 1
  misc_feature: MA Experiment 20000171 PARAMETER Experiment Name: At_42deg_Heat_P Parameter: Tissue Value: Aerial
  misc_feature: MA Experiment ID: 20000173 Result: Up-regulated in Transcription
  misc_feature: MA Experiment 20000173 PARAMETER Experiment Name: At_42deg_Heat_P Parameter: Age (day) Value: 14
  misc_feature: MA Experiment 20000173 PARAMETER Experiment Name: At_42deg_Heat_P Parameter: Organism Value: A. thaliana
  misc_feature: MA Experiment 20000173 PARAMETER Experiment Name: At_42deg_Heat_P Parameter: Plant Line Value: WS
  misc_feature: MA Experiment 20000173 PARAMETER Experiment Name: At_42deg_Heat_P Parameter: Temperature (deg C) Value: 42 vs. 22
  misc_feature: MA Experiment 20000173 PARAMETER Experiment Name: At_42deg_Heat_P Parameter: Timepoint (hr) Value: 6
  misc_feature: MA Experiment 20000173 PARAMETER Experiment Name: At_42deg_Heat_P Parameter: Tissue Value: Aerial
  misc_feature: MA Experiment ID: 20000184 Result: Down-regulated in Transcription
  misc_feature: MA Experiment 20000184 PARAMETER Experiment Name: At_Shoots__P Parameter: Age (day) Value: 7
  misc_feature: MA Experiment 20000184 PARAMETER Experiment Name: At_Shoots__P Parameter: Tissue Value: Shoots vs. Whole Plant
  misc_feature: MA Experiment ID: 20000437 Result: Up-regulated in Transcription
  misc_feature: MA Experiment 20000437 PARAMETER Experiment Name: At_Drought_P Parameter: Age (day) Value: 8
  misc_feature: MA Experiment 20000437 PARAMETER Experiment Name: At_Drought_P Parameter: Organism Value: A. thaliana
  misc_feature: MA Experiment 20000437 PARAMETER Experiment Name: At_Drought_P Parameter: Plant Line Value: WS
  misc_feature: MA Experiment 20000437 PARAMETER Experiment Name: At_Drought_P Parameter: Timepoint (hr) Value: 24
  misc_feature: MA Experiment 20000437 PARAMETER Experiment Name: At_Drought_P Parameter: Tissue Value: Whole Plant
  misc_feature: MA Experiment 20000437 PARAMETER Experiment Name: At_Drought_P Parameter: Treatment Value: Drought vs. No Drought
  misc_feature: MA Experiment ID: 20001248 Result: Up-regulated in Transcription
  misc_feature: MA Experiment 20001248 PARAMETER Experiment Name: At_Far-red-induction_P Parameter: Age (day) Value: 7
  misc_feature: MA Experiment 20001248 PARAMETER Experiment Name: At_Far-red-induction_P Parameter: Light Value: Far-red vs. White
  misc_feature: MA Experiment 20001248 PARAMETER Experiment Name: At_Far-red-induction_P Parameter: Organism Value: A. thaliana
  misc_feature: MA Experiment 20001248 PARAMETER Experiment Name: At_Far-red-induction_P Parameter: Plant Line Value: Columbia
  misc_feature: MA Experiment 20001248 PARAMETER Experiment Name: At_Far-red-induction_P Parameter: Timepoint (hr) Value: 4
  misc_feature: MA Experiment 20001248 PARAMETER Experiment Name: At_Far-red-induction_P Parameter: Tissue Value: Whole Plant
  misc_feature: MA Experiment ID: 20001450 Result: Up-regulated in Transcription
  misc_feature: MA Experiment 20001450 PARAMETER Experiment Name: At_Far-red-induction_P Parameter: Age (day) Value: 7
  misc_feature: MA Experiment 20001450 PARAMETER Experiment Name: At_Far-red-induction_P Parameter: Light Value: Far-red vs. White
  misc_feature: MA Experiment 20001450 PARAMETER Experiment Name: At_Far-red-induction_P Parameter: Organism Value: A. thaliana
  misc_feature: MA Experiment 20001450 PARAMETER Experiment Name: At_Far-red-induction_P Parameter: Plant Line Value: Columbia
  misc_feature: MA Experiment 20001450 PARAMETER Experiment Name: At_Far-red-induction_P Parameter: Timepoint (hr) Value: 8
  misc_feature: MA Experiment 20001450 PARAMETER Experiment Name: At_Far-red-induction_P Parameter: Tissue Value: Whole Plant
  misc_feature: MA Experiment ID: 20001451 Result: Up-regulated in Transcription
  misc_feature: MA Experiment 20001451 PARAMETER Experiment Name: At_Far-red-induction_P Parameter: Age (day) Value: 7
  misc_feature: MA Experiment 20001451 PARAMETER Experiment Name: At_Far-red-induction_P Parameter: Light Value: Far-red vs. White
  misc_feature: MA Experiment 20001451 PARAMETER Experiment Name: At_Far-red-induction_P Parameter: Organism Value: A. thaliana
  misc_feature: MA Experiment 20001451 PARAMETER Experiment Name: At_Far-red-induction_P Parameter: Plant Line Value: Columbia
  misc_feature: MA Experiment 20001451 PARAMETER Experiment Name: At_Far-red-induction_P Parameter: Timepoint (hr) Value: 24
  misc_feature: MA Experiment 20001451 PARAMETER Experiment Name: At_Far-red-induction_P Parameter: Tissue Value: Whole Plant
cgtaagatgatgtcagatctggaggaaagggagcgttctgctttttctcctaatccttccgctagagcttatgatgaagaagagagaatcgctaggaagcttaaggaggagatagataggatacgtgcaagacatgcgaagaagaaaagtggtttccaaactccagagagtaatgtagatgaaaagagaaaagaagaaagaagtggtgctggagctagtgttcaactcgataaagagaaaatgttgaaggtttcttgggaaaaaagtggtgaagggtatacagctggaaggctaagagaagtgttttctgagtttggtgaggttgaagatgttgttattaggagtaccaagaagaaatgttctgctcttattgtaatggctacaaaggatggagctgttgcagcgacgaggacattgtgtggcaatctttctaatccattgttggttgtacctcttcagaaagcagcccaaaccgattttctgacggctaagaaatctgcagaagcagaaccgcagagtaacatagtaggtgccggtcttcaagcttatgaagatgccgtcatgcaaagactgctacaggcggctatggaccagaaaaagcgaggggtttaagccacatgatcaagaacaaagctccttcaagaccaaagtgataaagaataaagctctgcttcatgattaagaattaagctccttatacattgtttgtgtacatccaatctcatatcagttgttgttgtagaatttaaaattctaactcttctcgaaaaaaaaaatgcttcgtacc

SEQ ID NO: 37526 - protein, 203 aa, Arabidopsis thaliana
  peptide (1)..(203): Ceres Seq. ID no. 12739079
  misc_feature (1)..(203): Homolog of NCBI NO: 30689058 NR Description: DnaJ protein family [Arabidopsis thaliana]
  misc_feature (1)..(193): Homolog of NCBI NO: 8809700 NR Description: dbj|BAA91724.1~gene_id:MQM1.14~similar to unknown
RKMMSDLEERERSAFSPNPSARAYDEEERIARKLKEEIDRIRARHAKKKSGFQTPESNVDEKRKEERSGAGASVQLDKEKMLKVSWEKSGEGYTAGRLREVFSEFGEVEDVVIRSTKKKCSALIVMATKDGAVAATRTLCGNLSNPLLVVPLQKAAQTDFLTAKKSAEAEPQSNIVGAGLQAYEDAVMQRLLQAAMDQKKRGV

SEQ ID NO: 37527 - protein, 201 aa, Arabidopsis thaliana
  peptide (1)..(201): Ceres Seq. ID no. 12739080
  misc_feature (1)..(201): Homolog of NCBI NO: 30689058 NR Description: DnaJ protein family [Arabidopsis thaliana]
  misc_feature (1)..(191): Homolog of NCBI NO: 8809700 NR Description: dbj|BAA91724.1~gene_id:MQM1.14~similar to unknown
MMSDLEERERSAFSPNPSARAYDEEERIARKLKEEIDRIRARHAKKKSGFQTPESNVDEKRKEERSGAGASVQLDKEKMLKVSWEKSGEGYTAGRLREVFSEFGEVEDVVIRSTKKKCSALIVMATKDGAVAATRTLCGNLSNPLLVVPLQKAAQTDFLTAKKSAEAEPQSNIVGAGLQAYEDAVMQRLLQAAMDQKKRGV

SEQ ID NO: 37528 - protein, 200 aa, Arabidopsis thaliana
  peptide (1)..(200): Ceres Seq. ID no. 12739081
  misc_feature (1)..(200): Homolog of NCBI NO: 30689058 NR Description: DnaJ protein family [Arabidopsis thaliana]
  misc_feature (1)..(190): Homolog of NCBI NO: 8809700 NR Description: dbj|BAA91724.1~gene_id:MQM1.14~similar to unknown
MSDLEERERSAFSPNPSARAYDEEERIARKLKEEIDRIRARHAKKKSGFQTPESNVDEKRKEERSGAGASVQLDKEKMLKVSWEKSGEGYTAGRLREVFSEFGEVEDVVIRSTKKKCSALIVMATKDGAVAATRTLCGNLSNPLLVVPLQKAAQTDFLTAKKSAEAEPQSNIVGAGLQAYEDAVMQRLLQAAMDQKKRGV

SEQ ID NO: 37529 - DNA, 1260 bp, Arabidopsis thaliana
  misc_feature (1)..(1260): Ceres Seq. ID no. 12335589
  misc_feature: MA Experiment ID: 20000113 Result: Up-regulated in Transcription
  misc_feature: MA Experiment 20000113 PARAMETER Experiment Name: At_42deg_Heat_cDNA_P Parameter: Temperature (deg C) Value: 42 vs. 22
  misc_feature: MA Experiment 20000113 PARAMETER Experiment Name: At_42deg_Heat_cDNA_P Parameter: Timepoint (hr) Value: 8
  misc_feature: MA Experiment 20000113 PARAMETER Experiment Name: At_42deg_Heat_cDNA_P Parameter: Tissue Value: Aerial
  misc_feature: MA Experiment ID: 20000439 Result: Up-regulated in Transcription
  misc_feature: MA Experiment 20000439 PARAMETER Experiment Name: At_Roots__P Parameter: Age (day) Value: 14 vs. 21
  misc_feature: MA Experiment 20000439 PARAMETER Experiment Name: At_Roots__P Parameter: Organism Value: A. thaliana
  misc_feature: MA Experiment 20000439 PARAMETER Experiment Name: At_Roots__P Parameter: Tissue Value: Roots vs. Whole Plant
  misc_feature: MA Experiment ID: 20001451 Result: Down-regulated in Transcription
  misc_feature: MA Experiment 20001451 PARAMETER Experiment Name: At_Far-red-induction_P Parameter: Age (day) Value: 7
  misc_feature: MA Experiment 20001451 PARAMETER Experiment Name: At_Far-red-induction_P Parameter: Light Value: Far-red vs. White
  misc_feature: MA Experiment 20001451 PARAMETER Experiment Name: At_Far-red-induction_P Parameter: Organism Value: A. thaliana
  misc_feature: MA Experiment 20001451 PARAMETER Experiment Name: At_Far-red-induction_P Parameter: Plant Line Value: Columbia
  misc_feature: MA Experiment 20001451 PARAMETER Experiment Name: At_Far-red-induction_P Parameter: Timepoint (hr) Value: 24
  misc_feature: MA Experiment 20001451 PARAMETER Experiment Name: At_Far-red-induction_P Parameter: Tissue Value: Whole Plant
atctccactctgctaaatccgacgagagacgacgatgccaagcggtggtaacggaacaagtaacggagtcgctaacgcgaattccaccggtaacgcaggaacaagcggaaacgttccgatatataagccataccgtcacctgaaaaccctagaaggtcacacggcggcgatctcttgcgtcaaattctccaacgacggcaatcttctcgcttccgcttccgtagacaaaaccatgatcctctggtcagcaacaaactactctctcattcatcgttacgaaggtcactctagtggtatctccgatctagcttggtcttctgattcgcattacacttgctctgcttctgatgattgtacgcttcgaatctgggacgctagatctccttatgaatgtcttaaggttcttagaggtcatacgaatttcgtcttctgtgttaatttcaatcctccttcgaatttgattgtgtctggatcgttcgatgagacgattcgtatttgggaggttaagactgggaagtgtgttaggatgattaaagctcattcgatgccgatttcgagtgtgcattttaatagagatggatcgttgattgtttcggcaagtcatgatggttcttgtaagatttgggatgctaaagaaggaacttgcttgaagactcttattgatgataaatctccggctgtttctttcgctaagttctcgcccaatggcaagtttatactcgttgctactctcgatagtactctcaagctgtcgaactatgcgacggggaagtttttgaaagtgtatacaggacatactaacaaagtgttctgtatcacatcggcgttttctgtaacgaatgggaagtacattgtgagtggatcagaggataattgtgtgtatctgtgggatcttcaagcgagaaatatactgcagagactagaaggccacacagacgcagtgatctcagtgagttgccatccggttcagaacgagatatcttcatcgggtaatcatttggataaaactatcaggatttggaaacaggatgcttgaaaaacatgaatatatgtgtatggaattaatggtaacaacaatagttgagattgtgaatctgtttgatctgaacacactattttgatgtttcggaatgggatgaaatctcttgcaagttggtgttaatatttatgacagagatatcatctatgttctctccccaatatgtggatgatacttactttaaaactaaagctttttaataagagctactaaactaaaag

SEQ ID NO: 37530 - protein, 333 aa, Arabidopsis thaliana
  peptide (1)..(333): Ceres Seq. ID no. 12335590
  misc_feature (18)..(329): Homolog of NCBI NO: 23199987 NR Description: WD repeat domain 5B [Homo sapiens]
  misc_feature (1)..(332): Homolog of NCBI NO: 17864654 NR Description: will die slowly CG17437-PA
  misc_feature (1)..(332): Homolog of NCBI NO: 20302740 NR Description: unknown [Branchiostoma floridae]
  misc_feature (13)..(332): Homolog of NCBI NO: 34853150 NR Description: similar to hypothetical protein [Rattus
  misc_feature (13)..(332): Homolog of NCBI NO: 16554627 NR Description: WD repeat domain 5 protein; WD-repeat protein 5
  misc_feature (13)..(332): Homolog of NCBI NO: 6714707 NR Description: hypothetical protein [Homo sapiens]
  misc_feature (17)..(332): Homolog of NCBI NO: 30353827 NR Description: Unknown (protein for MGC:56591) [Danio rerio]
  misc_feature (28)..(115): Homolog of NCBI NO: 34394218 NR Description: putative WD repeat domain 5 protein
  misc_feature (120)..(332): Homolog of NCBI NO: 34394218 NR Description: putative WD repeat domain 5 protein
  misc_feature (1)..(333): Homolog of NCBI NO: 15235470 NR Description: G-protein beta family
MPSGGNGTSNGVANANSTGNAGTSGNVPIYKPYRHLKTLEGHTAAISCVKFSNDGNLLASASVDKTMILWSATNYSLIHRYEGHSSGISDLAWSSDSHYTCSASDDCTLRIWDARSPYECLKVLRGHTNFVFCVNFNPPSNLIVSGSFDETIRIWEVKTGKCVRMIKAHSMPISSVHFNRDGSLIVSASHDGSCKIWDAKEGTCLKTLIDDKSPAVSFAKFSPNGKFILVATLDSTLKLSNYATGKFLKVYTGHTNKVFCITSAFSVTNGKYIVSGSEDNCVYLWDLQARNILQRLEGHTDAVISVSCHPVQNEISSSGNHLDKTIRIWKQDA

SEQ ID NO: 37531 - protein, 267 aa, Arabidopsis thaliana
  peptide (1)..(267): Ceres Seq. ID no. 12335591
  misc_feature (1)..(263): Homolog of NCBI NO: 23199987 NR Description: WD repeat domain 5B [Homo sapiens]
  misc_feature (1)..(266): Homolog of NCBI NO: 17864654 NR Description: will die slowly CG17437-PA
  misc_feature (1)..(266): Homolog of NCBI NO: 20302740 NR Description: unknown [Branchiostoma floridae]
  misc_feature (1)..(266): Homolog of NCBI NO: 34853150 NR Description: similar to hypothetical protein [Rattus
  misc_feature (1)..(266): Homolog of NCBI NO: 16554627 NR Description: WD repeat domain 5 protein; WD-repeat protein 5
  misc_feature (1)..(266): Homolog of NCBI NO: 6714707 NR Description: hypothetical protein [Homo sapiens]
  misc_feature (1)..(266): Homolog of NCBI NO: 30353827 NR Description: Unknown (protein for MGC:56591) [Danio rerio]
  misc_feature (1)..(49): Homolog of NCBI NO: 34394218 NR Description: putative WD repeat domain 5 protein
  misc_feature (54)..(266): Homolog of NCBI NO: 34394218 NR Description: putative WD repeat domain 5 protein
  misc_feature (1)..(267): Homolog of NCBI NO: 15235470 NR Description: G-protein beta family
MILWSATNYSLIHRYEGHSSGISDLAWSSDSHYTCSASDDCTLRIWDARSPYECLKVLRGHTNFVFCVNFNPPSNLIVSGSFDETIRIWEVKTGKCVRMIKAHSMPISSVHFNRDGSLIVSASHDGSCKIWDAKEGTCLKTLIDDKSPAVSFAKFSPNGKFILVATLDSTLKLSNYATGKFLKVYTGHTNKVFCITSAFSVTNGKYIVSGSEDNCVYLWDLQARNILQRLEGHTDAVISVSCHPVQNEISSSGNHLDKTIRIWKQDA

SEQ ID NO: 37532 - protein, 169 aa, Arabidopsis thaliana
  peptide (1)..(169): Ceres Seq. ID no. 12335592
  misc_feature (1)..(168): Homolog of NCBI NO: 31196347 NR Description: ENSANGP00000012135 [Anopheles gambiae]
  misc_feature (1)..(165): Homolog of NCBI NO: 23199987 NR Description: WD repeat domain 5B [Homo sapiens]
  misc_feature (1)..(168): Homolog of NCBI NO: 17864654 NR Description: will die slowly CG17437-PA
  misc_feature (1)..(168): Homolog of NCBI NO: 20302740 NR Description: unknown [Branchiostoma floridae]
  misc_feature (1)..(168): Homolog of NCBI NO: 34853150 NR Description: similar to hypothetical protein [Rattus
  misc_feature (1)..(168): Homolog of NCBI NO: 16554627 NR Description: WD repeat domain 5 protein; WD-repeat protein 5
  misc_feature (1)..(168): Homolog of NCBI NO: 6714707 NR Description: hypothetical protein [Homo sapiens]
  misc_feature (1)..(168): Homolog of NCBI NO: 30353827 NR Description: Unknown (protein for MGC:56591) [Danio rerio]
  misc_feature (1)..(168): Homolog of NCBI NO: 34394218 NR Description: putative WD repeat domain 5 protein
  misc_feature (1)..(169): Homolog of NCBI NO: 15235470 NR Description: G-protein beta family
MIKAHSMPISSVHFNRDGSLIVSASHDGSCKIWDAKEGTCLKTLIDDKSPAVSFAKFSPNGKFILVATLDSTLKLSNYATGKFLKVYTGHTNKVFCITSAFSVTNGKYIVSGSEDNCVYLWDLQARNILQRLEGHTDAVISVSCHPVQNEISSSGNHLDKTIRIWKQDA

SEQ ID NO: 37533 - DNA, 799 bp, Arabidopsis thaliana
  misc_feature (1)..(799): Ceres Seq. ID no. 12338769
  misc_feature: MA Experiment ID: 20000179 Result: Up-regulated in Transcription
  misc_feature: MA Experiment 20000179 PARAMETER Experiment Name: At_Germinating_Seeds_P Parameter: Age (hr) Value: 6 vs. 0
  misc_feature: MA Experiment 20000179 PARAMETER Experiment Name: At_Germinating_Seeds_P Parameter: Tissue Value: Germinating Seeds
  misc_feature: MA Experiment ID: 20000180 Result: Up-regulated in Transcription
  misc_feature: MA Experiment 20000180 PARAMETER Experiment Name: At_Germinating_Seeds_P Parameter: Age (hr) Value: 24 vs. 0
  misc_feature: MA Experiment 20000180 PARAMETER Experiment Name: At_Germinating_Seeds_P Parameter: Tissue Value: Germinating Seeds
  misc_feature: MA Experiment ID: 20000214 Result: Down-regulated in Transcription
  misc_feature: MA Experiment 20000214 PARAMETER Experiment Name: At_4deg_Cold_P Parameter: Timepoint (hr) Value: 6
  misc_feature: MA Experiment ID: 20000227 Result: Down-regulated in Transcription
  misc_feature: MA Experiment 20000227 PARAMETER Experiment Name: At_Root-Tips-vs-Tops_P Parameter: Tissue Value: Root Tips vs. Root Tops
  misc_feature: MA Experiment ID: 20000234 Result: Down-regulated in Transcription
  misc_feature: MA Experiment 20000234 PARAMETER Experiment Name: At_Siliques_P Parameter: Age (day) Value: 21
  misc_feature: MA Experiment 20000234 PARAMETER Experiment Name: At_Siliques_P Parameter: Organism Value: A. thaliana
  misc_feature: MA Experiment 20000234 PARAMETER Experiment Name: At_Siliques_P Parameter: Plant Line Value: WS
  misc_feature: MA Experiment 20000234 PARAMETER Experiment Name: At_Siliques_P Parameter: Tissue Value: Less Than 5mm Siliques vs. Whole Plant
  misc_feature: MA Experiment ID: 20000235 Result: Down-regulated in Transcription
  misc_feature: MA Experiment 20000235 PARAMETER Experiment Name: At_Siliques_P Parameter: Age (day) Value: 21
  misc_feature: MA Experiment 20000235 PARAMETER Experiment Name: At_Siliques_P Parameter: Organism Value: A. thaliana
  misc_feature: MA Experiment 20000235 PARAMETER Experiment Name: At_Siliques_P Parameter: Plant Line Value: WS
  misc_feature: MA Experiment 20000235 PARAMETER Experiment Name: At_Siliques_P Parameter: Tissue Value: 5-10mm Siliques vs. Whole Plant
  misc_feature: MA Experiment ID: 20000264 Result: Down-regulated in Transcription
  misc_feature: MA Experiment 20000264 PARAMETER Experiment Name: At_Open_Flower_P Parameter: Age (day) Value: 21
  misc_feature: MA Experiment 20000264 PARAMETER Experiment Name: At_Open_Flower_P Parameter: Plant Line Value: WS
  misc_feature: MA Experiment 20000264 PARAMETER Experiment Name: At_Open_Flower_P Parameter: Tissue Value: Open Flower vs. Whole Plant
  misc_feature: MA Experiment ID: 20000439 Result: Down-regulated in Transcription
  misc_feature: MA Experiment 20000439 PARAMETER Experiment Name: At_Roots__P Parameter: Age (day) Value: 14 vs. 21
  misc_feature: MA Experiment 20000439 PARAMETER Experiment Name: At_Roots__P Parameter: Organism Value: A. thaliana
  misc_feature: MA Experiment 20000439 PARAMETER Experiment Name: At_Roots__P Parameter: Tissue Value: Roots vs. Whole Plant
  misc_feature: MA Experiment ID: 20001905 Result: Down-regulated in Transcription
  misc_feature: MA Experiment 20001905 PARAMETER Experiment Name: At_Drought_Reproduction_P Parameter: Age (day) Value: 40
  misc_feature: MA Experiment 20001905 PARAMETER Experiment Name: At_Drought_Reproduction_P Parameter: Organism Value: A. thaliana
  misc_feature: MA Experiment 20001905 PARAMETER Experiment Name: At_Drought_Reproduction_P Parameter: Plant Line Value: WS
  misc_feature: MA Experiment 20001905 PARAMETER Experiment Name: At_Drought_Reproduction_P Parameter: Timepoint (day) Value: 10
  misc_feature: MA Experiment 20001905 PARAMETER Experiment Name: At_Drought_Reproduction_P Parameter: Tissue Value: Rosettes
  misc_feature: MA Experiment 20001905 PARAMETER Experiment Name: At_Drought_Reproduction_P Parameter: Treatment Value: Drought vs. No Drought
attacaagaatcattcgattctcttctatcatcatcttcttcttctccatcaaaattcaccaaaacatggaagctctaattcaccacttcactctcctctccgatcaagctcttgtcgacaaaacattcgacccttcaagaatcgaggacctcatgcgtctctttgaagtcgattcatacaaagcttgggcagctctcgaatccgaacagcaacaagaactcgaagaagctgaagaatctctccgtgaagctgaacttgaacttgatcggtaacattttcgtcttttcttgtatggaattttcatagatctggagagatctgatttttatggtttcttcagggatatggagtgggggatggaggagtataggcggacgttggaggagatggagaggatggaggcggcggactgaaagagcttgaggagaaagcggagactgctcggagaacggggaatttaatggagaaagcggcgacaattgccgcgaaacgacatattgcggcggcgatgggatcagccgccgcgtctatgagatcagcttggaagactgcagctggaaataaggttcatccatcttgatcgatgatgatgatgatgaatatgataagatgacgatgattgtgaaagtattggtccccatgttataggattagtaggtcaagaacattttaatgaataattatttcctttgataaacatatgggttactacttactattgccgaagaattatgaattataggtagtttctagtttatgtatctgtaatttgtaatcaatatatatttatgggattat

SEQ ID NO: 37534 - protein, 90 aa, Arabidopsis thaliana
  peptide (1)..(90): Ceres Seq. ID no. 12338770
  misc_feature (52)..(90): Homolog of NCBI NO: 23306438 NR Description: Unknown protein [Arabidopsis thaliana]
  misc_feature (23)..(90): Homolog of NCBI NO: 21553414 NR Description: unknown [Arabidopsis thaliana]
  misc_feature (23)..(90): Homolog of NCBI NO: 18406916 NR Description: expressed protein
ITRIIRFSSIIIFFFSIKIHQNMEALIHHFTLLSDQALVDKTFDPSRIEDLMRLFEVDSYKAWAALESEQQQELEEAEESLREAELELDR

SEQ ID NO: 37535 - protein, 68 aa, Arabidopsis thaliana
  peptide (1)..(68): Ceres Seq. ID no. 12338771
  misc_feature (30)..(68): Homolog of NCBI NO: 23306438 NR Description: Unknown protein [Arabidopsis thaliana]
  misc_feature (1)..(68): Homolog of NCBI NO: 21553414 NR Description: unknown [Arabidopsis thaliana]
  misc_feature (1)..(68): Homolog of NCBI NO: 18406916 NR Description: expressed protein
MEALIHHFTLLSDQALVDKTFDPSRIEDLMRLFEVDSYKAWAALESEQQQELEEAEESLREAELELDR

SEQ ID NO: 37536 - protein, 54 aa, Arabidopsis thaliana
  peptide (1)..(54): Ceres Seq. ID no. 12338772
YKNHSILFYHHLLLLHQNSPKHGSSNSPLHSPLRSSSCRQNIRPFKNRGPHASL

SEQ ID NO: 37537 - DNA, 1805 bp, Arabidopsis thaliana
  misc_feature (1)..(1805): Ceres Seq. ID no. 12558715
  misc_feature: MA Experiment ID: 20000173 Result: Down-regulated in Transcription
  misc_feature: MA Experiment 20000173 PARAMETER Experiment Name: At_42deg_Heat_P Parameter: Age (day) Value: 14
  misc_feature: MA Experiment 20000173 PARAMETER Experiment Name: At_42deg_Heat_P Parameter: Organism Value: A. thaliana
  misc_feature: MA Experiment 20000173 PARAMETER Experiment Name: At_42deg_Heat_P Parameter: Plant Line Value: WS
  misc_feature: MA Experiment 20000173 PARAMETER Experiment Name: At_42deg_Heat_P Parameter: Temperature (deg C) Value: 42 vs. 22
  misc_feature: MA Experiment 20000173 PARAMETER Experiment Name: At_42deg_Heat_P Parameter: Timepoint (hr) Value: 6
  misc_feature: MA Experiment 20000173 PARAMETER Experiment Name: At_42deg_Heat_P Parameter: Tissue Value: Aerial
  misc_feature: MA Experiment ID: 20000182 Result: Down-regulated in Transcription
  misc_feature: MA Experiment 20000182 PARAMETER Experiment Name: At_2mM_SA_P Parameter: Age (day) Value: 14
  misc_feature: MA Experiment 20000182 PARAMETER Experiment Name: At_2mM_SA_P Parameter: Organism Value: A. thaliana
  misc_feature: MA Experiment 20000182 PARAMETER Experiment Name: At_2mM_SA_P Parameter: Plant Line Value: WS
  misc_feature: MA Experiment 20000182 PARAMETER Experiment Name: At_2mM_SA_P Parameter: Timepoint (hr) Value: 6
  misc_feature: MA Experiment 20000182 PARAMETER Experiment Name: At_2mM_SA_P Parameter: Tissue Value: Aerial
  misc_feature: MA Experiment 20000182 PARAMETER Experiment Name: At_2mM_SA_P Parameter: Treatment Value: 2mM SA vs. No Treatment
  misc_feature: MA Experiment ID: 20000214 Result: Down-regulated in Transcription
  misc_feature: MA Experiment 20000214 PARAMETER Experiment Name: At_4deg_Cold_P Parameter: Timepoint (hr) Value: 6
  misc_feature: MA Experiment ID: 20000437 Result: Down-regulated in Transcription
  misc_feature: MA Experiment 20000437 PARAMETER Experiment Name: At_Drought_P Parameter: Age (day) Value: 8
  misc_feature: MA Experiment 20000437 PARAMETER Experiment Name: At_Drought_P Parameter: Organism Value: A. thaliana
  misc_feature: MA Experiment 20000437 PARAMETER Experiment Name: At_Drought_P Parameter: Plant Line Value: WS
  misc_feature: MA Experiment 20000437 PARAMETER Experiment Name: At_Drought_P Parameter: Timepoint (hr) Value: 24
  misc_feature: MA Experiment 20000437 PARAMETER Experiment Name: At_Drought_P Parameter: Tissue Value: Whole Plant
  misc_feature: MA Experiment 20000437 PARAMETER Experiment Name: At_Drought_P Parameter: Treatment Value: Drought vs. No Drought
  misc_feature: MA Experiment ID: 20001247 Result: Up-regulated in Transcription
  misc_feature: MA Experiment 20001247 PARAMETER Experiment Name: At_Far-red-induction_P Parameter: Age (day) Value: 7
  misc_feature: MA Experiment 20001247 PARAMETER Experiment Name: At_Far-red-induction_P Parameter: Light Value: Far-red vs. White
  misc_feature: MA Experiment 20001247 PARAMETER Experiment Name: At_Far-red-induction_P Parameter: Organism Value: A. thaliana
  misc_feature: MA Experiment 20001247 PARAMETER Experiment Name: At_Far-red-induction_P Parameter: Plant Line Value: Columbia
  misc_feature: MA Experiment 20001247 PARAMETER Experiment Name: At_Far-red-induction_P Parameter: Timepoint (hr) Value: 1
  misc_feature: MA Experiment 20001247 PARAMETER Experiment Name: At_Far-red-induction_P Parameter: Tissue Value: Whole Plant
  misc_feature: MA Experiment ID: 20001248 Result: Up-regulated in Transcription
  misc_feature: MA Experiment 20001248 PARAMETER Experiment Name: At_Far-red-induction_P Parameter: Age (day) Value: 7
  misc_feature: MA Experiment 20001248 PARAMETER Experiment Name: At_Far-red-induction_P Parameter: Light Value: Far-red vs. White
  misc_feature: MA Experiment 20001248 PARAMETER Experiment Name: At_Far-red-induction_P Parameter: Organism Value: A. thaliana
  misc_feature: MA Experiment 20001248 PARAMETER Experiment Name: At_Far-red-induction_P Parameter: Plant Line Value: Columbia
  misc_feature: MA Experiment 20001248 PARAMETER Experiment Name: At_Far-red-induction_P Parameter: Timepoint (hr) Value: 4
  misc_feature: MA Experiment 20001248 PARAMETER Experiment Name: At_Far-red-induction_P Parameter: Tissue Value: Whole Plant
  misc_feature: MA Experiment ID: 20001450 Result: Up-regulated in Transcription
  misc_feature: MA Experiment 20001450 PARAMETER Experiment Name: At_Far-red-induction_P Parameter: Age (day) Value: 7
  misc_feature: MA Experiment 20001450 PARAMETER Experiment Name: At_Far-red-induction_P Parameter: Light Value: Far-red vs. White
  misc_feature: MA Experiment 20001450 PARAMETER Experiment Name: At_Far-red-induction_P Parameter: Organism Value: A. thaliana
  misc_feature: MA Experiment 20001450 PARAMETER Experiment Name: At_Far-red-induction_P Parameter: Plant Line Value: Columbia
  misc_feature: MA Experiment 20001450 PARAMETER Experiment Name: At_Far-red-induction_P Parameter: Timepoint (hr) Value: 8
  misc_feature: MA Experiment 20001450 PARAMETER Experiment Name: At_Far-red-induction_P Parameter: Tissue Value: Whole Plant
  misc_feature: MA Experiment ID: 20001451 Result: Up-regulated in Transcription
  misc_feature: MA Experiment 20001451 PARAMETER Experiment Name: At_Far-red-induction_P Parameter: Age (day) Value: 7
  misc_feature: MA Experiment 20001451 PARAMETER Experiment Name: At_Far-red-induction_P Parameter: Light Value: Far-red vs. White
  misc_feature: MA Experiment 20001451 PARAMETER Experiment Name: At_Far-red-induction_P Parameter: Organism Value: A. thaliana
  misc_feature: MA Experiment 20001451 PARAMETER Experiment Name: At_Far-red-induction_P Parameter: Plant Line Value: Columbia
  misc_feature: MA Experiment 20001451 PARAMETER Experiment Name: At_Far-red-induction_P Parameter: Timepoint (hr) Value: 24
  misc_feature: MA Experiment 20001451 PARAMETER Experiment Name: At_Far-red-induction_P Parameter: Tissue Value: Whole Plant
  misc_feature: MA Experiment ID: 20001557 Result: Up-regulated in Transcription
  misc_feature: MA Experiment 20001557 PARAMETER Experiment Name: At_Drought_Soil_Dry_P Parameter: Age (day) Value: 27
  misc_feature: MA Experiment 20001557 PARAMETER Experiment Name: At_Drought_Soil_Dry_P Parameter: Organism Value: A. thaliana
  misc_feature: MA Experiment 20001557 PARAMETER Experiment Name: At_Drought_Soil_Dry_P Parameter: Plant Line Value: WS
  misc_feature: MA Experiment 20001557 PARAMETER Experiment Name: At_Drought_Soil_Dry_P Parameter: Post Timepoint (hr) Value: 3
  misc_feature: MA Experiment 20001557 PARAMETER Experiment Name: At_Drought_Soil_Dry_P Parameter: Post-Treatment Value: Re-Water vs. No Drought
  misc_feature: MA Experiment 20001557 PARAMETER Experiment Name: At_Drought_Soil_Dry_P Parameter: Timepoint (day) Value: 13
  misc_feature: MA Experiment 20001557 PARAMETER Experiment Name: At_Drought_Soil_Dry_P Parameter: Treatment Value: Drought vs. No Drought
  misc_feature: MA Experiment ID: 20001560 Result: Up-regulated in Transcription
  misc_feature: MA Experiment 20001560 PARAMETER Experiment Name: At_Drought_Soil_Dry_P Parameter: Age (day) Value: 28
  misc_feature: MA Experiment 20001560 PARAMETER Experiment Name: At_Drought_Soil_Dry_P Parameter: Organism Value: A. thaliana
  misc_feature: MA Experiment 20001560 PARAMETER Experiment Name: At_Drought_Soil_Dry_P Parameter: Plant Line Value: WS
  misc_feature: MA Experiment 20001560 PARAMETER Experiment Name: At_Drought_Soil_Dry_P Parameter: Post Timepoint (hr) Value: None
  misc_feature: MA Experiment 20001560 PARAMETER Experiment Name: At_Drought_Soil_Dry_P Parameter: Post-Treatment Value: None
  misc_feature: MA Experiment 20001560 PARAMETER Experiment Name: At_Drought_Soil_Dry_P Parameter: Timepoint (day) Value: 14
  misc_feature: MA Experiment 20001560 PARAMETER Experiment Name: At_Drought_Soil_Dry_P Parameter: Treatment Value: Drought vs. No Drought
attcccacacagagaggtacaacaagactcgtcgctcttcgctttttcttctctctttctttctcttgccagtagtgtgatcttacgaagcttttagtagagaaaaagcatatacgctttgtctttcttaatcgactgataagtccttaggatcagatggaacaaatgggtggctactcaaaacaacaaggtccatttttagtttgattaagggatttggatctgagcttacttcatcaactttgtcggaatatacatttgctttgtgtggatttggaagttgtccctgaatggcgtccgaggatttgaatattgttgcggaatcaaagaaaggggaagagaatgttattgttgataattccaaggacatgaatagacctgagaatcttgacttatctactgagaaaactgatactgccaatgagaatggtccaaaagatgaagcttctaagctggtaaaggaagcagacctccctgagtctggtacttcagtgaagagtaaaacagctaaggataataaacctgttaagagaaagtcagggacgttttctcggagcccgagattcatgtctcagagctcttcatttccaactaaaggagcttatactgatattactagaaagagcattgatgccacaacatcaaagactagtcttaaacccgtcgttgctggtggatccaaaccaaaagccactccatcttcaagcagcggtgtttccgcaaagcgcaccagtttagtatctgcgcctctcaaaaagcaaactatgcctgtgaaaaccatttctaaggatgcagcttcaggccctacttccaaattaggagatgaaggttctaaatccatcaaagaagaaactgcggggaaggatgtcgaggaggctggatcaaccaccgctgtggtggcagataaagtatctaacccgttgaaagctgaaatggcaagcaaggacgacgaagacactcgttcaactaccacttcaacttctacacctcgtgggcggagaagcagtgttggatcggcatctggattttcgttcaggttggaggaacgggctgaaaaacggaaggagttttatatgaaactagaagagaagatccatgcaaaggaagtagagaagaccaatttgcaggcgaaatcaaaggagagccaggaagaagagatcaaaaggttgaggaagagcttgacgttcaaggctggtcccatgcccagtttctacaaagaacccccacctaaggttgaattgaagaagataccaactactcgtcctaagtctccaaagctaggacgcagaaagagtagcagtgatgcaacaggaggtgaagccgctcctcgcgtgacaaaaccaaaagactcatcatcatctacagtgaagaaaccaataacaaagtctcagccaaagcttgaaactcaagagaaatcagtgaaggccaaagaaaagaaaaagaaagtgaagaaagaagaagcagagaagagaggagaagaagagaaggctactgccgtggctgcgaaacctgaagagcagaaaccaaactccaataacatccaagtgaaggctgagataatggcgagtgaggttgtagtgggaggctgaagcaaagagagcattcagcagcgatgtctaatgtctgcttctttttttctttcttaaagcattaatgtgaatagagttgttgcattgcgtctacttttttaagagtttatacttcattccttcagtttattttttggaaaattaagcctcgattgcttcttaagatggtctcaaatgtgttgaactcaaatatgtatcacgagcatagatatgtgt

SEQ ID NO: 37538 - protein, 432 aa, Arabidopsis thaliana
  peptide (1)..(432): Ceres Seq. ID no. 12558716
  misc_feature (42)..(414): Pfam Name: Treacher Collins syndrome protein Treacle Pfam Description: Treacher Collins syndrome protein Treacle
  misc_feature (107)..(391): Homolog of NCBI NO: 9294199 NR Description: gb|AAF04893.1~gene_id:MXC7.13~similar to unknown
  misc_feature (156)..(350): Homolog of NCBI NO: 30679219 NR Description: expressed protein [Arabidopsis thaliana]
  misc_feature (156)..(350): Homolog of NCBI NO: 21618286 NR Description: unknown [Arabidopsis thaliana]
  misc_feature (156)..(350): Homolog of NCBI NO: 18396961 NR Description: expressed protein
  misc_feature (156)..(350): Homolog of NCBI NO: 6175167 NR Description: unknown protein [Arabidopsis thaliana]
  misc_feature (114)..(385): Homolog of NCBI NO: 34897180 NR Description: unknown protein [Oryza sativa (japonica
  misc_feature (150)..(415): Homolog of NCBI NO: 15224733 NR Description: unknown protein; protein id: At2g25480.1
  misc_feature (131)..(422): Homolog of NCBI NO: 18417986 NR Description: putative protein
  misc_feature (1)..(432): Homolog of NCBI NO: 25408425 NR Description: hypothetical protein At2g35880 [imported] -
  misc_feature (1)..(432): Homolog of NCBI NO: 18403980 NR Description: expressed protein
MASEDLNIVAESKKGEENVIVDNSKDMNRPENLDLSTEKTDTANENGPKDEASKLVKEADLPESGTSVKSKTAKDNKPVKRKSGTFSRSPRFMSQSSSFPTKGAYTDITRKSIDATTSKTSLKPVVAGGSKPKATPSSSSGVSAKRTSLVSAPLKKQTMPVKTISKDAASGPTSKLGDEGSKSIKEETAGKDVEEAGSTTAVVADKVSNPLKAEMASKDDEDTRSTTTSTSTPRGRRSSVGSASGFSFRLEERAEKRKEFYMKLEEKIHAKEVEKTNLQAKSKESQEEEIKRLRKSLTFKAGPMPSFYKEPPPKVELKKIPTTRPKSPKLGRRKSSSDATGGEAAPRVTKPKDSSSSTVKKPITKSQPKLETQEKSVKAKEKKKKVKKEEAEKRGEEEKATAVAAKPEEQKPNSNNIQVKAEIMASEVVVGG

SEQ ID NO: 37539 - protein, 406 aa, Arabidopsis thaliana
  peptide (1)..(406): Ceres Seq. ID no. 12558717
  misc_feature (16)..(388): Pfam Name: Treacher Collins syndrome protein Treacle Pfam Description: Treacher Collins syndrome protein Treacle
  misc_feature (81)..(365): Homolog of NCBI NO: 9294199 NR Description: gb|AAF04893.1~gene_id:MXC7.13~similar to unknown
  misc_feature (130)..(324): Homolog of NCBI NO: 30679219 NR Description: expressed protein [Arabidopsis thaliana]
  misc_feature (130)..(324): Homolog of NCBI NO: 21618286 NR Description: unknown [Arabidopsis thaliana]
  misc_feature (130)..(324): Homolog of NCBI NO: 18396961 NR Description: expressed protein
  misc_feature (130)..(324): Homolog of NCBI NO: 6175167 NR Description: unknown protein [Arabidopsis thaliana]
  misc_feature (88)..(359): Homolog of NCBI NO: 34897180 NR Description: unknown protein [Oryza sativa (japonica
  misc_feature (124)..(389): Homolog of NCBI NO: 15224733 NR Description: unknown protein; protein id: At2g25480.1
  misc_feature (105)..(396): Homolog of NCBI NO: 18417986 NR Description: putative protein
  misc_feature (1)..(406): Homolog of NCBI NO: 25408425 NR Description: hypothetical protein At2g35880 [imported] -
  misc_feature (1)..(406): Homolog of NCBI NO: 18403980 NR Description: expressed protein
MNRPENLDLSTEKTDTANENGPKDEASKLVKEADLPESGTSVKSKTAKDNKPVKRKSGTFSRSPRFMSQSSSFPTKGAYTDITRKSIDATTSKTSLKPVVAGGSKPKATPSSSSGVSAKRTSLVSAPLKKQTMPVKTISKDAASGPTSKLGDEGSKSIKEETAGKDVEEAGSTTAVVADKVSNPLKAEMASKDDEDTRSTTTSTSTPRGRRSSVGSASGFSFRLEERAEKRKEFYMKLEEKIHAKEVEKTNLQAKSKESQEEEIKRLRKSLTFKAGPMPSFYKEPPPKVELKKIPTTRPKSPKLGRRKSSSDATGGEAAPRVTKPKDSSSSTVKKPITKSQPKLETQEKSVKAKEKKKKVKKEEAEKRGEEEKATAVAAKPEEQKPNSNNIQVKAEIMASEVVVGG

SEQ ID NO: 37540 - protein, 340 aa, Arabidopsis thaliana
  peptide (1)..(340): Ceres Seq. ID no. 12558718
  misc_feature (1)..(322): Pfam Name: Treacher Collins syndrome protein Treacle Pfam Description: Treacher Collins syndrome protein Treacle
  misc_feature (15)..(299): Homolog of NCBI NO: 9294199 NR Description: gb|AAF04893.1~gene_id:MXC7.13~similar to unknown
  misc_feature (64)..(258): Homolog of NCBI NO: 30679219 NR Description: expressed protein [Arabidopsis thaliana]
  misc_feature (64)..(258): Homolog of NCBI NO: 18396961 NR Description: expressed protein
  misc_feature (64)..(258): Homolog of NCBI NO: 21618286 NR Description: unknown [Arabidopsis thaliana]
  misc_feature (64)..(258): Homolog of NCBI NO: 6175167 NR Description: unknown protein [Arabidopsis thaliana]
  misc_feature (22)..(293): Homolog of NCBI NO: 34897180 NR Description: unknown protein [Oryza sativa (japonica
  misc_feature (58)..(323): Homolog of NCBI NO: 15224733 NR Description: unknown protein; protein id: At2g25480.1
  misc_feature (39)..(330): Homolog of NCBI NO: 18417986 NR Description: putative protein
  misc_feature (1)..(340): Homolog of NCBI NO: 25408425 NR Description: hypothetical protein At2g35880 [imported] -
  misc_feature (1)..(340): Homolog of NCBI NO: 18403980 NR Description: expressed protein
MSQSSSFPTKGAYTDITRKSIDATTSKTSLKPVVAGGSKPKATPSSSSGVSAKRTSLVSAPLKKQTMPVKTISKDAASGPTSKLGDEGSKSIKEETAGKDVEEAGSTTAVVADKVSNPLKAEMASKDDEDTRSTTTSTSTPRGRRSSVGSASGFSFRLEERAEKRKEFYMKLEEKIHAKEVEKTNLQAKSKESQEEEIKRLRKSLTFKAGPMPSFYKEPPPKVELKKIPTTRPKSPKLGRRKSSSDATGGEAAPRVTKPKDSSSSTVKKPITKSQPKLETQEKSVKAKEKKKKVKKEEAEKRGEEEKATAVAAKPEEQKPNSNNIQVKAEIMASEVVVGG

SEQ ID NO: 37541 - DNA, 1198 bp, Arabidopsis thaliana
  misc_feature (1)..(1198): Ceres Seq. ID no. 12338161
  misc_feature: MA Experiment ID: 108595 Result: Up-regulated in Transcription
  misc_feature: MA Experiment 108595 PARAMETER Experiment Name: At_Ler-pi_Ovule_cDNA_P Parameter: Plant Line Value: null
  misc_feature: MA Experiment ID: 20000111 Result: Up-regulated in Transcription
  misc_feature: MA Experiment 20000111 PARAMETER Experiment Name: At_42deg_Heat_cDNA_P Parameter: Temperature (deg C) Value: 42 vs. 22
  misc_feature: MA Experiment 20000111 PARAMETER Experiment Name: At_42deg_Heat_cDNA_P Parameter: Timepoint (hr) Value: 6
  misc_feature: MA Experiment 20000111 PARAMETER Experiment Name: At_42deg_Heat_cDNA_P Parameter: Tissue Value: Aerial
  misc_feature: MA Experiment ID: 20000437 Result: Up-regulated in Transcription
  misc_feature: MA Experiment 20000437 PARAMETER Experiment Name: At_Drought_P Parameter: Age (day) Value: 8
  misc_feature: MA Experiment 20000437 PARAMETER Experiment Name: At_Drought_P Parameter: Organism Value: A. thaliana
  misc_feature: MA Experiment 20000437 PARAMETER Experiment Name: At_Drought_P Parameter: Plant Line Value: WS
  misc_feature: MA Experiment 20000437 PARAMETER Experiment Name: At_Drought_P Parameter: Timepoint (hr) Value: 24
  misc_feature: MA Experiment 20000437 PARAMETER Experiment Name: At_Drought_P Parameter: Tissue Value: Whole Plant
  misc_feature: MA Experiment 20000437 PARAMETER Experiment Name: At_Drought_P Parameter: Treatment Value: Drought vs. No Drought
tttcaggcttggtgatctctgggattgttatgatgagatgagtgcgtatggctttggcacacaggttgatttaaacaatggcgaaaccgttatgcagtactacgtcccgtacctatccgctatccaaatccacactaacaaacccgccttgctttccaggaaccagaatgaggtggctgaatctgagagtagcgagggttggagcgatagtgagagtgaaaagttgttgtcaaggtcaatgagcaatgattcaagcaaaacatgggatgctgtctctgaagattcggttttcgatccggatggttcaccgttgctgaaagatagacttggtaaccttgactttaagtacattgaaagagatcctccgcacaagcggattcccttaaccgacaagataaacgtattggtggagaaatatccgggactcatgaccttaaggagtgtcgacatgtctcctgcaagttcgatggctgttgcgtggtacccgatataccacatcccaacctgcaggaacgagaaagatttgacgacaggcttcctaacttatcatactctatcttcgtcttttcaagataatgtggtggaaggagatcaaagcaacaacaatgaagaaacagagttttgtgaagattccgtaataaacaagagaatgccattgcctccgtttggtgtaacaacttacaaaatgcaaggagatctttgggggaagacggggtttgaccaggaccggttgctttatcttcaaagcgctgcggattcatggctgaaacagctcaatgttgatcaccatgactataacttcttccttaactcgagcttctaaagatcaatcgggtcgttcgtatgtttatccttctccaaaccttaaacaaaaaaaaaagacctcataaccctttttctttgttgttttcaagctccttttgtttctctgtgttttttgttctttttgtttttgtctggctcgttgtgttgttttaggtagcaaccgccatcgcggagttttttctccttttgcaagccaatcatggaagtttctaagaagaaaacagagcttttttttctttttttttaacggtgttgagaaaacaagaaagttgttttcttttcttgggtgagagatcatgtaaattgaccttgaacagaggactctgttttgtacttttctgtctaaaatatataaaaaaatctgtctttcttg

SEQ ID NO: 37542 - protein, 273 aa, Arabidopsis thaliana
  peptide (1)..(273): Ceres Seq. ID no. 12338162
  misc_feature (1)..(268): Pfam Name: Protein of unknown function (DUF789) Pfam Description: Protein of unknown function (DUF789)
  misc_feature (71)..(234): Homolog of NCBI NO: 30687867 NR Description: expressed protein [Arabidopsis thaliana]
  misc_feature (1)..(272): Homolog of NCBI NO: 9280648 NR Description: F21B7.22 [Arabidopsis thaliana]
  misc_feature (1)..(272): Homolog of NCBI NO: 18379117 NR Description: expressed protein
  misc_feature (1)..(272): Homolog of NCBI NO: 18958013 NR Description: At1g03610/F21B7_13 [Arabidopsis thaliana]
  misc_feature (1)..(268): Homolog of NCBI NO: 25373431 NR Description: hypothetical protein AT4g03420 [imported] -
  misc_feature (1)..(268): Homolog of NCBI NO: 22328289 NR Description: hypothetical protein
  misc_feature (1)..(272): Homolog of NCBI NO: 21593308 NR Description: unknown [Arabidopsis thaliana]
  misc_feature (1)..(272): Homolog of NCBI NO: 18394539 NR Description: expressed protein
  misc_feature (1)..(273): Homolog of NCBI NO: 27754726 NR Description: unknown protein [Arabidopsis thaliana]
  misc_feature (1)..(273): Homolog of NCBI NO: 15219407 NR Description: hypothetical protein; protein id: At1g73210.1
FRLGDLWDCYDEMSAYGFGTQVDLNNGETVMQYYVPYLSAIQIHTNKPALLSRNQNEVAESESSEGWSDSESEKLLSRSMSNDSSKTWDAVSEDSVFDPDGSPLLKDRLGNLDFKYIERDPPHKRIPLTDKINVLVEKYPGLMTLRSVDMSPASSMAVAWYPIYHIPTCRNEKDLTTGFLTYHTLSSSFQDNVVEGDQSNNNEETEFCEDSVINKRMPLPPFGVTTYKMQGDLWGKTGFDQDRLLYLQSAADSWLKQLNVDHHDYNFFLNSSF

SEQ ID NO: 37543 - protein, 261 aa, Arabidopsis thaliana
  peptide (1)..(261): Ceres Seq. ID no. 12338163
  misc_feature (1)..(256): Pfam Name: Protein of unknown function (DUF789) Pfam Description: Protein of unknown function (DUF789)
  misc_feature (59)..(222): Homolog of NCBI NO: 30687867 NR Description: expressed protein [Arabidopsis thaliana]
  misc_feature (1)..(260): Homolog of NCBI NO: 9280648 NR Description: F21B7.22 [Arabidopsis thaliana]
  misc_feature (1)..(260): Homolog of NCBI NO: 18379117 NR Description: expressed protein
  misc_feature (1)..(260): Homolog of NCBI NO: 18958013 NR Description: At1g03610/F21B7_13 [Arabidopsis thaliana]
  misc_feature (1)..(256): Homolog of NCBI NO: 25373431 NR Description: hypothetical protein AT4g03420 [imported] -
  misc_feature (1)..(256): Homolog of NCBI NO: 22328289 NR Description: hypothetical protein
  misc_feature (1)..(260): Homolog of NCBI NO: 21593308 NR Description: unknown [Arabidopsis thaliana]
  misc_feature (1)..(260): Homolog of NCBI NO: 18394539 NR Description: expressed protein
  misc_feature (1)..(261): Homolog of NCBI NO: 27754726 NR Description: unknown protein [Arabidopsis thaliana]
  misc_feature (1)..(261): Homolog of NCBI NO: 15219407 NR Description: hypothetical protein; protein id: At1g73210.1
MSAYGFGTQVDLNNGETVMQYYVPYLSAIQIHTNKPALLSRNQNEVAESESSEGWSDSESEKLLSRSMSNDSSKTWDAVSEDSVFDPDGSPLLKDRLGNLDFKYIERDPPHKRIPLTDKINVLVEKYPGLMTLRSVDMSPASSMAVAWYPIYHIPTCRNEKDLTTGFLTYHTLSSSFQDNVVEGDQSNNNEETEFCEDSVINKRMPLPPFGVTTYKMQGDLWGKTGFDQDRLLYLQSAADSWLKQLNVDHHDYNFFLNSSF

SEQ ID NO: 37544 - protein, 243 aa, Arabidopsis thaliana
  peptide (1)..(243): Ceres Seq. ID no. 12338164
  misc_feature (1)..(238): Pfam Name: Protein of unknown function (DUF789) Pfam Description: Protein of unknown function (DUF789)
  misc_feature (41)..(204): Homolog of NCBI NO: 30687867 NR Description: expressed protein [Arabidopsis thaliana]
  misc_feature (1)..(242): Homolog of NCBI NO: 9280648 NR Description: F21B7.22 [Arabidopsis thaliana]
  misc_feature (1)..(242): Homolog of NCBI NO: 18379117 NR Description: expressed protein
  misc_feature (1)..(242): Homolog of NCBI NO: 18958013 NR Description: At1g03610/F21B7_13 [Arabidopsis thaliana]
  misc_feature (1)..(238): Homolog of NCBI NO: 25373431 NR Description: hypothetical protein AT4g03420 [imported] -
  misc_feature (1)..(238): Homolog of NCBI NO: 22328289 NR Description: hypothetical protein
  misc_feature (1)..(242): Homolog of NCBI NO: 21593308 NR Description: unknown [Arabidopsis thaliana]
  misc_feature (1)..(242): Homolog of NCBI NO: 18394539 NR Description: expressed protein
  misc_feature (1)..(243): Homolog of NCBI NO: 27754726 NR Description: unknown protein [Arabidopsis thaliana]
  misc_feature (1)..(243): Homolog of NCBI NO: 15219407 NR Description: hypothetical protein; protein id: At1g73210.1
MQYYVPYLSAIQIHTNKPALLSRNQNEVAESESSEGWSDSESEKLLSRSMSNDSSKTWDAVSEDSVFDPDGSPLLKDRLGNLDFKYIERDPPHKRIPLTDKINVLVEKYPGLMTLRSVDMSPASSMAVAWYPIYHIPTCRNEKDLTTGFLTYHTLSSSFQDNVVEGDQSNNNEETEFCEDSVINKRMPLPPFGVTTYKMQGDLWGKTGFDQDRLLYLQSAADSWLKQLNVDHHDYNFFLNSSF

SEQ ID NO: 37545 - DNA, 1176 bp, Arabidopsis thaliana
  misc_feature (1)..(1176): Ceres Seq. ID no. 13489416
  misc_feature: MA Experiment ID: 108434 Result: Down-regulated in Transcription
  misc_feature: MA Experiment 108434 PARAMETER Experiment Name: At_Root_Tips_cDNA_P Parameter: Tissue Value: Root Tips
  misc_feature: MA Experiment ID: 108462 Result: Up-regulated in Transcription
  misc_feature: MA Experiment 108462 PARAMETER Experiment Name: At_Germinating_Seeds_cDNA_P Parameter: Age (day) Value: 2 vs. 0
  misc_feature: MA Experiment 108462 PARAMETER Experiment Name: At_Germinating_Seeds_cDNA_P Parameter: Tissue Value: Germinating Seeds
  misc_feature: MA Experiment ID: 108463 Result: Up-regulated in Transcription
  misc_feature: MA Experiment 108463 PARAMETER Experiment Name: At_Germinating_Seeds_cDNA_P Parameter: Age (day) Value: 3 vs. 0
  misc_feature: MA Experiment 108463 PARAMETER Experiment Name: At_Germinating_Seeds_cDNA_P Parameter: Tissue Value: Germinating Seeds
  misc_feature: MA Experiment ID: 108464 Result: Up-regulated in Transcription
  misc_feature: MA Experiment 108464 PARAMETER Experiment Name: At_Germinating_Seeds_cDNA_P Parameter: Age (day) Value: 4 vs. 0
  misc_feature: MA Experiment 108464 PARAMETER Experiment Name: At_Germinating_Seeds_cDNA_P Parameter: Tissue Value: Germinating Seeds
  misc_feature: MA Experiment ID: 108573 Result: Down-regulated in Transcription
  misc_feature: MA Experiment 108573 PARAMETER Experiment Name: At_Drought_cDNA_P Parameter: Timepoint (hr) Value: 6
  misc_feature: MA Experiment 108573 PARAMETER Experiment Name: At_Drought_cDNA_P Parameter: Tissue Value: Aerial
  misc_feature: MA Experiment 108573 PARAMETER Experiment Name: At_Drought_cDNA_P Parameter: Treatment Value: Drought vs. No Drought
  misc_feature: MA Experiment ID: 108577 Result: Down-regulated in Transcription
  misc_feature: MA Experiment 108577 PARAMETER Experiment Name: At_42deg_Heat_cDNA_P Parameter: Temperature (deg C) Value: 42 vs. 22
  misc_feature: MA Experiment 108577 PARAMETER Experiment Name: At_42deg_Heat_cDNA_P Parameter: Timepoint (hr) Value: 6
  misc_feature: MA Experiment 108577 PARAMETER Experiment Name: At_42deg_Heat_cDNA_P Parameter: Tissue Value: Aerial
  misc_feature: MA Experiment ID: 108579 Result: Up-regulated in Transcription
  misc_feature: MA Experiment 108579 PARAMETER Experiment Name: At_4deg_Cold_cDNA_P Parameter: Temperature (deg C) Value: 4 vs. 22
  misc_feature: MA Experiment 108579 PARAMETER Experiment Name: At_4deg_Cold_cDNA_P Parameter: Timepoint (hr) Value: 6
  misc_feature: MA Experiment 108579 PARAMETER Experiment Name: At_4deg_Cold_cDNA_P Parameter: Tissue Value: Aerial
  misc_feature: MA Experiment ID: 108585 Result: Up-regulated in Transcription
  misc_feature: MA Experiment 108585 PARAMETER Experiment Name: At_5mM_NaNP_cDNA_P Parameter: Timepoint (hr) Value: 6
  misc_feature: MA Experiment 108585 PARAMETER Experiment Name: At_5mM_NaNP_cDNA_P Parameter: Tissue Value: Aerial
  misc_feature: MA Experiment 108585 PARAMETER Experiment Name: At_5mM_NaNP_cDNA_P Parameter: Treatment Value: null
  misc_feature: MA Experiment ID: 20000090 Result: Up-regulated in Transcription
  misc_feature: MA Experiment ID: 20000111 Result: Down-regulated in Transcription
  misc_feature: MA Experiment 20000111 PARAMETER Experiment Name: At_42deg_Heat_cDNA_P Parameter: Temperature (deg C) Value: 42 vs. 22
  misc_feature: MA Experiment 20000111 PARAMETER Experiment Name: At_42deg_Heat_cDNA_P Parameter: Timepoint (hr) Value: 6
  misc_feature: MA Experiment 20000111 PARAMETER Experiment Name: At_42deg_Heat_cDNA_P Parameter: Tissue Value: Aerial
  misc_feature: MA Experiment ID: 20000113 Result: Down-regulated in Transcription
  misc_feature: MA Experiment 20000113 PARAMETER Experiment Name: At_42deg_Heat_cDNA_P Parameter: Temperature (deg C) Value: 42 vs. 22
  misc_feature: MA Experiment 20000113 PARAMETER Experiment Name: At_42deg_Heat_cDNA_P Parameter: Timepoint (hr) Value: 8
  misc_feature: MA Experiment 20000113 PARAMETER Experiment Name: At_42deg_Heat_cDNA_P Parameter: Tissue Value: Aerial
  misc_feature: MA Experiment ID: 20000144 Result: Down-regulated in Transcription
  misc_feature: MA Experiment 20000144 PARAMETER Experiment Name: At_42deg_Heat_cDNA_P Parameter: Temperature (deg C) Value: 42 vs. 22
  misc_feature: MA Experiment 20000144 PARAMETER Experiment Name: At_42deg_Heat_cDNA_P Parameter: Timepoint (hr) Value: 1
  misc_feature: MA Experiment 20000144 PARAMETER Experiment Name: At_42deg_Heat_cDNA_P Parameter: Tissue Value: Aerial
  misc_feature: MA Experiment ID: 20000171 Result: Down-regulated in Transcription
  misc_feature: MA Experiment 20000171 PARAMETER Experiment Name: At_42deg_Heat_P Parameter: Age (day) Value: 14
  misc_feature: MA Experiment 20000171 PARAMETER Experiment Name: At_42deg_Heat_P Parameter: Organism Value: A. thaliana
  misc_feature: MA Experiment 20000171 PARAMETER Experiment Name: At_42deg_Heat_P Parameter: Plant Line Value: WS
  misc_feature: MA Experiment 20000171 PARAMETER Experiment Name: At_42deg_Heat_P Parameter: Temperature (deg C) Value: 42 vs. 22
  misc_feature: MA Experiment 20000171 PARAMETER Experiment Name: At_42deg_Heat_P Parameter: Timepoint (hr) Value: 1
  misc_feature: MA Experiment 20000171 PARAMETER Experiment Name: At_42deg_Heat_P Parameter: Tissue Value: Aerial
  misc_feature: MA Experiment ID: 20000173 Result: Down-regulated in Transcription
  misc_feature: MA Experiment 20000173 PARAMETER Experiment Name: At_42deg_Heat_P Parameter: Age (day) Value: 14
  misc_feature: MA Experiment 20000173 PARAMETER Experiment Name: At_42deg_Heat_P Parameter: Organism Value: A. thaliana
  misc_feature: MA Experiment 20000173 PARAMETER Experiment Name: At_42deg_Heat_P Parameter: Plant Line Value: WS
  misc_feature: MA Experiment 20000173 PARAMETER Experiment Name: At_42deg_Heat_P Parameter: Temperature (deg C) Value: 42 vs. 22
  misc_feature: MA Experiment 20000173 PARAMETER Experiment Name: At_42deg_Heat_P Parameter: Timepoint (hr) Value: 6
  misc_feature: MA Experiment 20000173 PARAMETER Experiment Name: At_42deg_Heat_P Parameter: Tissue Value: Aerial
  misc_feature: MA Experiment ID: 20000182 Result: Up-regulated in Transcription
  misc_feature: MA Experiment 20000182 PARAMETER Experiment Name: At_2mM_SA_P Parameter: Age (day) Value: 14
  misc_feature: MA Experiment 20000182 PARAMETER Experiment Name: At_2mM_SA_P Parameter: Organism Value: A. thaliana
  misc_feature: MA Experiment 20000182 PARAMETER Experiment Name: At_2mM_SA_P Parameter: Plant Line Value: WS
  misc_feature: MA Experiment 20000182 PARAMETER Experiment Name: At_2mM_SA_P Parameter: Timepoint (hr) Value: 6
  misc_feature: MA Experiment 20000182 PARAMETER Experiment Name: At_2mM_SA_P Parameter: Tissue Value: Aerial
  misc_feature: MA Experiment 20000182 PARAMETER Experiment Name: At_2mM_SA_P Parameter: Treatment Value: 2mM SA vs. No Treatment
  misc_feature: MA Experiment ID: 20000184 Result: Down-regulated in Transcription
  misc_feature: MA Experiment 20000184 PARAMETER Experiment Name: At_Shoots__P Parameter: Age (day) Value: 7
  misc_feature: MA Experiment 20000184 PARAMETER Experiment Name: At_Shoots__P Parameter: Tissue Value: Shoots vs. Whole Plant
  misc_feature: MA Experiment ID: 20000185 Result: Down-regulated in Transcription
  misc_feature: MA Experiment 20000185 PARAMETER Experiment Name: At_Roots__P Parameter: Age (day) Value: 7 vs. 21
  misc_feature: MA Experiment 20000185 PARAMETER Experiment Name: At_Roots__P Parameter: Organism Value: A. thaliana
  misc_feature: MA Experiment 20000185 PARAMETER Experiment Name: At_Roots__P Parameter: Tissue Value: Roots vs. Whole Plant
  misc_feature: MA Experiment ID: 20000234 Result: Down-regulated in Transcription
  misc_feature: MA Experiment 20000234 PARAMETER Experiment Name: At_Siliques_P Parameter: Age (day) Value: 21
  misc_feature: MA Experiment 20000234 PARAMETER Experiment Name: At_Siliques_P Parameter: Organism Value: A. thaliana
  misc_feature: MA Experiment 20000234 PARAMETER Experiment Name: At_Siliques_P Parameter: Plant Line Value: WS
  misc_feature: MA Experiment 20000234 PARAMETER Experiment Name: At_Siliques_P Parameter: Tissue Value: Less Than 5mm Siliques vs. Whole Plant
  misc_feature: MA Experiment ID: 20000264 Result: Down-regulated in Transcription
  misc_feature: MA Experiment 20000264 PARAMETER Experiment Name: At_Open_Flower_P Parameter: Age (day) Value: 21
  misc_feature: MA Experiment 20000264 PARAMETER Experiment Name: At_Open_Flower_P Parameter: Plant Line Value: WS
  misc_feature: MA Experiment 20000264 PARAMETER Experiment Name: At_Open_Flower_P Parameter: Tissue Value: Open Flower vs. Whole Plant
  misc_feature: MA Experiment ID: 20000265 Result: Down-regulated in Transcription
  misc_feature: MA Experiment 20000265 PARAMETER Experiment Name: At_Open_Flower_P Parameter: Age (day) Value: 21
  misc_feature: MA Experiment 20000265 PARAMETER Experiment Name: At_Open_Flower_P Parameter: Plant Line Value: WS
  misc_feature: MA Experiment 20000265 PARAMETER Experiment Name: At_Open_Flower_P Parameter: Tissue Value: Closed Flower vs. Whole Plant
  misc_feature: MA Experiment ID: 20000286 Result: Down-regulated in Transcription
  misc_feature: MA Experiment 20000286 PARAMETER Experiment Name: At_Open_Flower_P Parameter: Age (day) Value: 21
  misc_feature: MA Experiment 20000286 PARAMETER Experiment Name: At_Open_Flower_P Parameter: Plant Line Value: WS
  misc_feature: MA Experiment 20000286 PARAMETER Experiment Name: At_Open_Flower_P Parameter: Tissue Value: Half Open vs. Whole Plant
  misc_feature: MA Experiment ID: 20000438 Result: Down-regulated in Transcription
  misc_feature: MA Experiment 20000438 PARAMETER Experiment Name: At_Shoots__P Parameter: Age (day) Value: 14
  misc_feature: MA Experiment 20000438 PARAMETER Experiment Name: At_Shoots__P Parameter: Tissue Value: Shoots vs. Whole Plant
  misc_feature: MA Experiment ID: 20000495 Result: Down-regulated in Transcription
  misc_feature: MA Experiment 20000495 PARAMETER Experiment Name: At_Guard_Cells_P Parameter: Harvest Date Value: 8/2/2002
  misc_feature: MA Experiment 20000495 PARAMETER Experiment Name: At_Guard_Cells_P Parameter: Organism Value: A. thaliana
  misc_feature: MA Experiment 20000495 PARAMETER Experiment Name: At_Guard_Cells_P Parameter: Tissue Value: Guard Cells vs. Leaves
  misc_feature: MA Experiment ID: 20000794 Result: Down-regulated in Transcription
  misc_feature: MA Experiment 20000794 PARAMETER Experiment Name: At_Petals_P Parameter: Age (day) Value: 23-25 days
  misc_feature: MA Experiment 20000794 PARAMETER Experiment Name: At_Petals_P Parameter: Plant Line Value: WS
  misc_feature: MA Experiment 20000794 PARAMETER Experiment Name: At_Petals_P Parameter: Tissue Value: Petals vs. Whole plant
  misc_feature: MA Experiment ID: 20001555 Result: Down-regulated in Transcription
  misc_feature: MA Experiment 20001555 PARAMETER Experiment Name: At_Drought_Soil_Dry_P Parameter: Age (day) Value: 24
  misc_feature: MA Experiment 20001555 PARAMETER Experiment Name: At_Drought_Soil_Dry_P Parameter: Organism Value: A. thaliana
  misc_feature: MA Experiment 20001555 PARAMETER Experiment Name: At_Drought_Soil_Dry_P Parameter: Plant Line Value: WS
  misc_feature: MA Experiment 20001555 PARAMETER Experiment Name: At_Drought_Soil_Dry_P Parameter: Post Timepoint (hr) Value: None
  misc_feature: MA Experiment 20001555 PARAMETER Experiment Name: At_Drought_Soil_Dry_P Parameter: Post-Treatment Value: None
  misc_feature: MA Experiment 20001555 PARAMETER Experiment Name: At_Drought_Soil_Dry_P Parameter: Timepoint (day) Value: 10
  misc_feature: MA Experiment 20001555 PARAMETER Experiment Name: At_Drought_Soil_Dry_P Parameter: Treatment Value: Drought vs. No Drought
  misc_feature: MA Experiment ID: 20001558 Result: Down-regulated in Transcription
  misc_feature: MA Experiment 20001558 PARAMETER Experiment Name: At_Drought_Soil_Dry_P Parameter: Age (day) Value: 27
  misc_feature: MA Experiment 20001558 PARAMETER Experiment Name: At_Drought_Soil_Dry_P Parameter: Organism Value: A. thaliana
  misc_feature: MA Experiment 20001558 PARAMETER Experiment Name: At_Drought_Soil_Dry_P Parameter: Plant Line Value: WS
  misc_feature: MA Experiment 20001558 PARAMETER Experiment Name: At_Drought_Soil_Dry_P Parameter: Post Timepoint (hr) Value: 6
  misc_feature: MA Experiment 20001558 PARAMETER Experiment Name: At_Drought_Soil_Dry_P Parameter: Post-Treatment Value: Re-Water vs. No Drought
  misc_feature: MA Experiment 20001558 PARAMETER Experiment Name: At_Drought_Soil_Dry_P Parameter: Timepoint (day) Value: 13
  misc_feature: MA Experiment 20001558 PARAMETER Experiment Name: At_Drought_Soil_Dry_P Parameter: Treatment Value: Drought vs. No Drought
  misc_feature: MA Experiment ID: 20001560 Result: Down-regulated in Transcription
  misc_feature: MA Experiment 20001560 PARAMETER Experiment Name: At_Drought_Soil_Dry_P Parameter: Age (day) Value: 28
  misc_feature: MA Experiment 20001560 PARAMETER Experiment Name: At_Drought_Soil_Dry_P Parameter: Organism Value: A. thaliana
  misc_feature: MA Experiment 20001560 PARAMETER Experiment Name: At_Drought_Soil_Dry_P Parameter: Plant Line Value: WS
  misc_feature: MA Experiment 20001560 PARAMETER Experiment Name: At_Drought_Soil_Dry_P Parameter: Post Timepoint (hr) Value: None
  misc_feature: MA Experiment 20001560 PARAMETER Experiment Name: At_Drought_Soil_Dry_P Parameter: Post-Treatment Value: None
  misc_feature: MA Experiment 20001560 PARAMETER Experiment Name: At_Drought_Soil_Dry_P Parameter: Timepoint (day) Value: 14
  misc_feature: MA Experiment 20001560 PARAMETER Experiment Name: At_Drought_Soil_Dry_P Parameter: Treatment Value: Drought vs. No Drought
atccaaagtccaaacacagcataaaagtagctctattgactttttttcttcctccaaactctttttacgtcaagcaatggaggatcttgatccaacctacatccaagcaccagagcatagatcagattcgaatttcatccctaaccaaccagaagaaatacccgtgattgatctctcgcgcctcgatgaccccgaagatgtccaaaacgttatctcagagatcggtgatgcttgtgaaaaatggggattttttcaggtgcttaatcatggtgtgccttctgacgcaaggcaacgtgtggagaagactgtgaagatgtttttcgatttgcctatggaagagaagataaaggtgaagagagacgatgtgaatcctgtagggtatcatgatggagaacacaccaagaacgttaaagattggaaagaagtgtttgatatttatttcaaagatccaatggtcattccttcaaccactgatcctgaagatgaaggcttaagacttgtttacaacaagtggcctcaatctccttctgatttcagggaagcatgtgaagtatatgcgagacacgctgaaaaattagcgttcaagctcttggaactgatttcgttaagcttaggcttgccaaaagagcgttttcatgactacttcaaagaacaaatgagttttttcaggataaatcgttatccaccatgtccaagacctgacctagctttaggtgttggtcaccacaaagatgccgacgttattagtctattggctcaagatgatgttggaggattacaagttagtcgtagatcggacggtgtttggtttccgattagacccgtccctaatgctcttgtcatcaatataggcaattgtatggagatatggacgaatgacaagtattggagtgctgaacatagagtggtggtgaacacaacaagagagagatactcgataccattcttcttgttgccttcacacgatgtggaagtgaagccattagaagaacttgtgagtcctgaaaaccctccaaaatacaaaggctataaatggggtaagttctacgtcagtaggaatagaagcgattttcgaaaactggaaatcgaaaacatccaaatcgatgacttcaaagttaaaacttaatatactatgtatcggcttttttttttgtttaccaagctatgatattaacc

SEQ ID NO: 37546 - protein, 374 aa, Arabidopsis thaliana
  peptide (1)..(374): Ceres Seq. ID no. 13489417
  misc_feature (218)..(319): Pfam Name: 2OG-Fe(II) oxygenase superfamily Pfam Description: 2OG-Fe(II) oxygenase superfamily
  misc_feature (26)..(340): Homolog of NCBI NO: 15229694 NR Description: oxidoreductase, 2OG-Fe(II) oxygenase family
  misc_feature (33)..(365): Homolog of NCBI NO: 34907194 NR Description: putative ethylene-forming enzyme
  misc_feature (52)..(365): Homolog of NCBI NO: 18402992 NR Description: oxidoreductase, 2OG-Fe(II) oxygenase family
  misc_feature (67)..(274): Homolog of NCBI NO: 18103924 NR Description: putative oxylase protein [Pinus pinaster]
  misc_feature (244)..(373): Homolog of NCBI NO: 40253917 NR Description: putative Isopenicillin N synthase and related
  misc_feature (29)..(179): Homolog of NCBI NO: 40253917 NR Description: putative Isopenicillin N synthase and related
  misc_feature (26)..(371): Homolog of NCBI NO: 18402079 NR Description: oxidoreductase, 2OG-Fe(II) oxygenase family
  misc_feature (26)..(289): Homolog of NCBI NO: 30685157 NR Description: flavonol synthase family [Arabidopsis thaliana]
  misc_feature (26)..(374): Homolog of NCBI NO: 21593702 NR Description: unknown [Arabidopsis thaliana]
  misc_feature (26)..(374): Homolog of NCBI NO: 18402081 NR Description: flavonol synthase family [Arabidopsis thaliana]
SKVQTQHKSSSIDFFSSSKLFLRQAMEDLDPTYIQAPEHRSDSNFIPNQPEEIPVIDLSRLDDPEDVQNVISEIGDACEKWGFFQVLNHGVPSDARQRVEKTVKMFFDLPMEEKIKVKRDDVNPVGYHDGEHTKNVKDWKEVFDIYFKDPMVIPSTTDPEDEGLRLVYNKWPQSPSDFREACEVYARHAEKLAFKLLELISLSLGLPKERFHDYFKEQMSFFRINRYPPCPRPDLALGVGHHKDADVISLLAQDDVGGLQVSRRSDGVWFPIRPVPNALVINIGNCMEIWTNDKYWSAEHRVVVNTTRERYSIPFFLLPSHDVEVKPLEELVSPENPPKYKGYKWGKFYVSRNRSDFRKLEIENIQIDDFKVKT

SEQ ID NO: 37547 - protein, 349 aa, Arabidopsis thaliana
  peptide (1)..(349): Ceres Seq. ID no. 13489418
  misc_feature (193)..(294): Pfam Name: 2OG-Fe(II) oxygenase superfamily Pfam Description: 2OG-Fe(II) oxygenase superfamily
  misc_feature (1)..(315): Homolog of NCBI NO: 15229694 NR Description: oxidoreductase, 2OG-Fe(II) oxygenase family
  misc_feature (8)..(340): Homolog of NCBI NO: 34907194 NR Description: putative ethylene-forming enzyme
  misc_feature (27)..(340): Homolog of NCBI NO: 18402992 NR Description: oxidoreductase, 2OG-Fe(II) oxygenase family
  misc_feature (42)..(249): Homolog of NCBI NO: 18103924 NR Description: putative oxylase protein [Pinus pinaster]
  misc_feature (219)..(348): Homolog of NCBI NO: 40253917 NR Description: putative Isopenicillin N synthase and related
  misc_feature (4)..(154): Homolog of NCBI NO: 40253917 NR Description: putative Isopenicillin N synthase and related
  misc_feature (1)..(346): Homolog of NCBI NO: 18402079 NR Description: oxidoreductase, 2OG-Fe(II) oxygenase family
  misc_feature (1)..(264): Homolog of NCBI NO: 30685157 NR Description: flavonol synthase family [Arabidopsis thaliana]
  misc_feature (1)..(349): Homolog of NCBI NO: 21593702 NR Description: unknown [Arabidopsis thaliana]
  misc_feature (1)..(349): Homolog of NCBI NO: 18402081 NR Description: flavonol synthase family [Arabidopsis thaliana]
MEDLDPTYIQAPEHRSDSNFIPNQPEEIPVIDLSRLDDPEDVQNVISEIGDACEKWGFFQVLNHGVPSDARQRVEKTVKMFFDLPMEEKIKVKRDDVNPVGYHDGEHTKNVKDWKEVFDIYFKDPMVIPSTTDPEDEGLRLVYNKWPQSPSDFREACEVYARHAEKLAFKLLELISLSLGLPKERFHDYFKEQMSFFRINRYPPCPRPDLALGVGHHKDADVISLLAQDDVGGLQVSRRSDGVWFPIRPVPNALVINIGNCMEIWTNDKYWSAEHRVVVNTTRERYSIPFFLLPSHDVEVKPLEELVSPENPPKYKGYKWGKFYVSRNRSDFRKLEIENIQIDDFKVKT

SEQ ID NO: 37548 - protein, 270 aa, Arabidopsis thaliana
  peptide (1)..(270): Ceres Seq. ID no. 13489419
  misc_feature (114)..(215): Pfam Name: 2OG-Fe(II) oxygenase superfamily Pfam Description: 2OG-Fe(II) oxygenase superfamily
  misc_feature (1)..(236): Homolog of NCBI NO: 15229694 NR Description: oxidoreductase, 2OG-Fe(II) oxygenase family
  misc_feature (1)..(261): Homolog of NCBI NO: 34907194 NR Description: putative ethylene-forming enzyme
  misc_feature (1)..(261): Homolog of NCBI NO: 18402992 NR Description: oxidoreductase, 2OG-Fe(II) oxygenase family
  misc_feature (1)..(170): Homolog of NCBI NO: 18103924 NR Description: putative oxylase protein [Pinus pinaster]
  misc_feature (140)..(269): Homolog of NCBI NO: 40253917 NR Description: putative Isopenicillin N synthase and related
  misc_feature (1)..(75): Homolog of NCBI NO: 40253917 NR Description: putative Isopenicillin N synthase and related
  misc_feature (1)..(267): Homolog of NCBI NO: 18402079 NR Description: oxidoreductase, 2OG-Fe(II) oxygenase family
  misc_feature (1)..(185): Homolog of NCBI NO: 30685157 NR Description: flavonol synthase family [Arabidopsis thaliana]
  misc_feature (1)..(270): Homolog of NCBI NO: 21593702 NR Description: unknown [Arabidopsis thaliana]
  misc_feature (1)..(270): Homolog of NCBI NO: 18402081 NR Description: flavonol synthase family [Arabidopsis thaliana]
MFFDLPMEEKIKVKRDDVNPVGYHDGEHTKNVKDWKEVFDIYFKDPMVIPSTTDPEDEGLRLVYNKWPQSPSDFREACEVYARHAEKLAFKLLELISLSLGLPKERFHDYFKEQMSFFRINRYPPCPRPDLALGVGHHKDADVISLLAQDDVGGLQVSRRSDGVWFPIRPVPNALVINIGNCMEIWTNDKYWSAEHRVVVNTTRERYSIPFFLLPSHDVEVKPLEELVSPENPPKYKGYKWGKFYVSRNRSDFRKLEIENIQIDDFKVKT

SEQ ID NO: 37549 - DNA, 1819 bp, Arabidopsis thaliana
  misc_feature (1)..(1819): Ceres Seq. ID no. 12371294
  misc_feature: MA Experiment ID: 108434 Result: Down-regulated in Transcription
  misc_feature: MA Experiment 108434 PARAMETER Experiment Name: At_Root_Tips_cDNA_P Parameter: Tissue Value: Root Tips
  misc_feature: MA Experiment ID: 108435 Result: Down-regulated in Transcription
  misc_feature: MA Experiment 108435 PARAMETER Experiment Name: At_stm_Mutants_cDNA_P Parameter: Plant Line Value: wt Landsburg vs stm
  misc_feature: MA Experiment 108435 PARAMETER Experiment Name: At_stm_Mutants_cDNA_P Parameter: Tissue Value: Shoot Apical Meristem Region
  misc_feature: MA Experiment ID: 108462 Result: Down-regulated in Transcription
  misc_feature: MA Experiment 108462 PARAMETER Experiment Name: At_Germinating_Seeds_cDNA_P Parameter: Age (day) Value: 2 vs. 0
  misc_feature: MA Experiment 108462 PARAMETER Experiment Name: At_Germinating_Seeds_cDNA_P Parameter: Tissue Value: Germinating Seeds
  misc_feature: MA Experiment ID: 108469 Result: Up-regulated in Transcription
  misc_feature: MA Experiment ID: 108573 Result: Up-regulated in Transcription
  misc_feature: MA Experiment 108573 PARAMETER Experiment Name: At_Drought_cDNA_P Parameter: Timepoint (hr) Value: 6
  misc_feature: MA Experiment 108573 PARAMETER Experiment Name: At_Drought_cDNA_P Parameter: Tissue Value: Aerial
  misc_feature: MA Experiment 108573 PARAMETER Experiment Name: At_Drought_cDNA_P Parameter: Treatment Value: Drought vs. No Drought
  misc_feature: MA Experiment ID: 108577 Result: Down-regulated in Transcription
  misc_feature: MA Experiment 108577 PARAMETER Experiment Name: At_42deg_Heat_cDNA_P Parameter: Temperature (deg C) Value: 42 vs. 22
  misc_feature: MA Experiment 108577 PARAMETER Experiment Name: At_42deg_Heat_cDNA_P Parameter: Timepoint (hr) Value: 6
  misc_feature: MA Experiment 108577 PARAMETER Experiment Name: At_42deg_Heat_cDNA_P Parameter: Tissue Value: Aerial
  misc_feature: MA Experiment ID: 108585 Result: Up-regulated in Transcription
  misc_feature: MA Experiment 108585 PARAMETER Experiment Name: At_5mM_NaNP_cDNA_P Parameter: Timepoint (hr) Value: 6
  misc_feature: MA Experiment 108585 PARAMETER Experiment Name: At_5mM_NaNP_cDNA_P Parameter: Tissue Value: Aerial
  misc_feature: MA Experiment 108585 PARAMETER Experiment Name: At_5mM_NaNP_cDNA_P Parameter: Treatment Value: null
  misc_feature: MA Experiment ID: 108595 Result: Down-regulated in Transcription
  misc_feature: MA Experiment 108595 PARAMETER Experiment Name: At_Ler-pi_Ovule_cDNA_P Parameter: Plant Line Value: null
  misc_feature: MA Experiment ID: 108605 Result: Up-regulated in Transcription
  misc_feature: MA Experiment 108605 PARAMETER Experiment Name: At_100uM_ABA_cDNA_P Parameter: Timepoint (hr) Value: 6
  misc_feature: MA Experiment 108605 PARAMETER Experiment Name: At_100uM_ABA_cDNA_P Parameter: Tissue Value: Aerial
  misc_feature: MA Experiment 108605 PARAMETER Experiment Name: At_100uM_ABA_cDNA_P Parameter: Treatment Value: 100uM ABA vs. No Treatment
  misc_feature: MA Experiment ID: 108668 Result: Up-regulated in Transcription
  misc_feature: MA Experiment 108668 PARAMETER Experiment Name: At_2mM_SA_cDNA_P Parameter: Plant Line Value: WS
  misc_feature: MA Experiment 108668 PARAMETER Experiment Name: At_2mM_SA_cDNA_P Parameter: Timepoint (hr) Value: 6
  misc_feature: MA Experiment 108668 PARAMETER Experiment Name: At_2mM_SA_cDNA_P Parameter: Treatment Value: 2mM SA vs. No Treatment
  misc_feature: MA Experiment ID: 20000069 Result: Up-regulated in Transcription
  misc_feature: MA Experiment 20000069 PARAMETER Experiment Name: At_100uM_ABA_Mutants_cDNA_P Parameter: Plant Line Value: CS23
  misc_feature: MA Experiment 20000069 PARAMETER Experiment Name: At_100uM_ABA_Mutants_cDNA_P Parameter: Timepoint (hr) Value: 6
  misc_feature: MA Experiment 20000069 PARAMETER Experiment Name: At_100uM_ABA_Mutants_cDNA_P Parameter: Tissue Value: Aerial
  misc_feature: MA Experiment 20000069 PARAMETER Experiment Name: At_100uM_ABA_Mutants_cDNA_P Parameter: Treatment Value: 100uM ABA vs. No Treatment
  misc_feature: MA Experiment ID: 20000070 Result: Up-regulated in Transcription
  misc_feature: MA Experiment 20000070 PARAMETER Experiment Name: At_100uM_ABA_Mutants_cDNA_P Parameter: Plant Line Value: CS24
  misc_feature: MA Experiment 20000070 PARAMETER Experiment Name: At_100uM_ABA_Mutants_cDNA_P Parameter: Timepoint (hr) Value: 6
  misc_feature: MA Experiment 20000070 PARAMETER Experiment Name: At_100uM_ABA_Mutants_cDNA_P Parameter: Tissue Value: Aerial
  misc_feature: MA Experiment 20000070 PARAMETER Experiment Name: At_100uM_ABA_Mutants_cDNA_P Parameter: Treatment Value: 100uM ABA vs. No Treatment
  misc_feature: MA Experiment ID: 20000071 Result: Up-regulated in Transcription
  misc_feature: MA Experiment 20000071 PARAMETER Experiment Name: At_100uM_ABA_Mutants_cDNA_P Parameter: Plant Line Value: CS8104
  misc_feature: MA Experiment 20000071 PARAMETER Experiment Name: At_100uM_ABA_Mutants_cDNA_P Parameter: Timepoint (hr) Value: 6
  misc_feature: MA Experiment 20000071 PARAMETER Experiment Name: At_100uM_ABA_Mutants_cDNA_P Parameter: Tissue Value: Aerial
  misc_feature: MA Experiment 20000071 PARAMETER Experiment Name: At_100uM_ABA_Mutants_cDNA_P Parameter: Treatment Value: 100uM ABA vs. No Treatment
  misc_feature: MA Experiment ID: 20000072 Result: Up-regulated in Transcription
  misc_feature: MA Experiment 20000072 PARAMETER Experiment Name: At_100uM_ABA_Mutants_cDNA_P Parameter: Plant Line Value: CS8105
  misc_feature: MA Experiment 20000072 PARAMETER Experiment Name: At_100uM_ABA_Mutants_cDNA_P Parameter: Timepoint (hr) Value: 6
  misc_feature: MA Experiment 20000072 PARAMETER Experiment Name: At_100uM_ABA_Mutants_cDNA_P Parameter: Tissue Value: Aerial
  misc_feature: MA Experiment 20000072 PARAMETER Experiment Name: At_100uM_ABA_Mutants_cDNA_P Parameter: Treatment Value: 100uM ABA vs. No Treatment
  misc_feature: MA Experiment ID: 20000089 Result: Up-regulated in Transcription
  misc_feature: MA Experiment ID: 20000117 Result: Up-regulated in Transcription
  misc_feature: MA Experiment 20000117 PARAMETER Experiment Name: At_100uM_ABA_Mutants_cDNA_P Parameter: Plant Line Value: Columbia
  misc_feature: MA Experiment 20000117 PARAMETER Experiment Name: At_100uM_ABA_Mutants_cDNA_P Parameter: Timepoint (hr) Value: 6
  misc_feature: MA Experiment 20000117 PARAMETER Experiment Name: At_100uM_ABA_Mutants_cDNA_P Parameter: Tissue Value: Aerial
  misc_feature: MA Experiment 20000117 PARAMETER Experiment Name: At_100uM_ABA_Mutants_cDNA_P Parameter: Treatment Value: 100uM ABA vs. No Treatment
  misc_feature: MA Experiment ID: 20000144 Result: Down-regulated in Transcription
  misc_feature: MA Experiment 20000144 PARAMETER Experiment Name: At_42deg_Heat_cDNA_P Parameter: Temperature (deg C) Value: 42 vs. 22
  misc_feature: MA Experiment 20000144 PARAMETER Experiment Name: At_42deg_Heat_cDNA_P Parameter: Timepoint (hr) Value: 1
  misc_feature: MA Experiment 20000144 PARAMETER Experiment Name: At_42deg_Heat_cDNA_P Parameter: Tissue Value: Aerial
  misc_feature: MA Experiment ID: 20000182 Result: Up-regulated in Transcription
  misc_feature: MA Experiment 20000182 PARAMETER Experiment Name: At_2mM_SA_P Parameter: Age (day) Value: 14
  misc_feature: MA Experiment 20000182 PARAMETER Experiment Name: At_2mM_SA_P Parameter: Organism Value: A. thaliana
  misc_feature: MA Experiment 20000182 PARAMETER Experiment Name: At_2mM_SA_P Parameter: Plant Line Value: WS
  misc_feature: MA Experiment 20000182 PARAMETER Experiment Name: At_2mM_SA_P Parameter: Timepoint (hr) Value: 6
  misc_feature: MA Experiment 20000182 PARAMETER Experiment Name: At_2mM_SA_P Parameter: Tissue Value: Aerial
  misc_feature: MA Experiment 20000182 PARAMETER Experiment Name: At_2mM_SA_P Parameter: Treatment Value: 2mM SA vs. No Treatment
  misc_feature: MA Experiment ID: 20000184 Result: Up-regulated in Transcription
  misc_feature: MA Experiment 20000184 PARAMETER Experiment Name: At_Shoots__P Parameter: Age (day) Value: 7
  misc_feature: MA Experiment 20000184 PARAMETER Experiment Name: At_Shoots__P Parameter: Tissue Value: Shoots vs. Whole Plant
  misc_feature: MA Experiment ID: 20000234 Result: Down-regulated in Transcription
  misc_feature: MA Experiment 20000234 PARAMETER Experiment Name: At_Siliques_P Parameter: Age (day) Value: 21
  misc_feature: MA Experiment 20000234 PARAMETER Experiment Name: At_Siliques_P Parameter: Organism Value: A. thaliana
  misc_feature: MA Experiment 20000234 PARAMETER Experiment Name: At_Siliques_P Parameter: Plant Line Value: WS
  misc_feature: MA Experiment 20000234 PARAMETER Experiment Name: At_Siliques_P Parameter: Tissue Value: Less Than 5mm Siliques vs. Whole Plant
  misc_feature: MA Experiment ID: 20000235 Result: Down-regulated in Transcription
  misc_feature: MA Experiment 20000235 PARAMETER Experiment Name: At_Siliques_P Parameter: Age (day) Value: 21
  misc_feature: MA Experiment 20000235 PARAMETER Experiment Name: At_Siliques_P Parameter: Organism Value: A. thaliana
  misc_feature: MA Experiment 20000235 PARAMETER Experiment Name: At_Siliques_P Parameter: Plant Line Value: WS
  misc_feature: MA Experiment 20000235 PARAMETER Experiment Name: At_Siliques_P Parameter: Tissue Value: 5-10mm Siliques vs. Whole Plant
  misc_feature: MA Experiment ID: 20000265 Result: Down-regulated in Transcription
  misc_feature: MA Experiment 20000265 PARAMETER Experiment Name: At_Open_Flower_P Parameter: Age (day) Value: 21
  misc_feature: MA Experiment 20000265 PARAMETER Experiment Name: At_Open_Flower_P Parameter: Plant Line Value: WS
  misc_feature: MA Experiment 20000265 PARAMETER Experiment Name: At_Open_Flower_P Parameter: Tissue Value: Closed Flower vs. Whole Plant
  misc_feature: MA Experiment ID: 20000439 Result: Up-regulated in Transcription
  misc_feature: MA Experiment 20000439 PARAMETER Experiment Name: At_Roots__P Parameter: Age (day) Value: 14 vs. 21
  misc_feature: MA Experiment 20000439 PARAMETER Experiment Name: At_Roots__P Parameter: Organism Value: A. thaliana
  misc_feature: MA Experiment 20000439 PARAMETER Experiment Name: At_Roots__P Parameter: Tissue Value: Roots vs. Whole Plant
  misc_feature: MA Experiment ID: 20001248 Result: Up-regulated in Transcription
  misc_feature: MA Experiment 20001248 PARAMETER Experiment Name: At_Far-red-induction_P Parameter: Age (day) Value: 7
  misc_feature: MA Experiment 20001248 PARAMETER Experiment Name: At_Far-red-induction_P Parameter: Light Value: Far-red vs. White
  misc_feature: MA Experiment 20001248 PARAMETER Experiment Name: At_Far-red-induction_P Parameter: Organism Value: A. thaliana
  misc_feature: MA Experiment 20001248 PARAMETER Experiment Name: At_Far-red-induction_P Parameter: Plant Line Value: Columbia
  misc_feature: MA Experiment 20001248 PARAMETER Experiment Name: At_Far-red-induction_P Parameter: Timepoint (hr) Value: 4
  misc_feature: MA Experiment 20001248 PARAMETER Experiment Name: At_Far-red-induction_P Parameter: Tissue Value: Whole Plant
  misc_feature: MA Experiment ID: 20001450 Result: Up-regulated in Transcription
  misc_feature: MA Experiment 20001450 PARAMETER Experiment Name: At_Far-red-induction_P Parameter: Age (day) Value: 7
  misc_feature: MA Experiment 20001450 PARAMETER Experiment Name: At_Far-red-induction_P Parameter: Light Value: Far-red vs. White
  misc_feature: MA Experiment 20001450 PARAMETER Experiment Name: At_Far-red-induction_P Parameter: Organism Value: A. thaliana
  misc_feature: MA Experiment 20001450 PARAMETER Experiment Name: At_Far-red-induction_P Parameter: Plant Line Value: Columbia
  misc_feature: MA Experiment 20001450 PARAMETER Experiment Name: At_Far-red-induction_P Parameter: Timepoint (hr) Value: 8
  misc_feature: MA Experiment 20001450 PARAMETER Experiment Name: At_Far-red-induction_P Parameter: Tissue Value: Whole Plant
  misc_feature: MA Experiment ID: 20001557 Result: Up-regulated in Transcription
  misc_feature: MA Experiment 20001557 PARAMETER Experiment Name: At_Drought_Soil_Dry_P Parameter: Age (day) Value: 27
  misc_feature: MA Experiment 20001557 PARAMETER Experiment Name: At_Drought_Soil_Dry_P Parameter: Organism Value: A. thaliana
  misc_feature: MA Experiment 20001557 PARAMETER Experiment Name: At_Drought_Soil_Dry_P Parameter: Plant Line Value: WS
  misc_feature: MA Experiment 20001557 PARAMETER Experiment Name: At_Drought_Soil_Dry_P Parameter: Post Timepoint (hr) Value: 3
  misc_feature: MA Experiment 20001557 PARAMETER Experiment Name: At_Drought_Soil_Dry_P Parameter: Post-Treatment Value: Re-Water vs. No Drought
  misc_feature: MA Experiment 20001557 PARAMETER Experiment Name: At_Drought_Soil_Dry_P Parameter: Timepoint (day) Value: 13
  misc_feature: MA Experiment 20001557 PARAMETER Experiment Name: At_Drought_Soil_Dry_P Parameter: Treatment Value: Drought vs. No Drought
acattctctccttcctcatcatcgttactctcgtgtttatctctccgacgtaaccatggatagcgatactctctcaggattattggaaaacgtcgccaaaaaattccccgatcgccgagctctctccgtttctggaaaattcaatctcactcacgcgcgtcttcacgatctaatcgaacgcgccgcttcacgccttgtctccgacgctggaatcaaacccggcgatgtcgttgctctcaccttccctaacaccgtcgagtttgttataatgtttttagcggtgataagagctagagccacggcggcgccgttgaacgcagcgtacacggcggaggaatttgagttttacctctccgattcagattcaaagctattgttaacctctaaagaaggaaacgcaccggctcaagaagcagcttcaaagctgaaaatctctcacgtcaccgctacgctgcttgacgctggctcggaccttgtactatccgttgcggattcagattccgtcgttgactcagcgacggaactcgttaatcacccggacgacggtgctctcttcctccacacttctggcactacgagccgtccaaagggtgtaccgcttacgcagctcaatctagcttcatccgtcaagaacattaaagctgtgtacaagcttactgagtctgattctacggtgattgttctccctctgttccatgttcatggattgttagctgggttgcttagctcgcttggagctggtgctgctgtaactcttccagctgctggtagattctcagcaacaacattttggccagatatgaagaagtataacgctacatggtatactgctgtgccgaccattcatcagatcatattggaccgccacgcgagccaccctgagacggaatatcctaaactccggttcatcaggagttgcagtgcttctttggctccggtgatattgtccaggcttgaggaagcgtttggagcaccggtgctcgaggcctatgcaatgacagaggcaacacatttgatgagctcaaaccccttaccagaggaaggtccacacaagcctgggtctgttgggaaaccggtaggtcaagaaatggcgatccttaatgagaaaggcgagatccaagagccaaataacaaaggagaggtttgtataagaggtccaaatgtgaccaagggttacaagaataacccagaagccaacaaggcaggtttcgagtttgggtggttccacactggtgatatcggttactttgataccgatgggtatttgcatctggtgggtcggatcaaagagcttattaaccgtggaggtgagaagatatctccaattgaagtggatgcagtactcttaacgcatcctgacgtttctcagggtgttgcattcggtgttcctgatgagaaatatggggaagagattaactgtgcggtgattccaagagaaggaactactgtaaccgaagaggacattaaagcgttttgtaagaagaatttggcagctttcaaggtgccaaagagagtgttcatcactgataacctccccaaaactgcctctggtaagattcagcgccgtatcgtcgcacaacatttccttgagaagccctgaaacacacagaaaacaccatcttgctcgaaaatcatcggtgatgagtcctagttttcacttttcacgcaaatggatatgcgttctctattattggttcttggtttaaaagttactttttatatgtttcatggtggtaaaggttatagattaaatcacaaaagtggaaataaaagtcgataagtgattattgaagtacaacaataaaggagagtttctttt

SEQ ID NO: 37550 - protein, 532 aa, Arabidopsis thaliana
  peptide (1)..(532): Ceres Seq. ID no. 12371295
  misc_feature (50)..(459): Pfam Name: AMP-binding enzyme Pfam Description: AMP-binding enzyme
  misc_feature (40)..(526): Homolog of NCBI NO: 23129649 NR Description: hypothetical protein [Nostoc punctiforme]
  misc_feature (17)..(521): Homolog of NCBI NO: 13475813 NR Description: similar to coenzyme a synthetase [Mesorhizobium
  misc_feature (28)..(532): Homolog of NCBI NO: 40741124 NR Description: hypothetical protein AN4397.2 [Aspergillus
  misc_feature (56)..(531): Homolog of NCBI NO: 32421767 NR Description: hypothetical protein [Neurospora crassa]
  misc_feature (56)..(532): Homolog of NCBI NO: 28950137 NR Description: probable fatty acid transporter FAT2 [Neurospora
  misc_feature (64)..(528): Homolog of NCBI NO: 19076049 NR Description: putative coenzyme a synthetase
  misc_feature (19)..(529): Homolog of NCBI NO: 32488701 NR Description: OSJNBa0088H09.2 [Oryza sativa (japonica
  misc_feature (19)..(532): Homolog of NCBI NO: 16797908 NR Description: putative acyl-CoA synthetase [Capsicum annuum]
  misc_feature (19)..(532): Homolog of NCBI NO: 21593705 NR Description: 4-coumarate-CoA ligase-like protein [Arabidopsis
  misc_feature (19)..(532): Homolog of NCBI NO: 15229062 NR Description: 4-coumarate-CoA ligase -like protein
HSLLPHHRYSRVYLSDVTMDSDTLSGLLENVAKKFPDRRALSVSGKFNLTHARLHDLIERAASRLVSDAGIKPGDVVALTFPNTVEFVIMFLAVIRARATAAPLNAAYTAEEFEFYLSDSDSKLLLTSKEGNAPAQEAASKLKISHVTATLLDAGSDLVLSVADSDSVVDSATELVNHPDDGALFLHTSGTTSRPKGVPLTQLNLASSVKNIKAVYKLTESDSTVIVLPLFHVHGLLAGLLSSLGAGAAVTLPAAGRFSATTFWPDMKKYNATWYTAVPTIHQIILDRHASHPETEYPKLRFIRSCSASLAPVILSRLEEAFGAPVLEAYAMTEATHLMSSNPLPEEGPHKPGSVGKPVGQEMAILNEKGEIQEPNNKGEVCIRGPNVTKGYKNNPEANKAGFEFGWFHTGDIGYFDTDGYLHLVGRIKELINRGGEKISPIEVDAVLLTHPDVSQGVAFGVPDEKYGEEINCAVIPREGTTVTEEDIKAFCKKNLAAFKVPKRVFITDNLPKTASGKIQRRIVAQHFLEKP

SEQ ID NO: 37551 - protein, 514 aa, Arabidopsis thaliana
  peptide (1)..(514): Ceres Seq. ID no. 12371296
  misc_feature (32)..(441): Pfam Name: AMP-binding enzyme Pfam Description: AMP-binding enzyme
  misc_feature (22)..(508): Homolog of NCBI NO: 23129649 NR Description: hypothetical protein [Nostoc punctiforme]
  misc_feature (1)..(503): Homolog of NCBI NO: 13475813 NR Description: similar to coenzyme a synthetase [Mesorhizobium
  misc_feature (10)..(514): Homolog of NCBI NO: 40741124 NR Description: hypothetical protein AN4397.2 [Aspergillus
  misc_feature (38)..(513): Homolog of NCBI NO: 32421767 NR Description: hypothetical protein [Neurospora crassa]
  misc_feature (38)..(514): Homolog of NCBI NO: 28950137 NR Description: probable fatty acid transporter FAT2 [Neurospora
  misc_feature (46)..(510): Homolog of NCBI NO: 19076049 NR Description: putative coenzyme a synthetase
  misc_feature (1)..(511): Homolog of NCBI NO: 32488701 NR Description: OSJNBa0088H09.2 [Oryza sativa (japonica
  misc_feature (1)..(514): Homolog of NCBI NO: 16797908 NR Description: putative acyl-CoA synthetase [Capsicum annuum]
  misc_feature (1)..(514): Homolog of NCBI NO: 21593705 NR Description: 4-coumarate-CoA ligase-like protein [Arabidopsis
  misc_feature (1)..(514): Homolog of NCBI NO: 15229062 NR Description: 4-coumarate-CoA ligase -like protein
MDSDTLSGLLENVAKKFPDRRALSVSGKFNLTHARLHDLIERAASRLVSDAGIKPGDVVALTFPNTVEFVIMFLAVIRARATAAPLNAAYTAEEFEFYLSDSDSKLLLTSKEGNAPAQEAASKLKISHVTATLLDAGSDLVLSVADSDSVVDSATELVNHPDDGALFLHTSGTTSRPKGVPLTQLNLASSVKNIKAVYKLTESDSTVIVLPLFHVHGLLAGLLSSLGAGAAVTLPAAGRFSATTFWPDMKKYNATWYTAVPTIHQIILDRHASHPETEYPKLRFIRSCSASLAPVILSRLEEAFGAPVLEAYAMTEATHLMSSNPLPEEGPHKPGSVGKPVGQEMAILNEKGEIQEPNNKGEVCIRGPNVTKGYKNNPEANKAGFEFGWFHTGDIGYFDTDGYLHLVGRIKELINRGGEKISPIEVDAVLLTHPDVSQGVAFGVPDEKYGEEINCAVIPREGTTVTEEDIKAFCKKNLAAFKVPKRVFITDNLPKTASGKIQRRIVAQHFLEKP

SEQ ID NO: 37552 - protein, 443 aa, Arabidopsis thaliana
  peptide (1)..(443): Ceres Seq. ID no. 12371297
  misc_feature (1)..(370): Pfam Name: AMP-binding enzyme Pfam Description: AMP-binding enzyme
  misc_feature (1)..(437): Homolog of NCBI NO: 23129649 NR Description: hypothetical protein [Nostoc punctiforme]
  misc_feature (1)..(432): Homolog of NCBI NO: 13475813 NR Description: similar to coenzyme a synthetase [Mesorhizobium
  misc_feature (1)..(443): Homolog of NCBI NO: 40741124 NR Description: hypothetical protein AN4397.2 [Aspergillus
  misc_feature (1)..(442): Homolog of NCBI NO: 32421767 NR Description: hypothetical protein [Neurospora crassa]
  misc_feature (1)..(443): Homolog of NCBI NO: 28950137 NR Description: probable fatty acid transporter FAT2 [Neurospora
  misc_feature (1)..(439): Homolog of NCBI NO: 19076049 NR Description: putative coenzyme a synthetase
  misc_feature (1)..(440): Homolog of NCBI NO: 32488701 NR Description: OSJNBa0088H09.2 [Oryza sativa (japonica
  misc_feature (1)..(443): Homolog of NCBI NO: 16797908 NR Description: putative acyl-CoA synthetase [Capsicum annuum]
  misc_feature (1)..(443): Homolog of NCBI NO: 21593705 NR Description: 4-coumarate-CoA ligase-like protein [Arabidopsis
  misc_feature (1)..(443): Homolog of NCBI NO: 15229062 NR Description: 4-coumarate-CoA ligase -like protein
MFLAVIRARATAAPLNAAYTAEEFEFYLSDSDSKLLLTSKEGNAPAQEAASKLKISHVTATLLDAGSDLVLSVADSDSVVDSATELVNHPDDGALFLHTSGTTSRPKGVPLTQLNLASSVKNIKAVYKLTESDSTVIVLPLFHVHGLLAGLLSSLGAGAAVTLPAAGRFSATTFWPDMKKYNATWYTAVPTIHQIILDRHASHPETEYPKLRFIRSCSASLAPVILSRLEEAFGAPVLEAYAMTEATHLMSSNPLPEEGPHKPGSVGKPVGQEMAILNEKGEIQEPNNKGEVCIRGPNVTKGYKNNPEANKAGFEFGWFHTGDIGYFDTDGYLHLVGRIKELINRGGEKISPIEVDAVLLTHPDVSQGVAFGVPDEKYGEEINCAVIPREGTTVTEEDIKAFCKKNLAAFKVPKRVFITDNLPKTASGKIQRRIVAQHFLEKP

SEQ ID NO: 37553 - DNA, 1153 bp, Arabidopsis thaliana
  misc_feature (1)..(1153): Ceres Seq. ID no. 13486623
  misc_feature: MA Experiment ID: 108434 Result: Down-regulated in Transcription
  misc_feature: MA Experiment 108434 PARAMETER Experiment Name: At_Root_Tips_cDNA_P Parameter: Tissue Value: Root Tips
  misc_feature: MA Experiment ID: 108461 Result: Up-regulated in Transcription
  misc_feature: MA Experiment 108461 PARAMETER Experiment Name: At_Germinating_Seeds_cDNA_P Parameter: Age (day) Value: 1 vs. 0
  misc_feature: MA Experiment 108461 PARAMETER Experiment Name: At_Germinating_Seeds_cDNA_P Parameter: Tissue Value: Germinating Seeds
  misc_feature: MA Experiment ID: 108462 Result: Up-regulated in Transcription
  misc_feature: MA Experiment 108462 PARAMETER Experiment Name: At_Germinating_Seeds_cDNA_P Parameter: Age (day) Value: 2 vs. 0
  misc_feature: MA Experiment 108462 PARAMETER Experiment Name: At_Germinating_Seeds_cDNA_P Parameter: Tissue Value: Germinating Seeds
  misc_feature: MA Experiment ID: 108463 Result: Up-regulated in Transcription
  misc_feature: MA Experiment 108463 PARAMETER Experiment Name: At_Germinating_Seeds_cDNA_P Parameter: Age (day) Value: 3 vs. 0
  misc_feature: MA Experiment 108463 PARAMETER Experiment Name: At_Germinating_Seeds_cDNA_P Parameter: Tissue Value: Germinating Seeds
  misc_feature: MA Experiment ID: 108464 Result: Up-regulated in Transcription
  misc_feature: MA Experiment 108464 PARAMETER Experiment Name: At_Germinating_Seeds_cDNA_P Parameter: Age (day) Value: 4 vs. 0
  misc_feature: MA Experiment 108464 PARAMETER Experiment Name: At_Germinating_Seeds_cDNA_P Parameter: Tissue Value: Germinating Seeds
  misc_feature: MA Experiment ID: 108561 Result: Up-regulated in Transcription
  misc_feature: MA Experiment 108561 PARAMETER Experiment Name: At_100uM_ABA_cDNA_P Parameter: Timepoint (hr) Value: 6
  misc_feature: MA Experiment 108561 PARAMETER Experiment Name: At_100uM_ABA_cDNA_P Parameter: Tissue Value: Aerial
  misc_feature: MA Experiment 108561 PARAMETER Experiment Name: At_100uM_ABA_cDNA_P Parameter: Treatment Value: 100uM ABA vs. No Treatment
  misc_feature: MA Experiment ID: 108573 Result: Up-regulated in Transcription
  misc_feature: MA Experiment 108573 PARAMETER Experiment Name: At_Drought_cDNA_P Parameter: Timepoint (hr) Value: 6
  misc_feature: MA Experiment 108573 PARAMETER Experiment Name: At_Drought_cDNA_P Parameter: Tissue Value: Aerial
  misc_feature: MA Experiment 108573 PARAMETER Experiment Name: At_Drought_cDNA_P Parameter: Treatment Value: Drought vs. No Drought
  misc_feature: MA Experiment ID: 108585 Result: Up-regulated in Transcription
  misc_feature: MA Experiment 108585 PARAMETER Experiment Name: At_5mM_NaNP_cDNA_P Parameter: Timepoint (hr) Value: 6
  misc_feature: MA Experiment 108585 PARAMETER Experiment Name: At_5mM_NaNP_cDNA_P Parameter: Tissue Value: Aerial
  misc_feature: MA Experiment 108585 PARAMETER Experiment Name: At_5mM_NaNP_cDNA_P Parameter: Treatment Value: null
  misc_feature: MA Experiment ID: 108605 Result: Up-regulated in Transcription
  misc_feature: MA Experiment 108605 PARAMETER Experiment Name: At_100uM_ABA_cDNA_P Parameter: Timepoint (hr) Value: 6
  misc_feature: MA Experiment 108605 PARAMETER Experiment Name: At_100uM_ABA_cDNA_P Parameter: Tissue Value: Aerial
  misc_feature: MA Experiment 108605 PARAMETER Experiment Name: At_100uM_ABA_cDNA_P Parameter: Treatment Value: 100uM ABA vs. No Treatment
  misc_feature: MA Experiment ID: 108609 Result: Up-regulated in Transcription
  misc_feature: MA Experiment 108609 PARAMETER Experiment Name: At_100uM_ABA_cDNA_P Parameter: Timepoint (hr) Value: 24
  misc_feature: MA Experiment 108609 PARAMETER Experiment Name: At_100uM_ABA_cDNA_P Parameter: Tissue Value: Aerial
  misc_feature: MA Experiment 108609 PARAMETER Experiment Name: At_100uM_ABA_cDNA_P Parameter: Treatment Value: 100uM ABA vs. No Treatment
  misc_feature: MA Experiment ID: 20000069 Result: Up-regulated in Transcription
  misc_feature: MA Experiment 20000069 PARAMETER Experiment Name: At_100uM_ABA_Mutants_cDNA_P Parameter: Plant Line Value: CS23
  misc_feature: MA Experiment 20000069 PARAMETER Experiment Name: At_100uM_ABA_Mutants_cDNA_P Parameter: Timepoint (hr) Value: 6
  misc_feature: MA Experiment 20000069 PARAMETER Experiment Name: At_100uM_ABA_Mutants_cDNA_P Parameter: Tissue Value: Aerial
  misc_feature: MA Experiment 20000069 PARAMETER Experiment Name: At_100uM_ABA_Mutants_cDNA_P Parameter: Treatment Value: 100uM ABA vs. No Treatment
  misc_feature: MA Experiment ID: 20000070 Result: Up-regulated in Transcription
  misc_feature: MA Experiment 20000070 PARAMETER Experiment Name: At_100uM_ABA_Mutants_cDNA_P Parameter: Plant Line Value: CS24
  misc_feature: MA Experiment 20000070 PARAMETER Experiment Name: At_100uM_ABA_Mutants_cDNA_P Parameter: Timepoint (hr) Value: 6
  misc_feature: MA Experiment 20000070 PARAMETER Experiment Name: At_100uM_ABA_Mutants_cDNA_P Parameter: Tissue Value: Aerial
  misc_feature: MA Experiment 20000070 PARAMETER Experiment Name: At_100uM_ABA_Mutants_cDNA_P Parameter: Treatment Value: 100uM ABA vs. No Treatment
  misc_feature: MA Experiment ID: 20000071 Result: Up-regulated in Transcription
  misc_feature: MA Experiment 20000071 PARAMETER Experiment Name: At_100uM_ABA_Mutants_cDNA_P Parameter: Plant Line Value: CS8104
  misc_feature: MA Experiment 20000071 PARAMETER Experiment Name: At_100uM_ABA_Mutants_cDNA_P Parameter: Timepoint (hr) Value: 6
  misc_feature: MA Experiment 20000071 PARAMETER Experiment Name: At_100uM_ABA_Mutants_cDNA_P Parameter: Tissue Value: Aerial
  misc_feature: MA Experiment 20000071 PARAMETER Experiment Name: At_100uM_ABA_Mutants_cDNA_P Parameter: Treatment Value: 100uM ABA vs. No Treatment
  misc_feature: MA Experiment ID: 20000072 Result: Up-regulated in Transcription
  misc_feature: MA Experiment 20000072 PARAMETER Experiment Name: At_100uM_ABA_Mutants_cDNA_P Parameter: Plant Line Value: CS8105
  misc_feature: MA Experiment 20000072 PARAMETER Experiment Name: At_100uM_ABA_Mutants_cDNA_P Parameter: Timepoint (hr) Value: 6
  misc_feature: MA Experiment 20000072 PARAMETER Experiment Name: At_100uM_ABA_Mutants_cDNA_P Parameter: Tissue Value: Aerial
  misc_feature: MA Experiment 20000072 PARAMETER Experiment Name: At_100uM_ABA_Mutants_cDNA_P Parameter: Treatment Value: 100uM ABA vs. No Treatment
  misc_feature: MA Experiment ID: 20000086 Result: Up-regulated in Transcription
  misc_feature: MA Experiment 20000086 PARAMETER Experiment Name: At_100uM_ABA_Mutants_cDNA_P Parameter: Plant Line Value: CS22
  misc_feature: MA Experiment 20000086 PARAMETER Experiment Name: At_100uM_ABA_Mutants_cDNA_P Parameter: Timepoint (hr) Value: 6
  misc_feature: MA Experiment 20000086 PARAMETER Experiment Name: At_100uM_ABA_Mutants_cDNA_P Parameter: Tissue Value: Aerial
  misc_feature: MA Experiment 20000086 PARAMETER Experiment Name: At_100uM_ABA_Mutants_cDNA_P Parameter: Treatment Value: 100uM ABA vs. No Treatment
  misc_feature: MA Experiment ID: 20000088 Result: Up-regulated in Transcription
  misc_feature: MA Experiment 20000088 PARAMETER Experiment Name: At_100uM_ABA_Mutants_cDNA_P Parameter: Plant Line Value: Landsberg
  misc_feature: MA Experiment 20000088 PARAMETER Experiment Name: At_100uM_ABA_Mutants_cDNA_P Parameter: Timepoint (hr) Value: 6
  misc_feature: MA Experiment 20000088 PARAMETER Experiment Name: At_100uM_ABA_Mutants_cDNA_P Parameter: Tissue Value: Aerial
  misc_feature: MA Experiment 20000088 PARAMETER Experiment Name: At_100uM_ABA_Mutants_cDNA_P Parameter: Treatment Value: 100uM ABA vs. No Treatment
  misc_feature: MA Experiment ID: 20000117 Result: Up-regulated in Transcription
  misc_feature: MA Experiment 20000117 PARAMETER Experiment Name: At_100uM_ABA_Mutants_cDNA_P Parameter: Plant Line Value: Columbia
  misc_feature: MA Experiment 20000117 PARAMETER Experiment Name: At_100uM_ABA_Mutants_cDNA_P Parameter: Timepoint (hr) Value: 6
  misc_feature: MA Experiment 20000117 PARAMETER Experiment Name: At_100uM_ABA_Mutants_cDNA_P Parameter: Tissue Value: Aerial
  misc_feature: MA Experiment 20000117 PARAMETER Experiment Name: At_100uM_ABA_Mutants_cDNA_P Parameter: Treatment Value: 100uM ABA vs. No Treatment
  misc_feature: MA Experiment ID: 20000179 Result: Up-regulated in Transcription
  misc_feature: MA Experiment 20000179 PARAMETER Experiment Name: At_Germinating_Seeds_P Parameter: Age (hr) Value: 6 vs. 0
  misc_feature: MA Experiment 20000179 PARAMETER Experiment Name: At_Germinating_Seeds_P Parameter: Tissue Value: Germinating Seeds
  misc_feature: MA Experiment ID: 20000180 Result: Up-regulated in Transcription
  misc_feature: MA Experiment 20000180 PARAMETER Experiment Name: At_Germinating_Seeds_P Parameter: Age (hr) Value: 24 vs. 0
  misc_feature: MA Experiment 20000180 PARAMETER Experiment Name: At_Germinating_Seeds_P Parameter: Tissue Value: Germinating Seeds
  misc_feature: MA Experiment ID: 20000214 Result: Down-regulated in Transcription
  misc_feature: MA Experiment 20000214 PARAMETER Experiment Name: At_4deg_Cold_P Parameter: Timepoint (hr) Value: 6
  misc_feature: MA Experiment ID: 20000234 Result: Down-regulated in Transcription
  misc_feature: MA Experiment 20000234 PARAMETER Experiment Name: At_Siliques_P Parameter: Age (day) Value: 21
  misc_feature: MA Experiment 20000234 PARAMETER Experiment Name: At_Siliques_P Parameter: Organism Value: A. thaliana
  misc_feature: MA Experiment 20000234 PARAMETER Experiment Name: At_Siliques_P Parameter: Plant Line Value: WS
  misc_feature: MA Experiment 20000234 PARAMETER Experiment Name: At_Siliques_P Parameter: Tissue Value: Less Than 5mm Siliques vs. Whole Plant
  misc_feature: MA Experiment ID: 20000264 Result: Down-regulated in Transcription
  misc_feature: MA Experiment 20000264 PARAMETER Experiment Name: At_Open_Flower_P Parameter: Age (day) Value: 21
  misc_feature: MA Experiment 20000264 PARAMETER Experiment Name: At_Open_Flower_P Parameter: Plant Line Value: WS
  misc_feature: MA Experiment 20000264 PARAMETER Experiment Name: At_Open_Flower_P Parameter: Tissue Value: Open Flower vs. Whole Plant
  misc_feature: MA Experiment ID: 20000265 Result: Down-regulated in Transcription
  misc_feature: MA Experiment 20000265 PARAMETER Experiment Name: At_Open_Flower_P Parameter: Age (day) Value: 21
  misc_feature: MA Experiment 20000265 PARAMETER Experiment Name: At_Open_Flower_P Parameter: Plant Line Value: WS
  misc_feature: MA Experiment 20000265 PARAMETER Experiment Name: At_Open_Flower_P Parameter: Tissue Value: Closed Flower vs. Whole Plant
  misc_feature: MA Experiment ID: 20000286 Result: Down-regulated in Transcription
  misc_feature: MA Experiment 20000286 PARAMETER Experiment Name: At_Open_Flower_P Parameter: Age (day) Value: 21
  misc_feature: MA Experiment 20000286 PARAMETER Experiment Name: At_Open_Flower_P Parameter: Plant Line Value: WS
  misc_feature: MA Experiment 20000286 PARAMETER Experiment Name: At_Open_Flower_P Parameter: Tissue Value: Half Open vs. Whole Plant
  misc_feature: MA Experiment ID: 20000451 Result: Down-regulated in Transcription
  misc_feature: MA Experiment 20000451 PARAMETER Experiment Name: At_CS6879_Shoots-Roots_P Parameter: Age (day) Value: 14
  misc_feature: MA Experiment 20000451 PARAMETER Experiment Name: At_CS6879_Shoots-Roots_P Parameter: Organism Value: A. thaliana
  misc_feature: MA Experiment 20000451 PARAMETER Experiment Name: At_CS6879_Shoots-Roots_P Parameter: Plant Line Value: CS6879 vs. WS
  misc_feature: MA Experiment 20000451 PARAMETER Experiment Name: At_CS6879_Shoots-Roots_P Parameter: Tissue Value: Roots
  misc_feature: MA Experiment ID: 20000453 Result: Up-regulated in Transcription
  misc_feature: MA Experiment 20000453 PARAMETER Experiment Name: At_100uM_ABA_P Parameter: Age (day) Value: 15
  misc_feature: MA Experiment 20000453 PARAMETER Experiment Name: At_100uM_ABA_P Parameter: Organism Value: A. thaliana
  misc_feature: MA Experiment 20000453 PARAMETER Experiment Name: At_100uM_ABA_P Parameter: Plant Line Value: WS
  misc_feature: MA Experiment 20000453 PARAMETER Experiment Name: At_100uM_ABA_P Parameter: Timepoint (hr) Value: 24
  misc_feature: MA Experiment 20000453 PARAMETER Experiment Name: At_100uM_ABA_P Parameter: Tissue Value: Aerial
  misc_feature: MA Experiment 20000453 PARAMETER Experiment Name: At_100uM_ABA_P Parameter: Treatment Value: 100uM ABA vs. No Treatment
  misc_feature: MA Experiment ID: 20001558 Result: Down-regulated in Transcription
  misc_feature: MA Experiment 20001558 PARAMETER Experiment Name: At_Drought_Soil_Dry_P Parameter: Age (day) Value: 27
  misc_feature: MA Experiment 20001558 PARAMETER Experiment Name: At_Drought_Soil_Dry_P Parameter: Organism Value: A. thaliana
  misc_feature: MA Experiment 20001558 PARAMETER Experiment Name: At_Drought_Soil_Dry_P Parameter: Plant Line Value: WS
  misc_feature: MA Experiment 20001558 PARAMETER Experiment Name: At_Drought_Soil_Dry_P Parameter: Post Timepoint (hr) Value: 6
  misc_feature: MA Experiment 20001558 PARAMETER Experiment Name: At_Drought_Soil_Dry_P Parameter: Post-Treatment Value: Re-Water vs. No Drought
  misc_feature: MA Experiment 20001558 PARAMETER Experiment Name: At_Drought_Soil_Dry_P Parameter: Timepoint (day) Value: 13
  misc_feature: MA Experiment 20001558 PARAMETER Experiment Name: At_Drought_Soil_Dry_P Parameter: Treatment Value: Drought vs. No Drought
  misc_feature: MA Experiment ID: 20001560 Result: Down-regulated in Transcription
  misc_feature: MA Experiment 20001560 PARAMETER Experiment Name: At_Drought_Soil_Dry_P Parameter: Age (day) Value: 28
  misc_feature: MA Experiment 20001560 PARAMETER Experiment Name: At_Drought_Soil_Dry_P Parameter: Organism Value: A. thaliana
  misc_feature: MA Experiment 20001560 PARAMETER Experiment Name: At_Drought_Soil_Dry_P Parameter: Plant Line Value: WS
  misc_feature: MA Experiment 20001560 PARAMETER Experiment Name: At_Drought_Soil_Dry_P Parameter: Post Timepoint (hr) Value: None
  misc_feature: MA Experiment 20001560 PARAMETER Experiment Name: At_Drought_Soil_Dry_P Parameter: Post-Treatment Value: None
  misc_feature: MA Experiment 20001560 PARAMETER Experiment Name: At_Drought_Soil_Dry_P Parameter: Timepoint (day) Value: 14
  misc_feature: MA Experiment 20001560 PARAMETER Experiment Name: At_Drought_Soil_Dry_P Parameter: Treatment Value: Drought vs. No Drought
  misc_feature: MA Experiment ID: 20001911 Result: Up-regulated in Transcription
  misc_feature: MA Experiment 20001911 PARAMETER Experiment Name: At_Drought_Reproduction_P Parameter: Age (day) Value: 40
  misc_feature: MA Experiment 20001911 PARAMETER Experiment Name: At_Drought_Reproduction_P Parameter: Organism Value: A. thaliana
  misc_feature: MA Experiment 20001911 PARAMETER Experiment Name: At_Drought_Reproduction_P Parameter: Plant Line Value: WS
  misc_feature: MA Experiment 20001911 PARAMETER Experiment Name: At_Drought_Reproduction_P Parameter: Timepoint (day) Value: 10
  misc_feature: MA Experiment 20001911 PARAMETER Experiment Name: At_Drought_Reproduction_P Parameter: Tissue Value: Flowers
  misc_feature: MA Experiment 20001911 PARAMETER Experiment Name: At_Drought_Reproduction_P Parameter: Treatment Value: Drought vs. No Drought
gtcgacccacgcgtccgctccaagaggagagagagagaaagagattcaattatatgcagagagaaaaagaagccaattggttctctctctctctctctctctctctgattgattgatccagcgattcgtctggctggctcggtttccgcgggaaaaccttcttcttcgttgaccttacacgagttttgttgattcggcagggggatcgacgacggagatggcgattctgtacgccctcgtggctcgtggcacggtggttctttctgagttcaccgccacctctacgaatgcgagcaccatcgccaaacagatcctcgagaaggtccctggagacaacgacagcaacgtctcctactctcaggatcgttacgtcttccacgttaaacgcaccgatggcctcaccgttctctgtatggccgaagaaaccgccggaaggagaattccttttgcctttttggaggatattcaccagagattcgtacggacttatggcagggctgttcatacagcactagcttatgcaatgaatgaggaattctctagagttctcagtcagcagattgactattactctaatgatcctaatgccgataggattaatcgtattaagggtgaaatgaatcaggtgcggggtgtcatgatagaaaacattgacaaagtcctagatagaggtgaacgtttggagcttcttgtcgataaaaccgccaatatgcaggggaatacattccggttcagaaagcaagctcgtcgttttagaagcaacgtctggtggagaaactgcaagctcacggtcctcttaatactactactactggtgatcatatacattgcagtggcctttctctgccacggacctactctaccatcttgcatttaagtgcatctgtctcttaaggaatccatcccgattctgcgcgttgccacgactttttatctcctcatctgattgtaaaccttgtgttttcctgagcattttcatgtggcttaaaaagcttatgtttccaactcacgtatatgaaaaagtatacttatttatagagcaatgtaaaagctcattgctttgcgaagtgtgtgaatctttgttgacatcatgttctataaattacatacatagtggaaaagtgaacaggcttgctttgtctgatatgttcat

SEQ ID NO: 37554 - protein, 219 aa, Arabidopsis thaliana
  peptide (1)..(219): Ceres Seq. ID no. 13486624
  misc_feature (123)..(211): Pfam Name: Synaptobrevin Pfam Description: Synaptobrevin
  misc_feature (1)..(219): Homolog of NCBI NO: 16758296 NR Description: synaptobrevin-like 1 [Rattus norvegicus]
  misc_feature (1)..(219): Homolog of NCBI NO: 5032137 NR Description: synaptobrevin-like 1 [Homo sapiens]
  misc_feature (1)..(219): Homolog of NCBI NO: 33468929 NR Description: synaptobrevin like 1 [Mus musculus]
  misc_feature (1)..(212): Homolog of NCBI NO: 28828593 NR Description: similar to Arabidopsis thaliana (Mouse-ear
  misc_feature (1)..(218): Homolog of NCBI NO: 37531190 NR Description: putative synaptobrevin-like protein
  misc_feature (1)..(218): Homolog of NCBI NO: 15242224 NR Description: synaptobrevin-related protein [Arabidopsis
  misc_feature (1)..(219): Homolog of NCBI NO: 34898442 NR Description: ESTs AU082579(S2069),D40238(S2069) correspond to region of the predicted gene.~Similar to Arabidopsis thaliana
  misc_feature (1)..(218): Homolog of NCBI NO: 15238971 NR Description: synaptobrevin (VAMP713) [Arabidopsis thaliana]
  misc_feature (1)..(219): Homolog of NCBI NO: 15224711 NR Description: synaptobrevin -related [Arabidopsis thaliana]
  misc_feature (1)..(219): Homolog of NCBI NO: 15236687 NR Description: synaptobrevin-related protein [Arabidopsis
MAILYALVARGTVVLSEFTATSTNASTIAKQILEKVPGDNDSNVSYSQDRYVFHVKRTDGLTVLCMAEETAGRRIPFAFLEDIHQRFVRTYGRAVHTALAYAMNEEFSRVLSQQIDYYSNDPNADRINRIKGEMNQVRGVMIENIDKVLDRGERLELLVDKTANMQGNTFRFRKQARRFRSNVWWRNCKLTVLLILLLLVIIYIAVAFLCHGPTLPSCI

SEQ ID NO: 37555 - protein, 154 aa, Arabidopsis thaliana
  peptide (1)..(154): Ceres Seq. ID no. 13486625
  misc_feature (58)..(146): Pfam Name: Synaptobrevin Pfam Description: Synaptobrevin
  misc_feature (1)..(154): Homolog of NCBI NO: 16758296 NR Description: synaptobrevin-like 1 [Rattus norvegicus]
  misc_feature (1)..(154): Homolog of NCBI NO: 5032137 NR Description: synaptobrevin-like 1 [Homo sapiens]
  misc_feature (1)..(154): Homolog of NCBI NO: 33468929 NR Description: synaptobrevin like 1 [Mus musculus]
  misc_feature (1)..(147): Homolog of NCBI NO: 28828593 NR Description: similar to Arabidopsis thaliana (Mouse-ear
  misc_feature (1)..(153): Homolog of NCBI NO: 37531190 NR Description: putative synaptobrevin-like protein
  misc_feature (1)..(153): Homolog of NCBI NO: 15242224 NR Description: synaptobrevin-related protein [Arabidopsis
  misc_feature (1)..(154): Homolog of NCBI NO: 34898442 NR Description: ESTs AU082579(S2069),D40238(S2069) correspond to region of the predicted gene.~Similar to Arabidopsis thaliana
  misc_feature (1)..(153): Homolog of NCBI NO: 15238971 NR Description: synaptobrevin (VAMP713) [Arabidopsis thaliana]
  misc_feature (1)..(154): Homolog of NCBI NO: 15224711 NR Description: synaptobrevin -related [Arabidopsis thaliana]
  misc_feature (1)..(154): Homolog of NCBI NO: 15236687 NR Description: synaptobrevin-related protein [Arabidopsis
MAEETAGRRIPFAFLEDIHQRFVRTYGRAVHTALAYAMNEEFSRVLSQQIDYYSNDPNADRINRIKGEMNQVRGVMIENIDKVLDRGERLELLVDKTANMQGNTFRFRKQARRFRSNVWWRNCKLTVLLILLLLVIIYIAVAFLCHGPTLPSCI

SEQ ID NO: 37556 - protein, 117 aa, Arabidopsis thaliana
  peptide (1)..(117): Ceres Seq. ID no. 13486626
  misc_feature (21)..(109): Pfam Name: Synaptobrevin Pfam Description: Synaptobrevin
  misc_feature (1)..(117): Homolog of NCBI NO: 16758296 NR Description: synaptobrevin-like 1 [Rattus norvegicus]
  misc_feature (1)..(117): Homolog of NCBI NO: 5032137 NR Description: synaptobrevin-like 1 [Homo sapiens]
  misc_feature (1)..(117): Homolog of NCBI NO: 33468929 NR Description: synaptobrevin like 1 [Mus musculus]
  misc_feature (1)..(110): Homolog of NCBI NO: 28828593 NR Description: similar to Arabidopsis thaliana (Mouse-ear
  misc_feature (1)..(116): Homolog of NCBI NO: 37531190 NR Description: putative synaptobrevin-like protein
  misc_feature (1)..(116): Homolog of NCBI NO: 15242224 NR Description: synaptobrevin-related protein [Arabidopsis
  misc_feature (1)..(117): Homolog of NCBI NO: 34898442 NR Description: ESTs AU082579(S2069),D40238(S2069) correspond to region of the predicted gene.~Similar to Arabidopsis thaliana
  misc_feature (1)..(116): Homolog of NCBI NO: 15238971 NR Description: synaptobrevin (VAMP713) [Arabidopsis thaliana]
  misc_feature (1)..(117): Homolog of NCBI NO: 15224711 NR Description: synaptobrevin -related [Arabidopsis thaliana]
  misc_feature (1)..(117): Homolog of NCBI NO: 15236687 NR Description: synaptobrevin-related protein [Arabidopsis
MNEEFSRVLSQQIDYYSNDPNADRINRIKGEMNQVRGVMIENIDKVLDRGERLELLVDKTANMQGNTFRFRKQARRFRSNVWWRNCKLTVLLILLLLVIIYIAVAFLCHGPTLPSCI

SEQ ID NO: 37557 - DNA, 1369 bp, Arabidopsis thaliana
  misc_feature (1)..(1369): Ceres Seq. ID no. 12489536
  misc_feature: MA Experiment ID: 108461 Result: Down-regulated in Transcription
  misc_feature: MA Experiment 108461 PARAMETER Experiment Name: At_Germinating_Seeds_cDNA_P Parameter: Age (day) Value: 1 vs. 0
  misc_feature: MA Experiment 108461 PARAMETER Experiment Name: At_Germinating_Seeds_cDNA_P Parameter: Tissue Value: Germinating Seeds
  misc_feature: MA Experiment ID: 20000224 Result: Down-regulated in Transcription
  misc_feature: MA Experiment ID: 20001905 Result: Up-regulated in Transcription
  misc_feature: MA Experiment 20001905 PARAMETER Experiment Name: At_Drought_Reproduction_P Parameter: Age (day) Value: 40
  misc_feature: MA Experiment 20001905 PARAMETER Experiment Name: At_Drought_Reproduction_P Parameter: Organism Value: A. thaliana
  misc_feature: MA Experiment 20001905 PARAMETER Experiment Name: At_Drought_Reproduction_P Parameter: Plant Line Value: WS
  misc_feature: MA Experiment 20001905 PARAMETER Experiment Name: At_Drought_Reproduction_P Parameter: Timepoint (day) Value: 10
  misc_feature: MA Experiment 20001905 PARAMETER Experiment Name: At_Drought_Reproduction_P Parameter: Tissue Value: Rosettes
  misc_feature: MA Experiment 20001905 PARAMETER Experiment Name: At_Drought_Reproduction_P Parameter: Treatment Value: Drought vs. No Drought
  misc_feature: MA Experiment ID: 20001911 Result: Up-regulated in Transcription
  misc_feature: MA Experiment 20001911 PARAMETER Experiment Name: At_Drought_Reproduction_P Parameter: Age (day) Value: 40
  misc_feature: MA Experiment 20001911 PARAMETER Experiment Name: At_Drought_Reproduction_P Parameter: Organism Value: A. thaliana
  misc_feature: MA Experiment 20001911 PARAMETER Experiment Name: At_Drought_Reproduction_P Parameter: Plant Line Value: WS
  misc_feature: MA Experiment 20001911 PARAMETER Experiment Name: At_Drought_Reproduction_P Parameter: Timepoint (day) Value: 10
  misc_feature: MA Experiment 20001911 PARAMETER Experiment Name: At_Drought_Reproduction_P Parameter: Tissue Value: Flowers
  misc_feature: MA Experiment 20001911 PARAMETER Experiment Name: At_Drought_Reproduction_P Parameter: Treatment Value: Drought vs. No Drought
aatctactgttctctctcctatctgggcaaaaatctcagacaaacctgcaaaattagggtatttgaggatatggattatgatcggtacaagttatttgttggtggtattgcgaaagagacaagtgaagaagctctgaagcattattttagcagatatggagctgtgttggaagctgttgtagctaaagagaaagtcactggaaaacctagaggttttgggtttgttcgctttgctaatgattgtgatgttgttaaagctcttagagacactcacttcattctcggtaaacccgttgatgtgagaaaggcgattaggaaacatgaaatataccaacagccgtttagcatgcagtttttggagagaaaaatgcaacagatgaatggtggtttgcgtgagatgtcgagtaatggtgtgacccataggtctaagaagatatttgttgggggtttgtcgtctaacacgactgaagaagagtttaagagttactttgagaggtttggtaggactactgatgtagttgtgatgcatgacggtgtgactaacaggccaaggggttttgggtttgttacttatgattcggaggactctgttgaggttgttatgcagagtaatttccatgagttgagtgataaacgcgtggaagtgaaacgggcaatacctaaagaaggaatccagagcaataacggtaatgctgttaatgttcctccttcctacagcagctttcaagcaacaccttatgtccctgagcaaaacggatatgggatggttttacagtatcctcctcctgtctttggttatcatcacaatgtccaagccgttcaatatccttatggttaccaattcacagcacaagtggctaacgtttcatggaacaatccgattatgcaacccaccggtttttactgtgctcctcctcatcctactactcctcccaccaacaatcttggttatatccaatacatgaacgggtttgatctttcgggtacgaacattaccgggtacaatcctctagcatgccctgtaacgggggatgcagctggtgcgctaatacatcagtttggagatttgaagcttgatgtccacagtcaagcccatcagagaatgaatggaggtaacatgggaataccattgcagaatggtacatatatatgacagttgcagttgcagaaataggctcacaaggctagtgaaattctttggactcttttaaatggttttttaggttcctcatctttcttcattaactcttttggtaaatgtgttggtttggtttggttaccttgtatattgtttaggtatttgattttaaccccaagacttatgtatcatatcttactgcatttgtaatatatcacactcatttcgttc

SEQ ID NO: 37558 - protein, 383 aa, Arabidopsis thaliana
  peptide (1)..(383): Ceres Seq. ID no. 12489537
  misc_feature (145)..(215): Pfam Name: RNA recognition motif. (a.k.a. RRM, RBD, or RNP domain) Pfam Description: RNA recognition motif. (a.k.a. RRM, RBD, or RNP
  misc_feature (145)..(215): Pfam Name: RNA recognition motif. (a.k.a. RRM, RBD, or RNP domain) Pfam Description: RNA recognition motif. (a.k.a. RRM, RBD, or RNP
  misc_feature (24)..(333): Homolog of NCBI NO: 15292697 NR Description: putative RNA-binding protein [Arabidopsis
  misc_feature (24)..(266): Homolog of NCBI NO: 38175737 NR Description: putative heterogeneous nuclear ribonucleoprotein
  misc_feature (24)..(269): Homolog of NCBI NO: 18423760 NR Description: heterogeneous nuclear ribonucleoprotein (hnRNP),
  misc_feature (24)..(269): Homolog of NCBI NO: 30696616 NR Description: RNA recognition motif (RRM)-containing protein
  misc_feature (24)..(269): Homolog of NCBI NO: 22531168 NR Description: RNA-binding protein-like [Arabidopsis thaliana]
  misc_feature (24)..(333): Homolog of NCBI NO: 15292697 NR Description: putative RNA-binding protein [Arabidopsis
  misc_feature (24)..(269): Homolog of NCBI NO: 18423760 NR Description: heterogeneous nuclear ribonucleoprotein (hnRNP),
  misc_feature (24)..(269): Homolog of NCBI NO: 22531168 NR Description: RNA-binding protein-like [Arabidopsis thaliana]
  misc_feature (24)..(383): Homolog of NCBI NO: 15217975 NR Description: RRM-containing RNA-binding protein, putative
  misc_feature (24)..(376): Homolog of NCBI NO: 25456498 NR Description: RNA binding protein [imported] - Arabidopsis
  misc_feature (27)..(269): Homolog of NCBI NO: 7487039 NR Description: hypothetical protein T15N24.100 - Arabidopsis
  misc_feature (27)..(269): Homolog of NCBI NO: 18416794 NR Description: heterogeneous nuclear ribonucleoprotein (hnRNP),
  misc_feature (24)..(269): Homolog of NCBI NO: 9758187 NR Description: RNA-binding protein-like [Arabidopsis thaliana]
  misc_feature (24)..(269): Homolog of NCBI NO: 30696616 NR Description: RNA recognition motif (RRM)-containing protein
  misc_feature (24)..(266): Homolog of NCBI NO: 38175737 NR Description: putative heterogeneous nuclear ribonucleoprotein
  misc_feature (24)..(269): Homolog of NCBI NO: 9758187 NR Description: RNA-binding protein-like [Arabidopsis thaliana]
  misc_feature (27)..(269): Homolog of NCBI NO: 18416794 NR Description: heterogeneous nuclear ribonucleoprotein (hnRNP),
  misc_feature (27)..(269): Homolog of NCBI NO: 7487039 NR Description: hypothetical protein T15N24.100 - Arabidopsis
  misc_feature (24)..(376): Homolog of NCBI NO: 25456498 NR Description: RNA binding protein [imported] - Arabidopsis
  misc_feature (24)..(383): Homolog of NCBI NO: 15217975 NR Description: RRM-containing RNA-binding protein, putative
IYCSLSYLGKNLRQTCKIRVFEDMDYDRYKLFVGGIAKETSEEALKHYFSRYGAVLEAVVAKEKVTGKPRGFGFVRFANDCDVVKALRDTHFILGKPVDVRKAIRKHEIYQQPFSMQFLERKMQQMNGGLREMSSNGVTHRSKKIFVGGLSSNTTEEEFKSYFERFGRTTDVVVMHDGVTNRPRGFGFVTYDSEDSVEVVMQSNFHELSDKRVEVKRAIPKEGIQSNNGNAVNVPPSYSSFQATPYVPEQNGYGMVLQYPPPVFGYHHNVQAVQYPYGYQFTAQVANVSWNNPIMQPTGFYCAPPHPTTPPTNNLGYIQYMNGFDLSGTNITGYNPLACPVTGDAAGALIHQFGDLKLDVHSQAHQRMNGGNMGIPLQNGTYI

SEQ ID NO: 37559 - protein, 360 aa, Arabidopsis thaliana
  peptide (1)..(360): Ceres Seq. ID no. 12489538
  misc_feature (122)..(192): Pfam Name: RNA recognition motif. (a.k.a. RRM, RBD, or RNP domain) Pfam Description: RNA recognition motif. (a.k.a. RRM, RBD, or RNP
  misc_feature (122)..(192): Pfam Name: RNA recognition motif. (a.k.a. RRM, RBD, or RNP domain) Pfam Description: RNA recognition motif. (a.k.a. RRM, RBD, or RNP
  misc_feature (1)..(310): Homolog of NCBI NO: 15292697 NR Description: putative RNA-binding protein [Arabidopsis
  misc_feature (1)..(243): Homolog of NCBI NO: 38175737 NR Description: putative heterogeneous nuclear ribonucleoprotein
  misc_feature (1)..(246): Homolog of NCBI NO: 18423760 NR Description: heterogeneous nuclear ribonucleoprotein (hnRNP),
  misc_feature (1)..(246): Homolog of NCBI NO: 22531168 NR Description: RNA-binding protein-like [Arabidopsis thaliana]
  misc_feature (1)..(246): Homolog of NCBI NO: 30696616 NR Description: RNA recognition motif (RRM)-containing protein
  misc_feature (1)..(310): Homolog of NCBI NO: 15292697 NR Description: putative RNA-binding protein [Arabidopsis
  misc_feature (1)..(246): Homolog of NCBI NO: 18423760 NR Description: heterogeneous nuclear ribonucleoprotein (hnRNP),
  misc_feature (1)..(246): Homolog of NCBI NO: 30696616 NR Description: RNA recognition motif (RRM)-containing protein
  misc_feature (1)..(360): Homolog of NCBI NO: 15217975 NR Description: RRM-containing RNA-binding protein, putative
  misc_feature (1)..(353): Homolog of NCBI NO: 25456498 NR Description: RNA binding protein [imported] - Arabidopsis
  misc_feature (4)..(246): Homolog of NCBI NO: 7487039 NR Description: hypothetical protein T15N24.100 - Arabidopsis
  misc_feature (4)..(246): Homolog of NCBI NO: 18416794 NR Description: heterogeneous nuclear ribonucleoprotein (hnRNP),
  misc_feature (1)..(246): Homolog of NCBI NO: 9758187 NR Description: RNA-binding protein-like [Arabidopsis thaliana]
  misc_feature (1)..(246): Homolog of NCBI NO: 22531168 NR Description: RNA-binding protein-like [Arabidopsis thaliana]
  misc_feature (1)..(243): Homolog of NCBI NO: 38175737 NR Description: putative heterogeneous nuclear ribonucleoprotein
  misc_feature (1)..(246): Homolog of NCBI NO: 9758187 NR Description: RNA-binding protein-like [Arabidopsis thaliana]
  misc_feature (4)..(246): Homolog of NCBI NO: 18416794 NR Description: heterogeneous nuclear ribonucleoprotein (hnRNP),
  misc_feature (4)..(246): Homolog of NCBI NO: 7487039 NR Description: hypothetical protein T15N24.100 - Arabidopsis
  misc_feature (1)..(353): Homolog of NCBI NO: 25456498 NR Description: RNA binding protein [imported] - Arabidopsis
  misc_feature (1)..(360): Homolog of NCBI NO: 15217975 NR Description: RRM-containing RNA-binding protein, putative
MDYDRYKLFVGGIAKETSEEALKHYFSRYGAVLEAVVAKEKVTGKPRGFGFVRFANDCDVVKALRDTHFILGKPVDVRKAIRKHEIYQQPFSMQFLERKMQQMNGGLREMSSNGVTHRSKKIFVGGLSSNTTEEEFKSYFERFGRTTDVVVMHDGVTNRPRGFGFVTYDSEDSVEVVMQSNFHELSDKRVEVKRAIPKEGIQSNNGNAVNVPPSYSSFQATPYVPEQNGYGMVLQYPPPVFGYHHNVQAVQYPYGYQFTAQVANVSWNNPIMQPTGFYCAPPHPTTPPTNNLGYIQYMNGFDLSGTNITGYNPLACPVTGDAAGALIHQFGDLKLDVHSQAHQRMNGGNMGIPLQNGTYI

SEQ ID NO: 37560 - protein, 268 aa, Arabidopsis thaliana
  peptide (1)..(268): Ceres Seq. ID no. 12489539
  misc_feature (30)..(100): Pfam Name: RNA recognition motif. (a.k.a. RRM, RBD, or RNP domain) Pfam Description: RNA recognition motif. (a.k.a. RRM, RBD, or RNP
  misc_feature (30)..(100): Pfam Name: RNA recognition motif. (a.k.a. RRM, RBD, or RNP domain) Pfam Description: RNA recognition motif. (a.k.a. RRM, RBD, or RNP
  misc_feature (1)..(218): Homolog of NCBI NO: 15292697 NR Description: putative RNA-binding protein [Arabidopsis
  misc_feature (1)..(151): Homolog of NCBI NO: 38175737 NR Description: putative heterogeneous nuclear ribonucleoprotein
  misc_feature (1)..(154): Homolog of NCBI NO: 18423760 NR Description: heterogeneous nuclear ribonucleoprotein (hnRNP),
  misc_feature (1)..(154): Homolog of NCBI NO: 22531168 NR Description: RNA-binding protein-like [Arabidopsis thaliana]
  misc_feature (1)..(154): Homolog of NCBI NO: 30696616 NR Description: RNA recognition motif (RRM)-containing protein
  misc_feature (1)..(218): Homolog of NCBI NO: 15292697 NR Description: putative RNA-binding protein [Arabidopsis
  misc_feature (1)..(154): Homolog of NCBI NO: 18423760 NR Description: heterogeneous nuclear ribonucleoprotein (hnRNP),
  misc_feature (1)..(154): Homolog of NCBI NO: 30696616 NR Description: RNA recognition motif (RRM)-containing protein
  misc_feature (1)..(268): Homolog of NCBI NO: 15217975 NR Description: RRM-containing RNA-binding protein, putative
  misc_feature (1)..(261): Homolog of NCBI NO: 25456498 NR Description: RNA binding protein [imported] - Arabidopsis
  misc_feature (1)..(154): Homolog of NCBI NO: 7487039 NR Description: hypothetical protein T15N24.100 - Arabidopsis
  misc_feature (1)..(154): Homolog of NCBI NO: 18416794 NR Description: heterogeneous nuclear ribonucleoprotein (hnRNP),
  misc_feature (1)..(154): Homolog of NCBI NO: 9758187 NR Description: RNA-binding protein-like [Arabidopsis thaliana]
  misc_feature (1)..(154): Homolog of NCBI NO: 22531168 NR Description: RNA-binding protein-like [Arabidopsis thaliana]
  misc_feature (1)..(151): Homolog of NCBI NO: 38175737 NR Description: putative heterogeneous nuclear ribonucleoprotein
  misc_feature (1)..(154): Homolog of NCBI NO: 9758187 NR Description: RNA-binding protein-like [Arabidopsis thaliana]
  misc_feature (1)..(154): Homolog of NCBI NO: 18416794 NR Description: heterogeneous nuclear ribonucleoprotein (hnRNP),
  misc_feature (1)..(154): Homolog of NCBI NO: 7487039 NR Description: hypothetical protein T15N24.100 - Arabidopsis
  misc_feature (1)..(261): Homolog of NCBI NO: 25456498 NR Description: RNA binding protein [imported] - Arabidopsis
  misc_feature (1)..(268): Homolog of NCBI NO: 15217975 NR Description: RRM-containing RNA-binding protein, putative
MQFLERKMQQMNGGLREMSSNGVTHRSKKIFVGGLSSNTTEEEFKSYFERFGRTTDVVVMHDGVTNRPRGFGFVTYDSEDSVEVVMQSNFHELSDKRVEVKRAIPKEGIQSNNGNAVNVPPSYSSFQATPYVPEQNGYGMVLQYPPPVFGYHHNVQAVQYPYGYQFTAQVANVSWNNPIMQPTGFYCAPPHPTTPPTNNLGYIQYMNGFDLSGTNITGYNPLACPVTGDAAGALIHQFGDLKLDVHSQAHQRMNGGNMGIPLQNGTYI

SEQ ID NO: 37561 - DNA, 1146 bp, Arabidopsis thaliana
  misc_feature (1)..(1146): Ceres Seq. ID no. 12327345
  misc_feature: MA Experiment ID: 108572 Result: Down-regulated in Transcription
  misc_feature: MA Experiment 108572 PARAMETER Experiment Name: At_Drought_cDNA_P Parameter: Timepoint (hr) Value: 1
  misc_feature: MA Experiment 108572 PARAMETER Experiment Name: At_Drought_cDNA_P Parameter: Tissue Value: Aerial
  misc_feature: MA Experiment 108572 PARAMETER Experiment Name: At_Drought_cDNA_P Parameter: Treatment Value: Drought vs. No Drought
  misc_feature: MA Experiment ID: 108573 Result: Down-regulated in Transcription
  misc_feature: MA Experiment 108573 PARAMETER Experiment Name: At_Drought_cDNA_P Parameter: Timepoint (hr) Value: 6
  misc_feature: MA Experiment 108573 PARAMETER Experiment Name: At_Drought_cDNA_P Parameter: Tissue Value: Aerial
  misc_feature: MA Experiment 108573 PARAMETER Experiment Name: At_Drought_cDNA_P Parameter: Treatment Value: Drought vs. No Drought
  misc_feature: MA Experiment ID: 108577 Result: Down-regulated in Transcription
  misc_feature: MA Experiment 108577 PARAMETER Experiment Name: At_42deg_Heat_cDNA_P Parameter: Temperature (deg C) Value: 42 vs. 22
  misc_feature: MA Experiment 108577 PARAMETER Experiment Name: At_42deg_Heat_cDNA_P Parameter: Timepoint (hr) Value: 6
  misc_feature: MA Experiment 108577 PARAMETER Experiment Name: At_42deg_Heat_cDNA_P Parameter: Tissue Value: Aerial
  misc_feature: MA Experiment ID: 108595 Result: Up-regulated in Transcription
  misc_feature: MA Experiment 108595 PARAMETER Experiment Name: At_Ler-pi_Ovule_cDNA_P Parameter: Plant Line Value: null
  misc_feature: MA Experiment ID: 108608 Result: Down-regulated in Transcription
  misc_feature: MA Experiment 108608 PARAMETER Experiment Name: At_100uM_ABA_cDNA_P Parameter: Timepoint (hr) Value: 1
  misc_feature: MA Experiment 108608 PARAMETER Experiment Name: At_100uM_ABA_cDNA_P Parameter: Tissue Value: Aerial
  misc_feature: MA Experiment 108608 PARAMETER Experiment Name: At_100uM_ABA_cDNA_P Parameter: Treatment Value: 100uM ABA vs. No Treatment
  misc_feature: MA Experiment ID: 20000111 Result: Down-regulated in Transcription
  misc_feature: MA Experiment 20000111 PARAMETER Experiment Name: At_42deg_Heat_cDNA_P Parameter: Temperature (deg C) Value: 42 vs. 22
  misc_feature: MA Experiment 20000111 PARAMETER Experiment Name: At_42deg_Heat_cDNA_P Parameter: Timepoint (hr) Value: 6
  misc_feature: MA Experiment 20000111 PARAMETER Experiment Name: At_42deg_Heat_cDNA_P Parameter: Tissue Value: Aerial
  misc_feature: MA Experiment ID: 20000113 Result: Down-regulated in Transcription
  misc_feature: MA Experiment 20000113 PARAMETER Experiment Name: At_42deg_Heat_cDNA_P Parameter: Temperature (deg C) Value: 42 vs. 22
  misc_feature: MA Experiment 20000113 PARAMETER Experiment Name: At_42deg_Heat_cDNA_P Parameter: Timepoint (hr) Value: 8
  misc_feature: MA Experiment 20000113 PARAMETER Experiment Name: At_42deg_Heat_cDNA_P Parameter: Tissue Value: Aerial
  misc_feature: MA Experiment ID: 20000166 Result: Down-regulated in Transcription
  misc_feature: MA Experiment 20000166 PARAMETER Experiment Name: At_100uM_ABA_P Parameter: Age (day) Value: 14
  misc_feature: MA Experiment 20000166 PARAMETER Experiment Name: At_100uM_ABA_P Parameter: Organism Value: A. thaliana
  misc_feature: MA Experiment 20000166 PARAMETER Experiment Name: At_100uM_ABA_P Parameter: Plant Line Value: WS
  misc_feature: MA Experiment 20000166 PARAMETER Experiment Name: At_100uM_ABA_P Parameter: Timepoint (hr) Value: 1
  misc_feature: MA Experiment 20000166 PARAMETER Experiment Name: At_100uM_ABA_P Parameter: Tissue Value: Aerial
  misc_feature: MA Experiment 20000166 PARAMETER Experiment Name: At_100uM_ABA_P Parameter: Treatment Value: 100uM ABA vs. No Treatment
  misc_feature: MA Experiment ID: 20000173 Result: Down-regulated in Transcription
  misc_feature: MA Experiment 20000173 PARAMETER Experiment Name: At_42deg_Heat_P Parameter: Age (day) Value: 14
  misc_feature: MA Experiment 20000173 PARAMETER Experiment Name: At_42deg_Heat_P Parameter: Organism Value: A. thaliana
  misc_feature: MA Experiment 20000173 PARAMETER Experiment Name: At_42deg_Heat_P Parameter: Plant Line Value: WS
  misc_feature: MA Experiment 20000173 PARAMETER Experiment Name: At_42deg_Heat_P Parameter: Temperature (deg C) Value: 42 vs. 22
  misc_feature: MA Experiment 20000173 PARAMETER Experiment Name: At_42deg_Heat_P Parameter: Timepoint (hr) Value: 6
  misc_feature: MA Experiment 20000173 PARAMETER Experiment Name: At_42deg_Heat_P Parameter: Tissue Value: Aerial
  misc_feature: MA Experiment ID: 20000185 Result: Down-regulated in Transcription
  misc_feature: MA Experiment 20000185 PARAMETER Experiment Name: At_Roots__P Parameter: Age (day) Value: 7 vs. 21
  misc_feature: MA Experiment 20000185 PARAMETER Experiment Name: At_Roots__P Parameter: Organism Value: A. thaliana
  misc_feature: MA Experiment 20000185 PARAMETER Experiment Name: At_Roots__P Parameter: Tissue Value: Roots vs. Whole Plant
  misc_feature: MA Experiment ID: 20000234 Result: Up-regulated in Transcription
  misc_feature: MA Experiment 20000234 PARAMETER Experiment Name: At_Siliques_P Parameter: Age (day) Value: 21
  misc_feature: MA Experiment 20000234 PARAMETER Experiment Name: At_Siliques_P Parameter: Organism Value: A. thaliana
  misc_feature: MA Experiment 20000234 PARAMETER Experiment Name: At_Siliques_P Parameter: Plant Line Value: WS
  misc_feature: MA Experiment 20000234 PARAMETER Experiment Name: At_Siliques_P Parameter: Tissue Value: Less Than 5mm Siliques vs. Whole Plant
  misc_feature: MA Experiment ID: 20000286 Result: Up-regulated in Transcription
  misc_feature: MA Experiment 20000286 PARAMETER Experiment Name: At_Open_Flower_P Parameter: Age (day) Value: 21
  misc_feature: MA Experiment 20000286 PARAMETER Experiment Name: At_Open_Flower_P Parameter: Plant Line Value: WS
  misc_feature: MA Experiment 20000286 PARAMETER Experiment Name: At_Open_Flower_P Parameter: Tissue Value: Half Open vs. Whole Plant
  misc_feature: MA Experiment ID: 20000527 Result: Down-regulated in Transcription
  misc_feature: MA Experiment 20000527 PARAMETER Experiment Name: At_10percent_PEG_P Parameter: Age (day) Value: 20
  misc_feature: MA Experiment 20000527 PARAMETER Experiment Name: At_10percent_PEG_P Parameter: Organism Value: A. thaliana
  misc_feature: MA Experiment 20000527 PARAMETER Experiment Name: At_10percent_PEG_P Parameter: Plant Line Value: WS
  misc_feature: MA Experiment 20000527 PARAMETER Experiment Name: At_10percent_PEG_P Parameter: Timepoint (day) Value: 20
  misc_feature: MA Experiment 20000527 PARAMETER Experiment Name: At_10percent_PEG_P Parameter: Tissue Value: Whole Plant
  misc_feature: MA Experiment 20000527 PARAMETER Experiment Name: At_10percent_PEG_P Parameter: Treatment Value: 10percent PEG vs. No Treatment
  misc_feature: MA Experiment ID: 20000709 Result: Down-regulated in Transcription
  misc_feature: MA Experiment 20000709 PARAMETER Experiment Name: At_15mM_NH4NO3_L-to-H_P Parameter: Age (hr) Value: 14
  misc_feature: MA Experiment 20000709 PARAMETER Experiment Name: At_15mM_NH4NO3_L-to-H_P Parameter: Organism Value: A. thaliana
  misc_feature: MA Experiment 20000709 PARAMETER Experiment Name: At_15mM_NH4NO3_L-to-H_P Parameter: Plant Line Value: WS
  misc_feature: MA Experiment 20000709 PARAMETER Experiment Name: At_15mM_NH4NO3_L-to-H_P Parameter: Timepoint (hr) Value: 4
  misc_feature: MA Experiment 20000709 PARAMETER Experiment Name: At_15mM_NH4NO3_L-to-H_P Parameter: Tissue Value: Aerial
  misc_feature: MA Experiment 20000709 PARAMETER Experiment Name: At_15mM_NH4NO3_L-to-H_P Parameter: Treatment Value: 15mM NH4NO3 vs. 30mM Mannitol
  misc_feature: MA Experiment ID: 20001248 Result: Up-regulated in Transcription
  misc_feature: MA Experiment 20001248 PARAMETER Experiment Name: At_Far-red-induction_P Parameter: Age (day) Value: 7
  misc_feature: MA Experiment 20001248 PARAMETER Experiment Name: At_Far-red-induction_P Parameter: Light Value: Far-red vs. White
  misc_feature: MA Experiment 20001248 PARAMETER Experiment Name: At_Far-red-induction_P Parameter: Organism Value: A. thaliana
  misc_feature: MA Experiment 20001248 PARAMETER Experiment Name: At_Far-red-induction_P Parameter: Plant Line Value: Columbia
  misc_feature: MA Experiment 20001248 PARAMETER Experiment Name: At_Far-red-induction_P Parameter: Timepoint (hr) Value: 4
  misc_feature: MA Experiment 20001248 PARAMETER Experiment Name: At_Far-red-induction_P Parameter: Tissue Value: Whole Plant
  misc_feature: MA Experiment ID: 20001451 Result: Down-regulated in Transcription
  misc_feature: MA Experiment 20001451 PARAMETER Experiment Name: At_Far-red-induction_P Parameter: Age (day) Value: 7
  misc_feature: MA Experiment 20001451 PARAMETER Experiment Name: At_Far-red-induction_P Parameter: Light Value: Far-red vs. White
  misc_feature: MA Experiment 20001451 PARAMETER Experiment Name: At_Far-red-induction_P Parameter: Organism Value: A. thaliana
  misc_feature: MA Experiment 20001451 PARAMETER Experiment Name: At_Far-red-induction_P Parameter: Plant Line Value: Columbia
  misc_feature: MA Experiment 20001451 PARAMETER Experiment Name: At_Far-red-induction_P Parameter: Timepoint (hr) Value: 24
  misc_feature: MA Experiment 20001451 PARAMETER Experiment Name: At_Far-red-induction_P Parameter: Tissue Value: Whole Plant
  misc_feature: MA Experiment ID: 20001557 Result: Up-regulated in Transcription
  misc_feature: MA Experiment 20001557 PARAMETER Experiment Name: At_Drought_Soil_Dry_P Parameter: Age (day) Value: 27
  misc_feature: MA Experiment 20001557 PARAMETER Experiment Name: At_Drought_Soil_Dry_P Parameter: Organism Value: A. thaliana
  misc_feature: MA Experiment 20001557 PARAMETER Experiment Name: At_Drought_Soil_Dry_P Parameter: Plant Line Value: WS
  misc_feature: MA Experiment 20001557 PARAMETER Experiment Name: At_Drought_Soil_Dry_P Parameter: Post Timepoint (hr) Value: 3
  misc_feature: MA Experiment 20001557 PARAMETER Experiment Name: At_Drought_Soil_Dry_P Parameter: Post-Treatment Value: Re-Water vs. No Drought
  misc_feature: MA Experiment 20001557 PARAMETER Experiment Name: At_Drought_Soil_Dry_P Parameter: Timepoint (day) Value: 13
  misc_feature: MA Experiment 20001557 PARAMETER Experiment Name: At_Drought_Soil_Dry_P Parameter: Treatment Value: Drought vs. No Drought
  misc_feature: MA Experiment ID: 20001905 Result: Down-regulated in Transcription
  misc_feature: MA Experiment 20001905 PARAMETER Experiment Name: At_Drought_Reproduction_P Parameter: Age (day) Value: 40
  misc_feature: MA Experiment 20001905 PARAMETER Experiment Name: At_Drought_Reproduction_P Parameter: Organism Value: A. thaliana
  misc_feature: MA Experiment 20001905 PARAMETER Experiment Name: At_Drought_Reproduction_P Parameter: Plant Line Value: WS
  misc_feature: MA Experiment 20001905 PARAMETER Experiment Name: At_Drought_Reproduction_P Parameter: Timepoint (day) Value: 10
  misc_feature: MA Experiment 20001905 PARAMETER Experiment Name: At_Drought_Reproduction_P Parameter: Tissue Value: Rosettes
  misc_feature: MA Experiment 20001905 PARAMETER Experiment Name: At_Drought_Reproduction_P Parameter: Treatment Value: Drought vs. No Drought
aactttctcctcagggtatgctccaaattcccaacttggcctctctttttcatcttttgggtttttatgttcactcttctctgcttcattcctctttctacttccaggaaataaaaacttctaatcaaagagcaagagattaagaaatgtatgcagaaactagcttagctttccgattcatgcagagttcttcttctccagagattcaccaatttgaagacctctttaaatcctacaagctctctgatgaaatgaacaatcttgttgaggcaagtgagtatgattttggagaagagagtgacctattcaaagcccctgagccgattattgaagaaccaatgttagctgttgatcccctctctcaagagcttgttgaactcggtgatctcgggtcgttgcagagtgaccaacagcttatagacaaggctttctacgactgtgagcaggacctcctggtgaaatcagccatggagtctccgctctccgaggtactagacatcaagaacatctctttagtggcaaaaatggacaacgatgtgaagagtacgagtgtagtcgtctctgatgtcccaattccgaagagtgtgagctcgggaaacttgagctcaatggatatggtcgagcacaaggatgcggtgattcagggattccctgatttccctccagtggattatgggatgagaagagccttcagtgaaagcgatatacagacactggggactggaaatacgggtcttgttcagtctcagttggatcgaataatcataagttgcacctctgaggaccgccgtgagaagctttctcgatacaggaacaagaagagcaagcgaaatttcgggcgtaaaatcaagtatgcttgtaggaaggcacttgcagacagtcaaccgaggatccgaggaaggtttgcaaaaacagaggagatgcagaaatgatgaggactagttaggtctgatgcggtgttaagaatataatcccacccacctctcgttttgtatataagggggtttgtctgaataagcctagtaaggagtaaggattaggaagaaaaaacaagttgtagtagtcagtcactcaagtaatgatgcttatatatgttagatcttgtgaagttatgtatctctaaaagtttatatatagaagctgttt

SEQ ID NO: 37562 - protein, 261 aa, Arabidopsis thaliana
  peptide (1)..(261): Ceres Seq. ID no. 12327346
  misc_feature (219)..(258): Pfam Name: CCT motif Pfam Description: CCT motif
  misc_feature (196)..(258): Homolog of NCBI NO: 15225838 NR Description: hypothetical protein; protein id: At2g33350.1
  misc_feature (210)..(259): Homolog of NCBI NO: 15222540 NR Description: hypothetical protein; protein id: At1g63820.1
  misc_feature (178)..(261): Homolog of NCBI NO: 15238070 NR Description: putative protein; protein id: At5g41380.1
  misc_feature (170)..(261): Homolog of NCBI NO: 15238589 NR Description: putative protein; protein id: At5g59990.1
  misc_feature (190)..(258): Homolog of NCBI NO: 26451419 NR Description: unknown protein [Arabidopsis thaliana]
  misc_feature (36)..(258): Homolog of NCBI NO: 21536819 NR Description: unknown [Arabidopsis thaliana]
  misc_feature (1)..(258): Homolog of NCBI NO: 8843771 NR Description: gene_id:MYN8.3~pir||T02891~similar to unknown
  misc_feature (1)..(258): Homolog of NCBI NO: 18423511 NR Description: putative protein
  misc_feature (36)..(261): Homolog of NCBI NO: 21593708 NR Description: unknown [Arabidopsis thaliana]
  misc_feature (1)..(261): Homolog of NCBI NO: 15234310 NR Description: putative protein
MYAETSLAFRFMQSSSSPEIHQFEDLFKSYKLSDEMNNLVEASEYDFGEESDLFKAPEPIIEEPMLAVDPLSQELVELGDLGSLQSDQQLIDKAFYDCEQDLLVKSAMESPLSEVLDIKNISLVAKMDNDVKSTSVVVSDVPIPKSVSSGNLSSMDMVEHKDAVIQGFPDFPPVDYGMRRAFSESDIQTLGTGNTGLVQSQLDRIIISCTSEDRREKLSRYRNKKSKRNFGRKIKYACRKALADSQPRIRGRFAKTEEMQK

SEQ ID NO: 37563 - protein, 250 aa, Arabidopsis thaliana
  peptide (1)..(250): Ceres Seq. ID no. 12327347
  misc_feature (208)..(247): Pfam Name: CCT motif Pfam Description: CCT motif
  misc_feature (185)..(247): Homolog of NCBI NO: 15225838 NR Description: hypothetical protein; protein id: At2g33350.1
  misc_feature (199)..(248): Homolog of NCBI NO: 15222540 NR Description: hypothetical protein; protein id: At1g63820.1
  misc_feature (167)..(250): Homolog of NCBI NO: 15238070 NR Description: putative protein; protein id: At5g41380.1
  misc_feature (159)..(250): Homolog of NCBI NO: 15238589 NR Description: putative protein; protein id: At5g59990.1
  misc_feature (179)..(247): Homolog of NCBI NO: 26451419 NR Description: unknown protein [Arabidopsis thaliana]
  misc_feature (25)..(247): Homolog of NCBI NO: 21536819 NR Description: unknown [Arabidopsis thaliana]
  misc_feature (1)..(247): Homolog of NCBI NO: 8843771 NR Description: gene_id:MYN8.3~pir||T02891~similar to unknown
  misc_feature (1)..(247): Homolog of NCBI NO: 18423511 NR Description: putative protein
  misc_feature (25)..(250): Homolog of NCBI NO: 21593708 NR Description: unknown [Arabidopsis thaliana]
  misc_feature (1)..(250): Homolog of NCBI NO: 15234310 NR Description: putative protein
MQSSSSPEIHQFEDLFKSYKLSDEMNNLVEASEYDFGEESDLFKAPEPIIEEPMLAVDPLSQELVELGDLGSLQSDQQLIDKAFYDCEQDLLVKSAMESPLSEVLDIKNISLVAKMDNDVKSTSVVVSDVPIPKSVSSGNLSSMDMVEHKDAVIQGFPDFPPVDYGMRRAFSESDIQTLGTGNTGLVQSQLDRIIISCTSEDRREKLSRYRNKKSKRNFGRKIKYACRKALADSQPRIRGRFAKTEEMQK

SEQ ID NO: 37564 - protein, 226 aa, Arabidopsis thaliana
  peptide (1)..(226): Ceres Seq. ID no. 12327348
  misc_feature (184)..(223): Pfam Name: CCT motif Pfam Description: CCT motif
  misc_feature (161)..(223): Homolog of NCBI NO: 15225838 NR Description: hypothetical protein; protein id: At2g33350.1
  misc_feature (175)..(224): Homolog of NCBI NO: 15222540 NR Description: hypothetical protein; protein id: At1g63820.1
  misc_feature (143)..(226): Homolog of NCBI NO: 15238070 NR Description: putative protein; protein id: At5g41380.1
  misc_feature (135)..(226): Homolog of NCBI NO: 15238589 NR Description: putative protein; protein id: At5g59990.1
  misc_feature (155)..(223): Homolog of NCBI NO: 26451419 NR Description: unknown protein [Arabidopsis thaliana]
  misc_feature (1)..(223): Homolog of NCBI NO: 21536819 NR Description: unknown [Arabidopsis thaliana]
  misc_feature (1)..(223): Homolog of NCBI NO: 8843771 NR Description: gene_id:MYN8.3~pir||T02891~similar to unknown
  misc_feature (1)..(223): Homolog of NCBI NO: 18423511 NR Description: putative protein
  misc_feature (1)..(226): Homolog of NCBI NO: 21593708 NR Description: unknown [Arabidopsis thaliana]
  misc_feature (1)..(226): Homolog of NCBI NO: 15234310 NR Description: putative protein
MNNLVEASEYDFGEESDLFKAPEPIIEEPMLAVDPLSQELVELGDLGSLQSDQQLIDKAFYDCEQDLLVKSAMESPLSEVLDIKNISLVAKMDNDVKSTSVVVSDVPIPKSVSSGNLSSMDMVEHKDAVIQGFPDFPPVDYGMRRAFSESDIQTLGTGNTGLVQSQLDRIIISCTSEDRREKLSRYRNKKSKRNFGRKIKYACRKALADSQPRIRGRFAKTEEMQK

SEQ ID NO: 37565 - DNA, 1169 bp, Arabidopsis thaliana
  misc_feature (1)..(1169): Ceres Seq. ID no. 12322221
  misc_feature: MA Experiment ID: 108434 Result: Up-regulated in Transcription
  misc_feature: MA Experiment 108434 PARAMETER Experiment Name: At_Root_Tips_cDNA_P Parameter: Tissue Value: Root Tips
  misc_feature: MA Experiment ID: 108464 Result: Down-regulated in Transcription
  misc_feature: MA Experiment 108464 PARAMETER Experiment Name: At_Germinating_Seeds_cDNA_P Parameter: Age (day) Value: 4 vs. 0
  misc_feature: MA Experiment 108464 PARAMETER Experiment Name: At_Germinating_Seeds_cDNA_P Parameter: Tissue Value: Germinating Seeds
  misc_feature: MA Experiment ID: 108488 Result: Up-regulated in Transcription
  misc_feature: MA Experiment ID: 108561 Result: Down-regulated in Transcription
  misc_feature: MA Experiment 108561 PARAMETER Experiment Name: At_100uM_ABA_cDNA_P Parameter: Timepoint (hr) Value: 6
  misc_feature: MA Experiment 108561 PARAMETER Experiment Name: At_100uM_ABA_cDNA_P Parameter: Tissue Value: Aerial
  misc_feature: MA Experiment 108561 PARAMETER Experiment Name: At_100uM_ABA_cDNA_P Parameter: Treatment Value: 100uM ABA vs. No Treatment
  misc_feature: MA Experiment ID: 108573 Result: Down-regulated in Transcription
  misc_feature: MA Experiment 108573 PARAMETER Experiment Name: At_Drought_cDNA_P Parameter: Timepoint (hr) Value: 6
  misc_feature: MA Experiment 108573 PARAMETER Experiment Name: At_Drought_cDNA_P Parameter: Tissue Value: Aerial
  misc_feature: MA Experiment 108573 PARAMETER Experiment Name: At_Drought_cDNA_P Parameter: Treatment Value: Drought vs. No Drought
  misc_feature: MA Experiment ID: 108585 Result: Down-regulated in Transcription
  misc_feature: MA Experiment 108585 PARAMETER Experiment Name: At_5mM_NaNP_cDNA_P Parameter: Timepoint (hr) Value: 6
  misc_feature: MA Experiment 108585 PARAMETER Experiment Name: At_5mM_NaNP_cDNA_P Parameter: Tissue Value: Aerial
  misc_feature: MA Experiment 108585 PARAMETER Experiment Name: At_5mM_NaNP_cDNA_P Parameter: Treatment Value: null
  misc_feature: MA Experiment ID: 108595 Result: Down-regulated in Transcription
  misc_feature: MA Experiment 108595 PARAMETER Experiment Name: At_Ler-pi_Ovule_cDNA_P Parameter: Plant Line Value: null
  misc_feature: MA Experiment ID: 108605 Result: Down-regulated in Transcription
  misc_feature: MA Experiment 108605 PARAMETER Experiment Name: At_100uM_ABA_cDNA_P Parameter: Timepoint (hr) Value: 6
  misc_feature: MA Experiment 108605 PARAMETER Experiment Name: At_100uM_ABA_cDNA_P Parameter: Tissue Value: Aerial
  misc_feature: MA Experiment 108605 PARAMETER Experiment Name: At_100uM_ABA_cDNA_P Parameter: Treatment Value: 100uM ABA vs. No Treatment
  misc_feature: MA Experiment ID: 108668 Result: Down-regulated in Transcription
  misc_feature: MA Experiment 108668 PARAMETER Experiment Name: At_2mM_SA_cDNA_P Parameter: Plant Line Value: WS
  misc_feature: MA Experiment 108668 PARAMETER Experiment Name: At_2mM_SA_cDNA_P Parameter: Timepoint (hr) Value: 6
  misc_feature: MA Experiment 108668 PARAMETER Experiment Name: At_2mM_SA_cDNA_P Parameter: Treatment Value: 2mM SA vs. No Treatment
  misc_feature: MA Experiment ID: 20000070 Result: Down-regulated in Transcription
  misc_feature: MA Experiment 20000070 PARAMETER Experiment Name: At_100uM_ABA_Mutants_cDNA_P Parameter: Plant Line Value: CS24
  misc_feature: MA Experiment 20000070 PARAMETER Experiment Name: At_100uM_ABA_Mutants_cDNA_P Parameter: Timepoint (hr) Value: 6
  misc_feature: MA Experiment 20000070 PARAMETER Experiment Name: At_100uM_ABA_Mutants_cDNA_P Parameter: Tissue Value: Aerial
  misc_feature: MA Experiment 20000070 PARAMETER Experiment Name: At_100uM_ABA_Mutants_cDNA_P Parameter: Treatment Value: 100uM ABA vs. No Treatment
  misc_feature: MA Experiment ID: 20000071 Result: Down-regulated in Transcription
  misc_feature: MA Experiment 20000071 PARAMETER Experiment Name: At_100uM_ABA_Mutants_cDNA_P Parameter: Plant Line Value: CS8104
  misc_feature: MA Experiment 20000071 PARAMETER Experiment Name: At_100uM_ABA_Mutants_cDNA_P Parameter: Timepoint (hr) Value: 6
  misc_feature: MA Experiment 20000071 PARAMETER Experiment Name: At_100uM_ABA_Mutants_cDNA_P Parameter: Tissue Value: Aerial
  misc_feature: MA Experiment 20000071 PARAMETER Experiment Name: At_100uM_ABA_Mutants_cDNA_P Parameter: Treatment Value: 100uM ABA vs. No Treatment
  misc_feature: MA Experiment ID: 20000117 Result: Down-regulated in Transcription
  misc_feature: MA Experiment 20000117 PARAMETER Experiment Name: At_100uM_ABA_Mutants_cDNA_P Parameter: Plant Line Value: Columbia
  misc_feature: MA Experiment 20000117 PARAMETER Experiment Name: At_100uM_ABA_Mutants_cDNA_P Parameter: Timepoint (hr) Value: 6
  misc_feature: MA Experiment 20000117 PARAMETER Experiment Name: At_100uM_ABA_Mutants_cDNA_P Parameter: Tissue Value: Aerial
  misc_feature: MA Experiment 20000117 PARAMETER Experiment Name: At_100uM_ABA_Mutants_cDNA_P Parameter: Treatment Value: 100uM ABA vs. No Treatment
  misc_feature: MA Experiment ID: 20000182 Result: Down-regulated in Transcription
  misc_feature: MA Experiment 20000182 PARAMETER Experiment Name: At_2mM_SA_P Parameter: Age (day) Value: 14
  misc_feature: MA Experiment 20000182 PARAMETER Experiment Name: At_2mM_SA_P Parameter: Organism Value: A. thaliana
  misc_feature: MA Experiment 20000182 PARAMETER Experiment Name: At_2mM_SA_P Parameter: Plant Line Value: WS
  misc_feature: MA Experiment 20000182 PARAMETER Experiment Name: At_2mM_SA_P Parameter: Timepoint (hr) Value: 6
  misc_feature: MA Experiment 20000182 PARAMETER Experiment Name: At_2mM_SA_P Parameter: Tissue Value: Aerial
  misc_feature: MA Experiment 20000182 PARAMETER Experiment Name: At_2mM_SA_P Parameter: Treatment Value: 2mM SA vs. No Treatment
  misc_feature: MA Experiment ID: 20000185 Result: Down-regulated in Transcription
  misc_feature: MA Experiment 20000185 PARAMETER Experiment Name: At_Roots__P Parameter: Age (day) Value: 7 vs. 21
  misc_feature: MA Experiment 20000185 PARAMETER Experiment Name: At_Roots__P Parameter: Organism Value: A. thaliana
  misc_feature: MA Experiment 20000185 PARAMETER Experiment Name: At_Roots__P Parameter: Tissue Value: Roots vs. Whole Plant
  misc_feature: MA Experiment ID: 20000224 Result: Up-regulated in Transcription
  misc_feature: MA Experiment ID: 20000436 Result: Down-regulated in Transcription
  misc_feature: MA Experiment 20000436 PARAMETER Experiment Name: At_Drought_P Parameter: Age (day) Value: 7
  misc_feature: MA Experiment 20000436 PARAMETER Experiment Name: At_Drought_P Parameter: Organism Value: A. thaliana
  misc_feature: MA Experiment 20000436 PARAMETER Experiment Name: At_Drought_P Parameter: Plant Line Value: WS
  misc_feature: MA Experiment 20000436 PARAMETER Experiment Name: At_Drought_P Parameter: Timepoint (hr) Value: 12
  misc_feature: MA Experiment 20000436 PARAMETER Experiment Name: At_Drought_P Parameter: Tissue Value: Whole Plant
  misc_feature: MA Experiment 20000436 PARAMETER Experiment Name: At_Drought_P Parameter: Treatment Value: Drought vs. No Drought
  misc_feature: MA Experiment ID: 20000437 Result: Down-regulated in Transcription
  misc_feature: MA Experiment 20000437 PARAMETER Experiment Name: At_Drought_P Parameter: Age (day) Value: 8
  misc_feature: MA Experiment 20000437 PARAMETER Experiment Name: At_Drought_P Parameter: Organism Value: A. thaliana
  misc_feature: MA Experiment 20000437 PARAMETER Experiment Name: At_Drought_P Parameter: Plant Line Value: WS
  misc_feature: MA Experiment 20000437 PARAMETER Experiment Name: At_Drought_P Parameter: Timepoint (hr) Value: 24
  misc_feature: MA Experiment 20000437 PARAMETER Experiment Name: At_Drought_P Parameter: Tissue Value: Whole Plant
  misc_feature: MA Experiment 20000437 PARAMETER Experiment Name: At_Drought_P Parameter: Treatment Value: Drought vs. No Drought
  misc_feature: MA Experiment ID: 20000439 Result: Down-regulated in Transcription
  misc_feature: MA Experiment 20000439 PARAMETER Experiment Name: At_Roots__P Parameter: Age (day) Value: 14 vs. 21
  misc_feature: MA Experiment 20000439 PARAMETER Experiment Name: At_Roots__P Parameter: Organism Value: A. thaliana
  misc_feature: MA Experiment 20000439 PARAMETER Experiment Name: At_Roots__P Parameter: Tissue Value: Roots vs. Whole Plant
  misc_feature: MA Experiment ID: 20000794 Result: Down-regulated in Transcription
  misc_feature: MA Experiment 20000794 PARAMETER Experiment Name: At_Petals_P Parameter: Age (day) Value: 23-25 days
  misc_feature: MA Experiment 20000794 PARAMETER Experiment Name: At_Petals_P Parameter: Plant Line Value: WS
  misc_feature: MA Experiment 20000794 PARAMETER Experiment Name: At_Petals_P Parameter: Tissue Value: Petals vs. Whole plant
  misc_feature: MA Experiment ID: 20001450 Result: Down-regulated in Transcription
  misc_feature: MA Experiment 20001450 PARAMETER Experiment Name: At_Far-red-induction_P Parameter: Age (day) Value: 7
  misc_feature: MA Experiment 20001450 PARAMETER Experiment Name: At_Far-red-induction_P Parameter: Light Value: Far-red vs. White
  misc_feature: MA Experiment 20001450 PARAMETER Experiment Name: At_Far-red-induction_P Parameter: Organism Value: A. thaliana
  misc_feature: MA Experiment 20001450 PARAMETER Experiment Name: At_Far-red-induction_P Parameter: Plant Line Value: Columbia
  misc_feature: MA Experiment 20001450 PARAMETER Experiment Name: At_Far-red-induction_P Parameter: Timepoint (hr) Value: 8
  misc_feature: MA Experiment 20001450 PARAMETER Experiment Name: At_Far-red-induction_P Parameter: Tissue Value: Whole Plant
  misc_feature: MA Experiment ID: 20001757 Result: Up-regulated in Transcription
  misc_feature: MA Experiment 20001757 PARAMETER Experiment Name: At_50mM_NH4NO3_L-to-H_P Parameter: Timepoint (hr) Value: 6
  misc_feature: MA Experiment 20001757 PARAMETER Experiment Name: At_50mM_NH4NO3_L-to-H_P Parameter: Tissue Value: Leaf
  misc_feature: MA Experiment 20001757 PARAMETER Experiment Name: At_50mM_NH4NO3_L-to-H_P Parameter: Treatment Value: 50mM NH4NO3 vs 100mM Mannitol
  misc_feature: MA Experiment ID: 20001905 Result: Down-regulated in Transcription
  misc_feature: MA Experiment 20001905 PARAMETER Experiment Name: At_Drought_Reproduction_P Parameter: Age (day) Value: 40
  misc_feature: MA Experiment 20001905 PARAMETER Experiment Name: At_Drought_Reproduction_P Parameter: Organism Value: A. thaliana
  misc_feature: MA Experiment 20001905 PARAMETER Experiment Name: At_Drought_Reproduction_P Parameter: Plant Line Value: WS
  misc_feature: MA Experiment 20001905 PARAMETER Experiment Name: At_Drought_Reproduction_P Parameter: Timepoint (day) Value: 10
  misc_feature: MA Experiment 20001905 PARAMETER Experiment Name: At_Drought_Reproduction_P Parameter: Tissue Value: Rosettes
  misc_feature: MA Experiment 20001905 PARAMETER Experiment Name: At_Drought_Reproduction_P Parameter: Treatment Value: Drought vs. No Drought
gttgcgttattcttctggataagagcttcgtgatggtttgaaacctctgagtgaagaagaagcgccatggctgggattaccagcagcaccgttggattcaacgccgtcttcaccggaataaccaaaacagtatcatcacattcactcttctctgttgattccaaactctgtagtcttcgtctctccaaaaccgaactgtctttcactaatctcactccttctcctcgccgtgctttcgccgtcacttgccgcttcggcggtggtggtggaggttatcgattctctggagacaatagaagaggtaggccgaaagaagctgaaattgatgaagctcttgatatctcctcaattaggtcagctactgttaggcttatcgatgggcaacaaaacatgcttggtttagtgtctaaagacgaagccgttcgaatggctgatgatgctgaacttgatctggttatactatcgcctgatgcagatcctccggttgttaaaatgatggactacagtaaatacagatacgaacagcaaaagaggaaaaaagatcagcaaaagaaaacaactcgcatggatttaaaggagcttaaaatgggttataatattgatcagcatgattattccgttcgtctaagggctgcccaaaagttcttgcaagatggtgacaaggttaaggtgattgtgagcatgaaaggacgagaaaacgagttcagaaatatcgctattgaactcctcagacgtttccaaaccgaaataggggagcttgcaactgaagagagcaaaaacttcagggacagaaatatgttcattatcttggtcccaaacaaagaaatgattcggaaaccacaagaaccacccacaagaaagaagaaaaaaacagcggaaaacgaagcttcagcttcagctgcagaaataacagctgagcctgagcctgagcctgagcctgagcctgaacctgagcctgagcctgagcctgagcctgagccagagcctctacagatcgattcttgagtttaaaatcttgtggtaggattttcagagctaaagtaaagttttgtatatttacttttctaccatgtctcaagagagccaagagctgtataacaaatagagttagtcctatttgaatgatgttcttcgtttgtagatcttttctctaatctatttttttgttt

SEQ ID NO: 37566 - protein, 312 aa, Arabidopsis thaliana
  peptide (1)..(312): Ceres Seq. ID no. 12322222
  misc_feature (166)..(252): Pfam Name: Translation initiation factor IF-3, C-terminal domain Pfam Description: Translation initiation factor IF-3, C-terminal
  misc_feature (95)..(252): Homolog of NCBI NO: 23128110 NR Description: hypothetical protein [Nostoc punctiforme]
  misc_feature (75)..(306): Homolog of NCBI NO: 547710 NR Description: TRANSLATION INITIATION FACTOR IF-3, CHLOROPLAST
  misc_feature (95)..(253): Homolog of NCBI NO: 20808119 NR Description: Translation initiation factor IF3
  misc_feature (95)..(252): Homolog of NCBI NO: 20138475 NR Description: Translation initiation factor IF-3
  misc_feature (95)..(252): Homolog of NCBI NO: 17232115 NR Description: translation initiation factor IF-3 [Nostoc sp.
  misc_feature (82)..(284): Homolog of NCBI NO: 33864629 NR Description: translation initiation factor IF-3 [Synechococcus
  misc_feature (82)..(269): Homolog of NCBI NO: 33241247 NR Description: Translation initiation factor 3
  misc_feature (1)..(164): Homolog of NCBI NO: 25407671 NR Description: hypothetical protein AT4g30690 [imported] -
  misc_feature (1)..(283): Homolog of NCBI NO: 18417644 NR Description: putative protein
  misc_feature (1)..(312): Homolog of NCBI NO: 15224088 NR Description: putative chloroplast initiation factor 3
MAGITSSTVGFNAVFTGITKTVSSHSLFSVDSKLCSLRLSKTELSFTNLTPSPRRAFAVTCRFGGGGGGYRFSGDNRRGRPKEAEIDEALDISSIRSATVRLIDGQQNMLGLVSKDEAVRMADDAELDLVILSPDADPPVVKMMDYSKYRYEQQKRKKDQQKKTTRMDLKELKMGYNIDQHDYSVRLRAAQKFLQDGDKVKVIVSMKGRENEFRNIAIELLRRFQTEIGELATEESKNFRDRNMFIILVPNKEMIRKPQEPPTRKKKKTAENEASASAAEITAEPEPEPEPEPEPEPEPEPEPEPEPLQIDS

SEQ ID NO: 37567 - protein, 204 aa, Arabidopsis thaliana
  peptide (1)..(204): Ceres Seq. ID no. 12322223
  misc_feature (58)..(144): Pfam Name: Translation initiation factor IF-3, C-terminal domain Pfam Description: Translation initiation factor IF-3, C-terminal
  misc_feature (1)..(144): Homolog of NCBI NO: 23128110 NR Description: hypothetical protein [Nostoc punctiforme]
  misc_feature (1)..(198): Homolog of NCBI NO: 547710 NR Description: TRANSLATION INITIATION FACTOR IF-3, CHLOROPLAST
  misc_feature (1)..(145): Homolog of NCBI NO: 20808119 NR Description: Translation initiation factor IF3
  misc_feature (1)..(144): Homolog of NCBI NO: 20138475 NR Description: Translation initiation factor IF-3
  misc_feature (1)..(144): Homolog of NCBI NO: 17232115 NR Description: translation initiation factor IF-3 [Nostoc sp.
  misc_feature (1)..(176): Homolog of NCBI NO: 33864629 NR Description: translation initiation factor IF-3 [Synechococcus
  misc_feature (1)..(161): Homolog of NCBI NO: 33241247 NR Description: Translation initiation factor 3
  misc_feature (1)..(56): Homolog of NCBI NO: 25407671 NR Description: hypothetical protein AT4g30690 [imported] -
  misc_feature (1)..(175): Homolog of NCBI NO: 18417644 NR Description: putative protein
  misc_feature (1)..(204): Homolog of NCBI NO: 15224088 NR Description: putative chloroplast initiation factor 3
MLGLVSKDEAVRMADDAELDLVILSPDADPPVVKMMDYSKYRYEQQKRKKDQQKKTTRMDLKELKMGYNIDQHDYSVRLRAAQKFLQDGDKVKVIVSMKGRENEFRNIAIELLRRFQTEIGELATEESKNFRDRNMFIILVPNKEMIRKPQEPPTRKKKKTAENEASASAAEITAEPEPEPEPEPEPEPEPEPEPEPEPLQIDS

SEQ ID NO: 37568 - protein, 192 aa, Arabidopsis thaliana
  peptide (1)..(192): Ceres Seq. ID no. 12322224
  misc_feature (46)..(132): Pfam Name: Translation initiation factor IF-3, C-terminal domain Pfam Description: Translation initiation factor IF-3, C-terminal
  misc_feature (1)..(132): Homolog of NCBI NO: 23128110 NR Description: hypothetical protein [Nostoc punctiforme]
  misc_feature (1)..(186): Homolog of NCBI NO: 547710 NR Description: TRANSLATION INITIATION FACTOR IF-3, CHLOROPLAST
  misc_feature (1)..(133): Homolog of NCBI NO: 20808119 NR Description: Translation initiation factor IF3
  misc_feature (1)..(132): Homolog of NCBI NO: 20138475 NR Description: Translation initiation factor IF-3
  misc_feature (1)..(132): Homolog of NCBI NO: 17232115 NR Description: translation initiation factor IF-3 [Nostoc sp.
  misc_feature (1)..(164): Homolog of NCBI NO: 33864629 NR Description: translation initiation factor IF-3 [Synechococcus
  misc_feature (1)..(149): Homolog of NCBI NO: 33241247 NR Description: Translation initiation factor 3
  misc_feature (1)..(44): Homolog of NCBI NO: 25407671 NR Description: hypothetical protein AT4g30690 [imported] -
  misc_feature (1)..(163): Homolog of NCBI NO: 18417644 NR Description: putative protein
  misc_feature (1)..(192): Homolog of NCBI NO: 15224088 NR Description: putative chloroplast initiation factor 3
MADDAELDLVILSPDADPPVVKMMDYSKYRYEQQKRKKDQQKKTTRMDLKELKMGYNIDQHDYSVRLRAAQKFLQDGDKVKVIVSMKGRENEFRNIAIELLRRFQTEIGELATEESKNFRDRNMFIILVPNKEMIRKPQEPPTRKKKKTAENEASASAAEITAEPEPEPEPEPEPEPEPEPEPEPEPLQIDS

SEQ ID NO: 37569 - DNA, 1380 bp, Arabidopsis thaliana
  misc_feature (1)..(1380): Ceres Seq. ID no. 12462129
  misc_feature: MA Experiment ID: 108561 Result: Up-regulated in Transcription
  misc_feature: MA Experiment 108561 PARAMETER Experiment Name: At_100uM_ABA_cDNA_P Parameter: Timepoint (hr) Value: 6
  misc_feature: MA Experiment 108561 PARAMETER Experiment Name: At_100uM_ABA_cDNA_P Parameter: Tissue Value: Aerial
  misc_feature: MA Experiment 108561 PARAMETER Experiment Name: At_100uM_ABA_cDNA_P Parameter: Treatment Value: 100uM ABA vs. No Treatment
  misc_feature: MA Experiment ID: 108577 Result: Down-regulated in Transcription
  misc_feature: MA Experiment 108577 PARAMETER Experiment Name: At_42deg_Heat_cDNA_P Parameter: Temperature (deg C) Value: 42 vs. 22
  misc_feature: MA Experiment 108577 PARAMETER Experiment Name: At_42deg_Heat_cDNA_P Parameter: Timepoint (hr) Value: 6
  misc_feature: MA Experiment 108577 PARAMETER Experiment Name: At_42deg_Heat_cDNA_P Parameter: Tissue Value: Aerial
  misc_feature: MA Experiment ID: 108605 Result: Up-regulated in Transcription
  misc_feature: MA Experiment 108605 PARAMETER Experiment Name: At_100uM_ABA_cDNA_P Parameter: Timepoint (hr) Value: 6
  misc_feature: MA Experiment 108605 PARAMETER Experiment Name: At_100uM_ABA_cDNA_P Parameter: Tissue Value: Aerial
  misc_feature: MA Experiment 108605 PARAMETER Experiment Name: At_100uM_ABA_cDNA_P Parameter: Treatment Value: 100uM ABA vs. No Treatment
  misc_feature: MA Experiment ID: 108607 Result: Up-regulated in Transcription
  misc_feature: MA Experiment 108607 PARAMETER Experiment Name: At_100uM_ABA_cDNA_P Parameter: Timepoint (hr) Value: 4
  misc_feature: MA Experiment 108607 PARAMETER Experiment Name: At_100uM_ABA_cDNA_P Parameter: Tissue Value: Aerial
  misc_feature: MA Experiment 108607 PARAMETER Experiment Name: At_100uM_ABA_cDNA_P Parameter: Treatment Value: 100uM ABA vs. No Treatment
  misc_feature: MA Experiment ID: 20000069 Result: Up-regulated in Transcription
  misc_feature: MA Experiment 20000069 PARAMETER Experiment Name: At_100uM_ABA_Mutants_cDNA_P Parameter: Plant Line Value: CS23
  misc_feature: MA Experiment 20000069 PARAMETER Experiment Name: At_100uM_ABA_Mutants_cDNA_P Parameter: Timepoint (hr) Value: 6
  misc_feature: MA Experiment 20000069 PARAMETER Experiment Name: At_100uM_ABA_Mutants_cDNA_P Parameter: Tissue Value: Aerial
  misc_feature: MA Experiment 20000069 PARAMETER Experiment Name: At_100uM_ABA_Mutants_cDNA_P Parameter: Treatment Value: 100uM ABA vs. No Treatment
  misc_feature: MA Experiment ID: 20000070 Result: Up-regulated in Transcription
  misc_feature: MA Experiment 20000070 PARAMETER Experiment Name: At_100uM_ABA_Mutants_cDNA_P Parameter: Plant Line Value: CS24
  misc_feature: MA Experiment 20000070 PARAMETER Experiment Name: At_100uM_ABA_Mutants_cDNA_P Parameter: Timepoint (hr) Value: 6
  misc_feature: MA Experiment 20000070 PARAMETER Experiment Name: At_100uM_ABA_Mutants_cDNA_P Parameter: Tissue Value: Aerial
  misc_feature: MA Experiment 20000070 PARAMETER Experiment Name: At_100uM_ABA_Mutants_cDNA_P Parameter: Treatment Value: 100uM ABA vs. No Treatment
  misc_feature: MA Experiment ID: 20000071 Result: Up-regulated in Transcription
  misc_feature: MA Experiment 20000071 PARAMETER Experiment Name: At_100uM_ABA_Mutants_cDNA_P Parameter: Plant Line Value: CS8104
  misc_feature: MA Experiment 20000071 PARAMETER Experiment Name: At_100uM_ABA_Mutants_cDNA_P Parameter: Timepoint (hr) Value: 6
  misc_feature: MA Experiment 20000071 PARAMETER Experiment Name: At_100uM_ABA_Mutants_cDNA_P Parameter: Tissue Value: Aerial
  misc_feature: MA Experiment 20000071 PARAMETER Experiment Name: At_100uM_ABA_Mutants_cDNA_P Parameter: Treatment Value: 100uM ABA vs. No Treatment
  misc_feature: MA Experiment ID: 20000072 Result: Up-regulated in Transcription
  misc_feature: MA Experiment 20000072 PARAMETER Experiment Name: At_100uM_ABA_Mutants_cDNA_P Parameter: Plant Line Value: CS8105
  misc_feature: MA Experiment 20000072 PARAMETER Experiment Name: At_100uM_ABA_Mutants_cDNA_P Parameter: Timepoint (hr) Value: 6
  misc_feature: MA Experiment 20000072 PARAMETER Experiment Name: At_100uM_ABA_Mutants_cDNA_P Parameter: Tissue Value: Aerial
  misc_feature: MA Experiment 20000072 PARAMETER Experiment Name: At_100uM_ABA_Mutants_cDNA_P Parameter: Treatment Value: 100uM ABA vs. No Treatment
  misc_feature: MA Experiment ID: 20000086 Result: Up-regulated in Transcription
  misc_feature: MA Experiment 20000086 PARAMETER Experiment Name: At_100uM_ABA_Mutants_cDNA_P Parameter: Plant Line Value: CS22
  misc_feature: MA Experiment 20000086 PARAMETER Experiment Name: At_100uM_ABA_Mutants_cDNA_P Parameter: Timepoint (hr) Value: 6
  misc_feature: MA Experiment 20000086 PARAMETER Experiment Name: At_100uM_ABA_Mutants_cDNA_P Parameter: Tissue Value: Aerial
  misc_feature: MA Experiment 20000086 PARAMETER Experiment Name: At_100uM_ABA_Mutants_cDNA_P Parameter: Treatment Value: 100uM ABA vs. No Treatment
  misc_feature: MA Experiment ID: 20000087 Result: Up-regulated in Transcription
  misc_feature: MA Experiment 20000087 PARAMETER Experiment Name: At_100uM_ABA_Mutants_cDNA_P Parameter: Plant Line Value: WS
  misc_feature: MA Experiment 20000087 PARAMETER Experiment Name: At_100uM_ABA_Mutants_cDNA_P Parameter: Timepoint (hr) Value: 6
  misc_feature: MA Experiment 20000087 PARAMETER Experiment Name: At_100uM_ABA_Mutants_cDNA_P Parameter: Tissue Value: Aerial
  misc_feature: MA Experiment 20000087 PARAMETER Experiment Name: At_100uM_ABA_Mutants_cDNA_P Parameter: Treatment Value: 100uM ABA vs. No Treatment
  misc_feature: MA Experiment ID: 20000088 Result: Up-regulated in Transcription
  misc_feature: MA Experiment 20000088 PARAMETER Experiment Name: At_100uM_ABA_Mutants_cDNA_P Parameter: Plant Line Value: Landsberg
  misc_feature: MA Experiment 20000088 PARAMETER Experiment Name: At_100uM_ABA_Mutants_cDNA_P Parameter: Timepoint (hr) Value: 6
  misc_feature: MA Experiment 20000088 PARAMETER Experiment Name: At_100uM_ABA_Mutants_cDNA_P Parameter: Tissue Value: Aerial
  misc_feature: MA Experiment 20000088 PARAMETER Experiment Name: At_100uM_ABA_Mutants_cDNA_P Parameter: Treatment Value: 100uM ABA vs. No Treatment
  misc_feature: MA Experiment ID: 20000117 Result: Up-regulated in Transcription
  misc_feature: MA Experiment 20000117 PARAMETER Experiment Name: At_100uM_ABA_Mutants_cDNA_P Parameter: Plant Line Value: Columbia
  misc_feature: MA Experiment 20000117 PARAMETER Experiment Name: At_100uM_ABA_Mutants_cDNA_P Parameter: Timepoint (hr) Value: 6
  misc_feature: MA Experiment 20000117 PARAMETER Experiment Name: At_100uM_ABA_Mutants_cDNA_P Parameter: Tissue Value: Aerial
  misc_feature: MA Experiment 20000117 PARAMETER Experiment Name: At_100uM_ABA_Mutants_cDNA_P Parameter: Treatment Value: 100uM ABA vs. No Treatment
  misc_feature: MA Experiment ID: 20000437 Result: Up-regulated in Transcription
  misc_feature: MA Experiment 20000437 PARAMETER Experiment Name: At_Drought_P Parameter: Age (day) Value: 8
  misc_feature: MA Experiment 20000437 PARAMETER Experiment Name: At_Drought_P Parameter: Organism Value: A. thaliana
  misc_feature: MA Experiment 20000437 PARAMETER Experiment Name: At_Drought_P Parameter: Plant Line Value: WS
  misc_feature: MA Experiment 20000437 PARAMETER Experiment Name: At_Drought_P Parameter: Timepoint (hr) Value: 24
  misc_feature: MA Experiment 20000437 PARAMETER Experiment Name: At_Drought_P Parameter: Tissue Value: Whole Plant
  misc_feature: MA Experiment 20000437 PARAMETER Experiment Name: At_Drought_P Parameter: Treatment Value: Drought vs. No Drought
  misc_feature: MA Experiment ID: 20000438 Result: Down-regulated in Transcription
  misc_feature: MA Experiment 20000438 PARAMETER Experiment Name: At_Shoots__P Parameter: Age (day) Value: 14
  misc_feature: MA Experiment 20000438 PARAMETER Experiment Name: At_Shoots__P Parameter: Tissue Value: Shoots vs. Whole Plant
  misc_feature: MA Experiment ID: 20000453 Result: Up-regulated in Transcription
  misc_feature: MA Experiment 20000453 PARAMETER Experiment Name: At_100uM_ABA_P Parameter: Age (day) Value: 15
  misc_feature: MA Experiment 20000453 PARAMETER Experiment Name: At_100uM_ABA_P Parameter: Organism Value: A. thaliana
  misc_feature: MA Experiment 20000453 PARAMETER Experiment Name: At_100uM_ABA_P Parameter: Plant Line Value: WS
  misc_feature: MA Experiment 20000453 PARAMETER Experiment Name: At_100uM_ABA_P Parameter: Timepoint (hr) Value: 24
  misc_feature: MA Experiment 20000453 PARAMETER Experiment Name: At_100uM_ABA_P Parameter: Tissue Value: Aerial
  misc_feature: MA Experiment 20000453 PARAMETER Experiment Name: At_100uM_ABA_P Parameter: Treatment Value: 100uM ABA vs. No Treatment
  misc_feature: MA Experiment ID: 20000794 Result: Up-regulated in Transcription
  misc_feature: MA Experiment 20000794 PARAMETER Experiment Name: At_Petals_P Parameter: Age (day) Value: 23-25 days
  misc_feature: MA Experiment 20000794 PARAMETER Experiment Name: At_Petals_P Parameter: Plant Line Value: WS
  misc_feature: MA Experiment 20000794 PARAMETER Experiment Name: At_Petals_P Parameter: Tissue Value: Petals vs. Whole plant
  misc_feature: MA Experiment ID: 20001555 Result: Up-regulated in Transcription
  misc_feature: MA Experiment 20001555 PARAMETER Experiment Name: At_Drought_Soil_Dry_P Parameter: Age (day) Value: 24
  misc_feature: MA Experiment 20001555 PARAMETER Experiment Name: At_Drought_Soil_Dry_P Parameter: Organism Value: A. thaliana
  misc_feature: MA Experiment 20001555 PARAMETER Experiment Name: At_Drought_Soil_Dry_P Parameter: Plant Line Value: WS
  misc_feature: MA Experiment 20001555 PARAMETER Experiment Name: At_Drought_Soil_Dry_P Parameter: Post Timepoint (hr) Value: None
  misc_feature: MA Experiment 20001555 PARAMETER Experiment Name: At_Drought_Soil_Dry_P Parameter: Post-Treatment Value: None
  misc_feature: MA Experiment 20001555 PARAMETER Experiment Name: At_Drought_Soil_Dry_P Parameter: Timepoint (day) Value: 10
  misc_feature: MA Experiment 20001555 PARAMETER Experiment Name: At_Drought_Soil_Dry_P Parameter: Treatment Value: Drought vs. No Drought
  misc_feature: MA Experiment ID: 20001556 Result: Up-regulated in Transcription
  misc_feature: MA Experiment 20001556 PARAMETER Experiment Name: At_Drought_Soil_Dry_P Parameter: Age (day) Value: 26
  misc_feature: MA Experiment 20001556 PARAMETER Experiment Name: At_Drought_Soil_Dry_P Parameter: Organism Value: A. thaliana
  misc_feature: MA Experiment 20001556 PARAMETER Experiment Name: At_Drought_Soil_Dry_P Parameter: Plant Line Value: WS
  misc_feature: MA Experiment 20001556 PARAMETER Experiment Name: At_Drought_Soil_Dry_P Parameter: Post Timepoint (hr) Value: None
  misc_feature: MA Experiment 20001556 PARAMETER Experiment Name: At_Drought_Soil_Dry_P Parameter: Post-Treatment Value: None
  misc_feature: MA Experiment 20001556 PARAMETER Experiment Name: At_Drought_Soil_Dry_P Parameter: Timepoint (day) Value: 12
  misc_feature: MA Experiment 20001556 PARAMETER Experiment Name: At_Drought_Soil_Dry_P Parameter: Treatment Value: Drought vs. No Drought
  misc_feature: MA Experiment ID: 20001559 Result: Up-regulated in Transcription
  misc_feature: MA Experiment 20001559 PARAMETER Experiment Name: At_Drought_Soil_Dry_P Parameter: Age (day) Value: 28
  misc_feature: MA Experiment 20001559 PARAMETER Experiment Name: At_Drought_Soil_Dry_P Parameter: Organism Value: A. thaliana
  misc_feature: MA Experiment 20001559 PARAMETER Experiment Name: At_Drought_Soil_Dry_P Parameter: Plant Line Value: WS
  misc_feature: MA Experiment 20001559 PARAMETER Experiment Name: At_Drought_Soil_Dry_P Parameter: Post Timepoint (hr) Value: 29
  misc_feature: MA Experiment 20001559 PARAMETER Experiment Name: At_Drought_Soil_Dry_P Parameter: Post-Treatment Value: Re-Water vs. No Drought
  misc_feature: MA Experiment 20001559 PARAMETER Experiment Name: At_Drought_Soil_Dry_P Parameter: Timepoint (day) Value: 14
  misc_feature: MA Experiment 20001559 PARAMETER Experiment Name: At_Drought_Soil_Dry_P Parameter: Treatment Value: Drought vs. No Drought
  misc_feature: MA Experiment ID: 20001757 Result: Down-regulated in Transcription
  misc_feature: MA Experiment 20001757 PARAMETER Experiment Name: At_50mM_NH4NO3_L-to-H_P Parameter: Timepoint (hr) Value: 6
  misc_feature: MA Experiment 20001757 PARAMETER Experiment Name: At_50mM_NH4NO3_L-to-H_P Parameter: Tissue Value: Leaf
  misc_feature: MA Experiment 20001757 PARAMETER Experiment Name: At_50mM_NH4NO3_L-to-H_P Parameter: Treatment Value: 50mM NH4NO3 vs 100mM Mannitol
  misc_feature: MA Experiment ID: 20001905 Result: Up-regulated in Transcription
  misc_feature: MA Experiment 20001905 PARAMETER Experiment Name: At_Drought_Reproduction_P Parameter: Age (day) Value: 40
  misc_feature: MA Experiment 20001905 PARAMETER Experiment Name: At_Drought_Reproduction_P Parameter: Organism Value: A. thaliana
  misc_feature: MA Experiment 20001905 PARAMETER Experiment Name: At_Drought_Reproduction_P Parameter: Plant Line Value: WS
  misc_feature: MA Experiment 20001905 PARAMETER Experiment Name: At_Drought_Reproduction_P Parameter: Timepoint (day) Value: 10
  misc_feature: MA Experiment 20001905 PARAMETER Experiment Name: At_Drought_Reproduction_P Parameter: Tissue Value: Rosettes
  misc_feature: MA Experiment 20001905 PARAMETER Experiment Name: At_Drought_Reproduction_P Parameter: Treatment Value: Drought vs. No Drought
  misc_feature: MA Experiment ID: 20001908 Result: Up-regulated in Transcription
  misc_feature: MA Experiment 20001908 PARAMETER Experiment Name: At_Drought_Reproduction_P Parameter: Age (day) Value: 40
  misc_feature: MA Experiment 20001908 PARAMETER Experiment Name: At_Drought_Reproduction_P Parameter: Organism Value: A. thaliana
  misc_feature: MA Experiment 20001908 PARAMETER Experiment Name: At_Drought_Reproduction_P Parameter: Plant Line Value: WS
  misc_feature: MA Experiment 20001908 PARAMETER Experiment Name: At_Drought_Reproduction_P Parameter: Timepoint (day) Value: 10
  misc_feature: MA Experiment 20001908 PARAMETER Experiment Name: At_Drought_Reproduction_P Parameter: Tissue Value: Siliques
  misc_feature: MA Experiment 20001908 PARAMETER Experiment Name: At_Drought_Reproduction_P Parameter: Treatment Value: Drought vs. No Drought
  misc_feature: MA Experiment ID: 20001911 Result: Up-regulated in Transcription
  misc_feature: MA Experiment 20001911 PARAMETER Experiment Name: At_Drought_Reproduction_P Parameter: Age (day) Value: 40
  misc_feature: MA Experiment 20001911 PARAMETER Experiment Name: At_Drought_Reproduction_P Parameter: Organism Value: A. thaliana
  misc_feature: MA Experiment 20001911 PARAMETER Experiment Name: At_Drought_Reproduction_P Parameter: Plant Line Value: WS
  misc_feature: MA Experiment 20001911 PARAMETER Experiment Name: At_Drought_Reproduction_P Parameter: Timepoint (day) Value: 10
  misc_feature: MA Experiment 20001911 PARAMETER Experiment Name: At_Drought_Reproduction_P Parameter: Tissue Value: Flowers
  misc_feature: MA Experiment 20001911 PARAMETER Experiment Name: At_Drought_Reproduction_P Parameter: Treatment Value: Drought vs. No Drought
aataatcattcatcagggccctgtgttctctgagtcaagtcaggaactgatgaataaccctgtaccgtgtcagtcggtctctggtggcaattctggtggttatttgtttccttcttcctctggatactgcaatgtttcagctgtcttgcctcatggaaggaatttgcaaaaccagccacctgtttccaccgtgcctagagacagattggctatgcaggattgtcctttgatagctcaatcctcgttgattaatcatcaccctcaagagttcatagatccacttcatgagttctttgatttctctgatcatgttcctgttcagaatctacaagcagagagtagtggagtaagggtggactcatccgtggaacttcataagaaaagtgaatggcaagattgggcagatcagctgatttctgttgacgatggttctgagccaaattggtctgaacttcttggagattcaagttcccacaatccaaattcagagatacctacaccatttttggatgtaccaaggctagatataacagctaaccagcagcaacagatggtttcatcagaggaccagctcagcggcagaaactcatcatctagtgtagcaacatctaaacaacgtatgcgttggacaccagaacttcacgaggcattcgttgaagctgttaatcagcttggtggtagtgaacgagccacccctaaggctgttttgaagctcttgaataaccctggcttgaccatttatcatgtaaaaagccatttgcagaaatatagaacggcaaggtataaaccggagacttcggaagttacaggagaacctcaagagaagaagatgacatctattgaagatatcaaatctcttgacatgaaaacgagcgttgagatcacacaagctctacggttacaaatggaagtgcagaaacgtctccacgagcagctcgagatccaacggtcactgcagttacagattgaaaaacagggccggtacctacagatgatgttcgagaaacaacaaaagatacaagacaacaagagctcttcttcagaagcatcaccaaagcaatgcaatggttcatttgcagaagttgaagttggtcttgagacactaacaggggaccaaaatgaatctgcttcagcatcaaggaaacgtgtcagagaagattaaagcatgtttaatttgatctcgtttgacgaaacatgtttattgggaattaattgtggaaaccaactccagttttgttaaaagaatctgtttctttcttagctctgtattgttctagtttagaagcagttgatttggccttgcatggctgcaacactaactaaagagtaaagactaattgtgtatatctacatatacatttttggggacgatttgtgtcc

SEQ ID NO: 37570 - protein, 386 aa, Arabidopsis thaliana
  peptide (1)..(386): Ceres Seq. ID no. 12462130
  misc_feature (206)..(257): Pfam Name: Myb-like DNA-binding domain Pfam Description: Myb-like DNA-binding domain
  misc_feature (141)..(338): Homolog of NCBI NO: 4519671 NR Description: transfactor [Nicotiana tabacum]
  misc_feature (7)..(360): Homolog of NCBI NO: 6942190 NR Description: CDPK substrate protein 1; CSP1 [Mesembryanthemum
  misc_feature (97)..(352): Homolog of NCBI NO: 7487685 NR Description: hypothetical protein T5F17.60 - Arabidopsis
  misc_feature (97)..(352): Homolog of NCBI NO: 22329004 NR Description: putative protein
  misc_feature (12)..(350): Homolog of NCBI NO: 15229298 NR Description: transfactor, putative; protein id: At3g04450.1
  misc_feature (18)..(350): Homolog of NCBI NO: 26452281 NR Description: putative transfactor [Arabidopsis thaliana]
  misc_feature (17)..(386): Homolog of NCBI NO: 30692105 NR Description: expressed protein [Arabidopsis thaliana]
  misc_feature (12)..(386): Homolog of NCBI NO: 30692110 NR Description: expressed protein [Arabidopsis thaliana]
  misc_feature (12)..(386): Homolog of NCBI NO: 21537366 NR Description: transfactor, putative [Arabidopsis thaliana]
  misc_feature (2)..(386): Homolog of NCBI NO: 21954075 NR Description: unknown protein [Arabidopsis thaliana]
IIIHQGPVFSESSQELMNNPVPCQSVSGGNSGGYLFPSSSGYCNVSAVLPHGRNLQNQPPVSTVPRDRLAMQDCPLIAQSSLINHHPQEFIDPLHEFFDFSDHVPVQNLQAESSGVRVDSSVELHKKSEWQDWADQLISVDDGSEPNWSELLGDSSSHNPNSEIPTPFLDVPRLDITANQQQQMVSSEDQLSGRNSSSSVATSKQRMRWTPELHEAFVEAVNQLGGSERATPKAVLKLLNNPGLTIYHVKSHLQKYRTARYKPETSEVTGEPQEKKMTSIEDIKSLDMKTSVEITQALRLQMEVQKRLHEQLEIQRSLQLQIEKQGRYLQMMFEKQQKIQDNKSSSSEASPKQCNGSFAEVEVGLETLTGDQNESASASRKRVRED

SEQ ID NO: 37571 - protein, 370 aa, Arabidopsis thaliana; identical to SEQ ID NO: 29235
  peptide (1)..(370): Ceres Seq. ID no. 12462131
  misc_feature (190)..(241): Pfam Name: Myb-like DNA-binding domain Pfam Description: Myb-like DNA-binding domain
  misc_feature (125)..(322): Homolog of NCBI NO: 4519671 NR Description: transfactor [Nicotiana tabacum]
  misc_feature (1)..(344): Homolog of NCBI NO: 6942190 NR Description: CDPK substrate protein 1; CSP1 [Mesembryanthemum
  misc_feature (81)..(336): Homolog of NCBI NO: 7487685 NR Description: hypothetical protein T5F17.60 - Arabidopsis
  misc_feature (81)..(336): Homolog of NCBI NO: 22329004 NR Description: putative protein
  misc_feature (1)..(334): Homolog of NCBI NO: 15229298 NR Description: transfactor, putative; protein id: At3g04450.1
  misc_feature (2)..(334): Homolog of NCBI NO: 26452281 NR Description: putative transfactor [Arabidopsis thaliana]
  misc_feature (1)..(370): Homolog of NCBI NO: 30692105 NR Description: expressed protein [Arabidopsis thaliana]
  misc_feature (1)..(370): Homolog of NCBI NO: 30692110 NR Description: expressed protein [Arabidopsis thaliana]
  misc_feature (1)..(370): Homolog of NCBI NO: 21537366 NR Description: transfactor, putative [Arabidopsis thaliana]
  misc_feature (1)..(370): Homolog of NCBI NO: 21954075 NR Description: unknown protein [Arabidopsis thaliana]

SEQ ID NO: 37572 - protein, 316 aa, Arabidopsis thaliana
  peptide (1)..(316): Ceres Seq. ID no. 12462132
  misc_feature (136)..(187): Pfam Name: Myb-like DNA-binding domain Pfam Description: Myb-like DNA-binding domain
  misc_feature (71)..(268): Homolog of NCBI NO: 4519671 NR Description: transfactor [Nicotiana tabacum]
  misc_feature (1)..(290): Homolog of NCBI NO: 6942190 NR Description: CDPK substrate protein 1; CSP1 [Mesembryanthemum
  misc_feature (27)..(282): Homolog of NCBI NO: 7487685 NR Description: hypothetical protein T5F17.60 - Arabidopsis
  misc_feature (27)..(282): Homolog of NCBI NO: 22329004 NR Description: putative protein
  misc_feature (1)..(280): Homolog of NCBI NO: 15229298 NR Description: transfactor, putative; protein id: At3g04450.1
  misc_feature (1)..(280): Homolog of NCBI NO: 26452281 NR Description: putative transfactor [Arabidopsis thaliana]
  misc_feature (1)..(316): Homolog of NCBI NO: 30692105 NR Description: expressed protein [Arabidopsis thaliana]
  misc_feature (1)..(316): Homolog of NCBI NO: 30692110 NR Description: expressed protein [Arabidopsis thaliana]
  misc_feature (1)..(316): Homolog of NCBI NO: 21537366 NR Description: transfactor, putative [Arabidopsis thaliana]
  misc_feature (1)..(316): Homolog of NCBI NO: 21954075 NR Description: unknown protein [Arabidopsis thaliana]
MQDCPLIAQSSLINHHPQEFIDPLHEFFDFSDHVPVQNLQAESSGVRVDSSVELHKKSEWQDWADQLISVDDGSEPNWSELLGDSSSHNPNSEIPTPFLDVPRLDITANQQQQMVSSEDQLSGRNSSSSVATSKQRMRWTPELHEAFVEAVNQLGGSERATPKAVLKLLNNPGLTIYHVKSHLQKYRTARYKPETSEVTGEPQEKKMTSIEDIKSLDMKTSVEITQALRLQMEVQKRLHEQLEIQRSLQLQIEKQGRYLQMMFEKQQKIQDNKSSSSEASPKQCNGSFAEVEVGLETLTGDQNESASASRKRVRED

SEQ ID NO: 37573 - DNA, 1636 bp, Arabidopsis thaliana; identical to SEQ ID NO: 27107
  misc_feature (1)..(1636): Ceres Seq. ID no. 13500074
  misc_feature: MA Experiment ID: 108595 Result: Up-regulated in Transcription
  misc_feature: MA Experiment 108595 PARAMETER Experiment Name: At_Ler-pi_Ovule_cDNA_P Parameter: Plant Line Value: null
  misc_feature: MA Experiment ID: 20000234 Result: Up-regulated in Transcription
  misc_feature: MA Experiment 20000234 PARAMETER Experiment Name: At_Siliques_P Parameter: Age (day) Value: 21
  misc_feature: MA Experiment 20000234 PARAMETER Experiment Name: At_Siliques_P Parameter: Organism Value: A. thaliana
  misc_feature: MA Experiment 20000234 PARAMETER Experiment Name: At_Siliques_P Parameter: Plant Line Value: WS
  misc_feature: MA Experiment 20000234 PARAMETER Experiment Name: At_Siliques_P Parameter: Tissue Value: Less Than 5mm Siliques vs. Whole Plant
  misc_feature: MA Experiment ID: 20000235 Result: Up-regulated in Transcription
  misc_feature: MA Experiment 20000235 PARAMETER Experiment Name: At_Siliques_P Parameter: Age (day) Value: 21
  misc_feature: MA Experiment 20000235 PARAMETER Experiment Name: At_Siliques_P Parameter: Organism Value: A. thaliana
  misc_feature: MA Experiment 20000235 PARAMETER Experiment Name: At_Siliques_P Parameter: Plant Line Value: WS
  misc_feature: MA Experiment 20000235 PARAMETER Experiment Name: At_Siliques_P Parameter: Tissue Value: 5-10mm Siliques vs. Whole Plant
  misc_feature: MA Experiment ID: 20000264 Result: Up-regulated in Transcription
  misc_feature: MA Experiment 20000264 PARAMETER Experiment Name: At_Open_Flower_P Parameter: Age (day) Value: 21
  misc_feature: MA Experiment 20000264 PARAMETER Experiment Name: At_Open_Flower_P Parameter: Plant Line Value: WS
  misc_feature: MA Experiment 20000264 PARAMETER Experiment Name: At_Open_Flower_P Parameter: Tissue Value: Open Flower vs. Whole Plant
  misc_feature: MA Experiment ID: 20000265 Result: Up-regulated in Transcription
  misc_feature: MA Experiment 20000265 PARAMETER Experiment Name: At_Open_Flower_P Parameter: Age (day) Value: 21
  misc_feature: MA Experiment 20000265 PARAMETER Experiment Name: At_Open_Flower_P Parameter: Plant Line Value: WS
  misc_feature: MA Experiment 20000265 PARAMETER Experiment Name: At_Open_Flower_P Parameter: Tissue Value: Closed Flower vs. Whole Plant
  misc_feature: MA Experiment ID: 20000286 Result: Up-regulated in Transcription
  misc_feature: MA Experiment 20000286 PARAMETER Experiment Name: At_Open_Flower_P Parameter: Age (day) Value: 21
  misc_feature: MA Experiment 20000286 PARAMETER Experiment Name: At_Open_Flower_P Parameter: Plant Line Value: WS
  misc_feature: MA Experiment 20000286 PARAMETER Experiment Name: At_Open_Flower_P Parameter: Tissue Value: Half Open vs. Whole Plant
  misc_feature: MA Experiment ID: 20001757 Result: Down-regulated in Transcription
  misc_feature: MA Experiment 20001757 PARAMETER Experiment Name: At_50mM_NH4NO3_L-to-H_P Parameter: Timepoint (hr) Value: 6
  misc_feature: MA Experiment 20001757 PARAMETER Experiment Name: At_50mM_NH4NO3_L-to-H_P Parameter: Tissue Value: Leaf
  misc_feature: MA Experiment 20001757 PARAMETER Experiment Name: At_50mM_NH4NO3_L-to-H_P Parameter: Treatment Value: 50mM NH4NO3 vs 100mM Mannitol
  misc_feature: MA Experiment ID: 20001909 Result: Up-regulated in Transcription
  misc_feature: MA Experiment 20001909 PARAMETER Experiment Name: At_Drought_Reproduction_P Parameter: Age (day) Value: 35
  misc_feature: MA Experiment 20001909 PARAMETER Experiment Name: At_Drought_Reproduction_P Parameter: Organism Value: A. thaliana
  misc_feature: MA Experiment 20001909 PARAMETER Experiment Name: At_Drought_Reproduction_P Parameter: Plant Line Value: WS
  misc_feature: MA Experiment 20001909 PARAMETER Experiment Name: At_Drought_Reproduction_P Parameter: Timepoint (day) Value: 5
  misc_feature: MA Experiment 20001909 PARAMETER Experiment Name: At_Drought_Reproduction_P Parameter: Tissue Value: Flowers
  misc_feature: MA Experiment 20001909 PARAMETER Experiment Name: At_Drought_Reproduction_P Parameter: Treatment Value: Drought vs. No Drought
  misc_feature: MA Experiment ID: 20001910 Result: Up-regulated in Transcription
  misc_feature: MA Experiment 20001910 PARAMETER Experiment Name: At_Drought_Reproduction_P Parameter: Age (day) Value: 37
  misc_feature: MA Experiment 20001910 PARAMETER Experiment Name: At_Drought_Reproduction_P Parameter: Organism Value: A. thaliana
  misc_feature: MA Experiment 20001910 PARAMETER Experiment Name: At_Drought_Reproduction_P Parameter: Plant Line Value: WS
  misc_feature: MA Experiment 20001910 PARAMETER Experiment Name: At_Drought_Reproduction_P Parameter: Timepoint (day) Value: 7
  misc_feature: MA Experiment 20001910 PARAMETER Experiment Name: At_Drought_Reproduction_P Parameter: Tissue Value: Flowers
  misc_feature: MA Experiment 20001910 PARAMETER Experiment Name: At_Drought_Reproduction_P Parameter: Treatment Value: Drought vs. No Drought

SEQ ID NO: 37574 - protein, 490 aa, Arabidopsis thaliana; identical to SEQ ID NO: 27108
  peptide (1)..(490): Ceres Seq. ID no. 13500075
  misc_feature (161)..(485): Pfam Name: Aldose 1-epimerase Pfam Description: Aldose 1-epimerase
  misc_feature (161)..(485): Pfam Name: Aldose 1-epimerase Pfam Description: Aldose 1-epimerase
  misc_feature (199)..(447): Homolog of NCBI NO: 6094558 NR Description: putative aldose 1-epimerase, 3' partial
  misc_feature (119)..(489): Homolog of NCBI NO: 15232072 NR Description: aldose 1-epimerase family [Arabidopsis thaliana]
  misc_feature (157)..(488): Homolog of NCBI NO: 40882679 NR Description: putative aldose 1-epimerase
  misc_feature (159)..(488): Homolog of NCBI NO: 7430313 NR Description: probable aldose 1-epimerase (EC 5.1.3.3) - common
  misc_feature (159)..(488): Homolog of NCBI NO: 15824565 NR Description: non-cell-autonomous protein pathway1;
  misc_feature (199)..(447): Homolog of NCBI NO: 6094558 NR Description: putative aldose 1-epimerase, 3' partial
  misc_feature (157)..(488): Homolog of NCBI NO: 40882679 NR Description: putative aldose 1-epimerase
  misc_feature (159)..(488): Homolog of NCBI NO: 15824565 NR Description: non-cell-autonomous protein pathway1;
  misc_feature (1)..(490): Homolog of NCBI NO: 15242223 NR Description: aldose 1-epimerase family [Arabidopsis thaliana]
  misc_feature (193)..(490): Homolog of NCBI NO: 26452398 NR Description: putative aldose 1-epimerase [Arabidopsis thaliana]
  misc_feature (158)..(487): Homolog of NCBI NO: 15228261 NR Description: aldose 1-epimerase family [Arabidopsis thaliana]
  misc_feature (158)..(487): Homolog of NCBI NO: 21537069 NR Description: aldose 1-epimerase-like protein [Arabidopsis
  misc_feature (159)..(488): Homolog of NCBI NO: 15824567 NR Description: non-cell-autonomous protein pathway2;
  misc_feature (159)..(488): Homolog of NCBI NO: 7430313 NR Description: probable aldose 1-epimerase (EC 5.1.3.3) - common
  misc_feature (119)..(489): Homolog of NCBI NO: 15232072 NR Description: aldose 1-epimerase family [Arabidopsis thaliana]
  misc_feature (159)..(488): Homolog of NCBI NO: 15824567 NR Description: non-cell-autonomous protein pathway2;
  misc_feature (158)..(487): Homolog of NCBI NO: 21537069 NR Description: aldose 1-epimerase-like protein [Arabidopsis
  misc_feature (158)..(487): Homolog of NCBI NO: 15228261 NR Description: aldose 1-epimerase family [Arabidopsis thaliana]
  misc_feature (193)..(490): Homolog of NCBI NO: 26452398 NR Description: putative aldose 1-epimerase [Arabidopsis thaliana]
  misc_feature (1)..(490): Homolog of NCBI NO: 15242223 NR Description: aldose 1-epimerase family [Arabidopsis thaliana]

SEQ ID NO: 37575 - protein, 298 aa, Arabidopsis thaliana; identical to SEQ ID NO: 27109
  peptide (1)..(298): Ceres Seq. ID no. 13500076
  misc_feature (1)..(293): Pfam Name: Aldose 1-epimerase Pfam Description: Aldose 1-epimerase
  misc_feature (1)..(293): Pfam Name: Aldose 1-epimerase Pfam Description: Aldose 1-epimerase
  misc_feature (7)..(255): Homolog of NCBI NO: 6094558 NR Description: putative aldose 1-epimerase, 3' partial
  misc_feature (1)..(297): Homolog of NCBI NO: 15232072 NR Description: aldose 1-epimerase family [Arabidopsis thaliana]
  misc_feature (1)..(296): Homolog of NCBI NO: 40882679 NR Description: putative aldose 1-epimerase
  misc_feature (1)..(296): Homolog of NCBI NO: 7430313 NR Description: probable aldose 1-epimerase (EC 5.1.3.3) - common
  misc_feature (1)..(296): Homolog of NCBI NO: 15824565 NR Description: non-cell-autonomous protein pathway1;
  misc_feature (7)..(255): Homolog of NCBI NO: 6094558 NR Description: putative aldose 1-epimerase, 3' partial
  misc_feature (1)..(296): Homolog of NCBI NO: 40882679 NR Description: putative aldose 1-epimerase
  misc_feature (1)..(296): Homolog of NCBI NO: 15824565 NR Description: non-cell-autonomous protein pathway1;
  misc_feature (1)..(298): Homolog of NCBI NO: 15242223 NR Description: aldose 1-epimerase family [Arabidopsis thaliana]
  misc_feature (1)..(298): Homolog of NCBI NO: 26452398 NR Description: putative aldose 1-epimerase [Arabidopsis thaliana]
  misc_feature (1)..(295): Homolog of NCBI NO: 15228261 NR Description: aldose 1-epimerase family [Arabidopsis thaliana]
  misc_feature (1)..(295): Homolog of NCBI NO: 21537069 NR Description: aldose 1-epimerase-like protein [Arabidopsis
  misc_feature (1)..(296): Homolog of NCBI NO: 15824567 NR Description: non-cell-autonomous protein pathway2;
  misc_feature (1)..(296): Homolog of NCBI NO: 7430313 NR Description: probable aldose 1-epimerase (EC 5.1.3.3) - common
  misc_feature (1)..(297): Homolog of NCBI NO: 15232072 NR Description: aldose 1-epimerase family [Arabidopsis thaliana]
  misc_feature (1)..(296): Homolog of NCBI NO: 15824567 NR Description: non-cell-autonomous protein pathway2;
  misc_feature (1)..(295): Homolog of NCBI NO: 21537069 NR Description: aldose 1-epimerase-like protein [Arabidopsis
  misc_feature (1)..(295): Homolog of NCBI NO: 15228261 NR Description: aldose 1-epimerase family [Arabidopsis thaliana]
  misc_feature (1)..(298): Homolog of NCBI NO: 26452398 NR Description: putative aldose 1-epimerase [Arabidopsis thaliana]
  misc_feature (1)..(298): Homolog of NCBI NO: 15242223 NR Description: aldose 1-epimerase family [Arabidopsis thaliana]

SEQ ID NO: 37576 - DNA, 715 bp, Arabidopsis thaliana
  misc_feature (1)..(715): Ceres Seq. ID no. 13487000
  misc_feature: MA Experiment ID: 108434 Result: Up-regulated in Transcription
  misc_feature: MA Experiment 108434 PARAMETER Experiment Name: At_Root_Tips_cDNA_P Parameter: Tissue Value: Root Tips
  misc_feature: MA Experiment ID: 108462 Result: Down-regulated in Transcription
  misc_feature: MA Experiment 108462 PARAMETER Experiment Name: At_Germinating_Seeds_cDNA_P Parameter: Age (day) Value: 2 vs. 0
  misc_feature: MA Experiment 108462 PARAMETER Experiment Name: At_Germinating_Seeds_cDNA_P Parameter: Tissue Value: Germinating Seeds
  misc_feature: MA Experiment ID: 108463 Result: Down-regulated in Transcription
  misc_feature: MA Experiment 108463 PARAMETER Experiment Name: At_Germinating_Seeds_cDNA_P Parameter: Age (day) Value: 3 vs. 0
  misc_feature: MA Experiment 108463 PARAMETER Experiment Name: At_Germinating_Seeds_cDNA_P Parameter: Tissue Value: Germinating Seeds
  misc_feature: MA Experiment ID: 108464 Result: Down-regulated in Transcription
  misc_feature: MA Experiment 108464 PARAMETER Experiment Name: At_Germinating_Seeds_cDNA_P Parameter: Age (day) Value: 4 vs. 0
  misc_feature: MA Experiment 108464 PARAMETER Experiment Name: At_Germinating_Seeds_cDNA_P Parameter: Tissue Value: Germinating Seeds
  misc_feature: MA Experiment ID: 108488 Result: Up-regulated in Transcription
  misc_feature: MA Experiment ID: 108561 Result: Down-regulated in Transcription
  misc_feature: MA Experiment 108561 PARAMETER Experiment Name: At_100uM_ABA_cDNA_P Parameter: Timepoint (hr) Value: 6
  misc_feature: MA Experiment 108561 PARAMETER Experiment Name: At_100uM_ABA_cDNA_P Parameter: Tissue Value: Aerial
  misc_feature: MA Experiment 108561 PARAMETER Experiment Name: At_100uM_ABA_cDNA_P Parameter: Treatment Value: 100uM ABA vs. No Treatment
  misc_feature: MA Experiment ID: 108573 Result: Down-regulated in Transcription
  misc_feature: MA Experiment 108573 PARAMETER Experiment Name: At_Drought_cDNA_P Parameter: Timepoint (hr) Value: 6
  misc_feature: MA Experiment 108573 PARAMETER Experiment Name: At_Drought_cDNA_P Parameter: Tissue Value: Aerial
  misc_feature: MA Experiment 108573 PARAMETER Experiment Name: At_Drought_cDNA_P Parameter: Treatment Value: Drought vs. No Drought
  misc_feature: MA Experiment ID: 108579 Result: Up-regulated in Transcription
  misc_feature: MA Experiment 108579 PARAMETER Experiment Name: At_4deg_Cold_cDNA_P Parameter: Temperature (deg C) Value: 4 vs. 22
  misc_feature: MA Experiment 108579 PARAMETER Experiment Name: At_4deg_Cold_cDNA_P Parameter: Timepoint (hr) Value: 6
  misc_feature: MA Experiment 108579 PARAMETER Experiment Name: At_4deg_Cold_cDNA_P Parameter: Tissue Value: Aerial
  misc_feature: MA Experiment ID: 108605 Result: Down-regulated in Transcription
  misc_feature: MA Experiment 108605 PARAMETER Experiment Name: At_100uM_ABA_cDNA_P Parameter: Timepoint (hr) Value: 6
  misc_feature: MA Experiment 108605 PARAMETER Experiment Name: At_100uM_ABA_cDNA_P Parameter: Tissue Value: Aerial
  misc_feature: MA Experiment 108605 PARAMETER Experiment Name: At_100uM_ABA_cDNA_P Parameter: Treatment Value: 100uM ABA vs. No Treatment
  misc_feature: MA Experiment ID: 108607 Result: Down-regulated in Transcription
  misc_feature: MA Experiment 108607 PARAMETER Experiment Name: At_100uM_ABA_cDNA_P Parameter: Timepoint (hr) Value: 4
  misc_feature: MA Experiment 108607 PARAMETER Experiment Name: At_100uM_ABA_cDNA_P Parameter: Tissue Value: Aerial
  misc_feature: MA Experiment 108607 PARAMETER Experiment Name: At_100uM_ABA_cDNA_P Parameter: Treatment Value: 100uM ABA vs. No Treatment
  misc_feature: MA Experiment ID: 20000070 Result: Down-regulated in Transcription
  misc_feature: MA Experiment 20000070 PARAMETER Experiment Name: At_100uM_ABA_Mutants_cDNA_P Parameter: Plant Line Value: CS24
  misc_feature: MA Experiment 20000070 PARAMETER Experiment Name: At_100uM_ABA_Mutants_cDNA_P Parameter: Timepoint (hr) Value: 6
  misc_feature: MA Experiment 20000070 PARAMETER Experiment Name: At_100uM_ABA_Mutants_cDNA_P Parameter: Tissue Value: Aerial
  misc_feature: MA Experiment 20000070 PARAMETER Experiment Name: At_100uM_ABA_Mutants_cDNA_P Parameter: Treatment Value: 100uM ABA vs. No Treatment
  misc_feature: MA Experiment ID: 20000071 Result: Down-regulated in Transcription
  misc_feature: MA Experiment 20000071 PARAMETER Experiment Name: At_100uM_ABA_Mutants_cDNA_P Parameter: Plant Line Value: CS8104
  misc_feature: MA Experiment 20000071 PARAMETER Experiment Name: At_100uM_ABA_Mutants_cDNA_P Parameter: Timepoint (hr) Value: 6
  misc_feature: MA Experiment 20000071 PARAMETER Experiment Name: At_100uM_ABA_Mutants_cDNA_P Parameter: Tissue Value: Aerial
  misc_feature: MA Experiment 20000071 PARAMETER Experiment Name: At_100uM_ABA_Mutants_cDNA_P Parameter: Treatment Value: 100uM ABA vs. No Treatment
  misc_feature: MA Experiment ID: 20000111 Result: Up-regulated in Transcription
  misc_feature: MA Experiment 20000111 PARAMETER Experiment Name: At_42deg_Heat_cDNA_P Parameter: Temperature (deg C) Value: 42 vs. 22
  misc_feature: MA Experiment 20000111 PARAMETER Experiment Name: At_42deg_Heat_cDNA_P Parameter: Timepoint (hr) Value: 6
  misc_feature: MA Experiment 20000111 PARAMETER Experiment Name: At_42deg_Heat_cDNA_P Parameter: Tissue Value: Aerial
  misc_feature: MA Experiment ID: 20000113 Result: Up-regulated in Transcription
  misc_feature: MA Experiment 20000113 PARAMETER Experiment Name: At_42deg_Heat_cDNA_P Parameter: Temperature (deg C) Value: 42 vs. 22
  misc_feature: MA Experiment 20000113 PARAMETER Experiment Name: At_42deg_Heat_cDNA_P Parameter: Timepoint (hr) Value: 8
  misc_feature: MA Experiment 20000113 PARAMETER Experiment Name: At_42deg_Heat_cDNA_P Parameter: Tissue Value: Aerial
aagaataaaaaaaataaaaaccaaaaagcaaaagggataacacaaaacccctttcgtcttcccaattccaccaccacacagacaaagcacaccgaaaatggcggtttcttctcgaacattctccactttcctctgcatcaaaactacatctttccgcaacccctcaactcctttgtcctctctccggttcgcctctcacccggcggctaaacactgcttggtccgagcggtaacatctgcaacggaatcttcagagccaacagcaaccaataagagagtgccacgcggtatcatgaaacctagaccagtttcaccagagatgcaagacatcgtcgagcttcctgagattgctcgcacacaagctctgaagcgtatttgggcttacatcaaagaacatgaccttcaggacccacaaaacaagagagaaatactgtgtgatgagaagttgaagaagatattcgaaggaagagatcgggttgggttcctagagattgcaaagctcatcggtcctcacttcctctgatggattgtttccgcggaattttatttggatgattgtctatgttttgttgttgaactcttacggccatgaaaagagaagggtatttgaagttgaggaagacttagattagtaaattagggttttttttttttggttgtttcaatggatgttatgtagtcgttgcttcctaatgttgtttgcgttttcgtttcg

SEQ ID NO: 37577 - protein, 141 aa, Arabidopsis thaliana
  peptide (1)..(141): Ceres Seq. ID no. 15218715
  misc_feature (65)..(141): Pfam Name: SWIB/MDM2 domain Pfam Description: SWIB/MDM2 domain
  misc_feature (23)..(141): Homolog of NCBI NO: 18396594 NR Description: expressed protein [Arabidopsis thaliana]
  misc_feature (18)..(140): Homolog of NCBI NO: 33667910 NR Description: SWIb domain-containing protein [Solanum chacoense]
  misc_feature (23)..(141): Homolog of NCBI NO: 21593643 NR Description: unknown [Arabidopsis thaliana]
  misc_feature (22)..(141): Homolog of NCBI NO: 14488372 NR Description: hypothetical protein [Oryza sativa (japonica
  misc_feature (1)..(141): Homolog of NCBI NO: 21553903 NR Description: unknown [Arabidopsis thaliana]
  misc_feature (1)..(141): Homolog of NCBI NO: 15235320 NR Description: expressed protein [Arabidopsis thaliana]
  misc_feature (1)..(141): Homolog of NCBI NO: 14423526 NR Description: putative protein [Arabidopsis thaliana]
  misc_feature (1)..(141): Homolog of NCBI NO: 19698859 NR Description: unknown protein [Arabidopsis thaliana]
  misc_feature (1)..(141): Homolog of NCBI NO: 18397658 NR Description: expressed protein [Arabidopsis thaliana]
  misc_feature (1)..(141): Homolog of NCBI NO: 21593713 NR Description: unknown [Arabidopsis thaliana]
MAVSSRTFSTFLCIKTTSFRNPSTPLSSLRFASHPAAKHCLVRAVTSATESSEPTATNKRVPRGIMKPRPVSPEMQDIVELPEIARTQALKRIWAYIKEHDLQDPQNKREILCDEKLKKIFEGRDRVGFLEIAKLIGPHFL

SEQ ID NO: 37578 - protein, 76 aa, Arabidopsis thaliana
  peptide (1)..(76): Ceres Seq. ID no. 15218716
  misc_feature (1)..(76): Pfam Name: SWIB/MDM2 domain Pfam Description: SWIB/MDM2 domain
  misc_feature (1)..(76): Homolog of NCBI NO: 18396594 NR Description: expressed protein [Arabidopsis thaliana]
  misc_feature (1)..(75): Homolog of NCBI NO: 33667910 NR Description: SWIb domain-containing protein [Solanum chacoense]
  misc_feature (1)..(76): Homolog of NCBI NO: 21593643 NR Description: unknown [Arabidopsis thaliana]
  misc_feature (1)..(76): Homolog of NCBI NO: 14488372 NR Description: hypothetical protein [Oryza sativa (japonica
  misc_feature (1)..(76): Homolog of NCBI NO: 21553903 NR Description: unknown [Arabidopsis thaliana]
  misc_feature (1)..(76): Homolog of NCBI NO: 15235320 NR Description: expressed protein [Arabidopsis thaliana]
  misc_feature (1)..(76): Homolog of NCBI NO: 14423526 NR Description: putative protein [Arabidopsis thaliana]
  misc_feature (1)..(76): Homolog of NCBI NO: 19698859 NR Description: unknown protein [Arabidopsis thaliana]
  misc_feature (1)..(76): Homolog of NCBI NO: 18397658 NR Description: expressed protein [Arabidopsis thaliana]
  misc_feature (1)..(76): Homolog of NCBI NO: 21593713 NR Description: unknown [Arabidopsis thaliana]
MKPRPVSPEMQDIVELPEIARTQALKRIWAYIKEHDLQDPQNKREILCDEKLKKIFEGRDRVGFLEIAKLIGPHFL

SEQ ID NO: 37579 - DNA, 1459 bp, Arabidopsis thaliana
  misc_feature (1)..(1459): Ceres Seq. ID no. 13494018
  misc_feature: MA Experiment ID: 20000173 Result: Down-regulated in Transcription
  misc_feature: MA Experiment 20000173 PARAMETER Experiment Name: At_42deg_Heat_P Parameter: Age (day) Value: 14
  misc_feature: MA Experiment 20000173 PARAMETER Experiment Name: At_42deg_Heat_P Parameter: Organism Value: A. thaliana
  misc_feature: MA Experiment 20000173 PARAMETER Experiment Name: At_42deg_Heat_P Parameter: Plant Line Value: WS
  misc_feature: MA Experiment 20000173 PARAMETER Experiment Name: At_42deg_Heat_P Parameter: Temperature (deg C) Value: 42 vs. 22
  misc_feature: MA Experiment 20000173 PARAMETER Experiment Name: At_42deg_Heat_P Parameter: Timepoint (hr) Value: 6
  misc_feature: MA Experiment 20000173 PARAMETER Experiment Name: At_42deg_Heat_P Parameter: Tissue Value: Aerial
  misc_feature: MA Experiment ID: 20000180 Result: Up-regulated in Transcription
  misc_feature: MA Experiment 20000180 PARAMETER Experiment Name: At_Germinating_Seeds_P Parameter: Age (hr) Value: 24 vs. 0
  misc_feature: MA Experiment 20000180 PARAMETER Experiment Name: At_Germinating_Seeds_P Parameter: Tissue Value: Germinating Seeds
  misc_feature: MA Experiment ID: 20000234 Result: Down-regulated in Transcription
  misc_feature: MA Experiment 20000234 PARAMETER Experiment Name: At_Siliques_P Parameter: Age (day) Value: 21
  misc_feature: MA Experiment 20000234 PARAMETER Experiment Name: At_Siliques_P Parameter: Organism Value: A. thaliana
  misc_feature: MA Experiment 20000234 PARAMETER Experiment Name: At_Siliques_P Parameter: Plant Line Value: WS
  misc_feature: MA Experiment 20000234 PARAMETER Experiment Name: At_Siliques_P Parameter: Tissue Value: Less Than 5mm Siliques vs. Whole Plant
  misc_feature: MA Experiment ID: 20000264 Result: Down-regulated in Transcription
  misc_feature: MA Experiment 20000264 PARAMETER Experiment Name: At_Open_Flower_P Parameter: Age (day) Value: 21
  misc_feature: MA Experiment 20000264 PARAMETER Experiment Name: At_Open_Flower_P Parameter: Plant Line Value: WS
  misc_feature: MA Experiment 20000264 PARAMETER Experiment Name: At_Open_Flower_P Parameter: Tissue Value: Open Flower vs. Whole Plant
  misc_feature: MA Experiment ID: 20000265 Result: Down-regulated in Transcription
  misc_feature: MA Experiment 20000265 PARAMETER Experiment Name: At_Open_Flower_P Parameter: Age (day) Value: 21
  misc_feature: MA Experiment 20000265 PARAMETER Experiment Name: At_Open_Flower_P Parameter: Plant Line Value: WS
  misc_feature: MA Experiment 20000265 PARAMETER Experiment Name: At_Open_Flower_P Parameter: Tissue Value: Closed Flower vs. Whole Plant
  misc_feature: MA Experiment ID: 20000268 Result: Down-regulated in Transcription
  misc_feature: MA Experiment 20000268 PARAMETER Experiment Name: At_100mM_NaCl__P Parameter: Age (day) Value: 14
  misc_feature: MA Experiment 20000268 PARAMETER Experiment Name: At_100mM_NaCl__P Parameter: Organism Value: A. thaliana
  misc_feature: MA Experiment 20000268 PARAMETER Experiment Name: At_100mM_NaCl__P Parameter: Plant Line Value: WS
  misc_feature: MA Experiment 20000268 PARAMETER Experiment Name: At_100mM_NaCl__P Parameter: Timepoint (hr) Value: 6
  misc_feature: MA Experiment 20000268 PARAMETER Experiment Name: At_100mM_NaCl__P Parameter: Tissue Value: Whole Plant
  misc_feature: MA Experiment 20000268 PARAMETER Experiment Name: At_100mM_NaCl__P Parameter: Treatment Value: 100mM NaCl vs. No Treatment
  misc_feature: MA Experiment ID: 20000286 Result: Down-regulated in Transcription
  misc_feature: MA Experiment 20000286 PARAMETER Experiment Name: At_Open_Flower_P Parameter: Age (day) Value: 21
  misc_feature: MA Experiment 20000286 PARAMETER Experiment Name: At_Open_Flower_P Parameter: Plant Line Value: WS
  misc_feature: MA Experiment 20000286 PARAMETER Experiment Name: At_Open_Flower_P Parameter: Tissue Value: Half Open vs. Whole Plant
  misc_feature: MA Experiment ID: 20000437 Result: Down-regulated in Transcription
  misc_feature: MA Experiment 20000437 PARAMETER Experiment Name: At_Drought_P Parameter: Age (day) Value: 8
  misc_feature: MA Experiment 20000437 PARAMETER Experiment Name: At_Drought_P Parameter: Organism Value: A. thaliana
  misc_feature: MA Experiment 20000437 PARAMETER Experiment Name: At_Drought_P Parameter: Plant Line Value: WS
  misc_feature: MA Experiment 20000437 PARAMETER Experiment Name: At_Drought_P Parameter: Timepoint (hr) Value: 24
  misc_feature: MA Experiment 20000437 PARAMETER Experiment Name: At_Drought_P Parameter: Tissue Value: Whole Plant
  misc_feature: MA Experiment 20000437 PARAMETER Experiment Name: At_Drought_P Parameter: Treatment Value: Drought vs. No Drought
  misc_feature: MA Experiment ID: 20000438 Result: Down-regulated in Transcription
  misc_feature: MA Experiment 20000438 PARAMETER Experiment Name: At_Shoots__P Parameter: Age (day) Value: 14
  misc_feature: MA Experiment 20000438 PARAMETER Experiment Name: At_Shoots__P Parameter: Tissue Value: Shoots vs. Whole Plant
  misc_feature: MA Experiment ID: 20000460 Result: Up-regulated in Transcription
  misc_feature: MA Experiment 20000460 PARAMETER Experiment Name: At_10percent_PEG_P Parameter: Age (day) Value: 12
  misc_feature: MA Experiment 20000460 PARAMETER Experiment Name: At_10percent_PEG_P Parameter: Organism Value: A. thaliana
  misc_feature: MA Experiment 20000460 PARAMETER Experiment Name: At_10percent_PEG_P Parameter: Plant Line Value: WS
  misc_feature: MA Experiment 20000460 PARAMETER Experiment Name: At_10percent_PEG_P Parameter: Timepoint (day) Value: 12
  misc_feature: MA Experiment 20000460 PARAMETER Experiment Name: At_10percent_PEG_P Parameter: Tissue Value: Whole Plant
  misc_feature: MA Experiment 20000460 PARAMETER Experiment Name: At_10percent_PEG_P Parameter: Treatment Value: 10percent PEG vs. No Treatment
  misc_feature: MA Experiment ID: 20000527 Result: Up-regulated in Transcription
  misc_feature: MA Experiment 20000527 PARAMETER Experiment Name: At_10percent_PEG_P Parameter: Age (day) Value: 20
  misc_feature: MA Experiment 20000527 PARAMETER Experiment Name: At_10percent_PEG_P Parameter: Organism Value: A. thaliana
  misc_feature: MA Experiment 20000527 PARAMETER Experiment Name: At_10percent_PEG_P Parameter: Plant Line Value: WS
  misc_feature: MA Experiment 20000527 PARAMETER Experiment Name: At_10percent_PEG_P Parameter: Timepoint (day) Value: 20
  misc_feature: MA Experiment 20000527 PARAMETER Experiment Name: At_10percent_PEG_P Parameter: Tissue Value: Whole Plant
  misc_feature: MA Experiment 20000527 PARAMETER Experiment Name: At_10percent_PEG_P Parameter: Treatment Value: 10percent PEG vs. No Treatment
  misc_feature: MA Experiment ID: 20000573 Result: Down-regulated in Transcription
  misc_feature: MA Experiment 20000573 PARAMETER Experiment Name: At_100uM_ABA_Mutants__P Parameter: Organism Value: A. thaliana
  misc_feature: MA Experiment 20000573 PARAMETER Experiment Name: At_100uM_ABA_Mutants__P Parameter: Plant Line Value: CS22 vs. Ler wt
  misc_feature: MA Experiment 20000573 PARAMETER Experiment Name: At_100uM_ABA_Mutants__P Parameter: Timepoint (hr) Value: N/A
  misc_feature: MA Experiment 20000573 PARAMETER Experiment Name: At_100uM_ABA_Mutants__P Parameter: Tissue Value: Whole Plant
  misc_feature: MA Experiment 20000573 PARAMETER Experiment Name: At_100uM_ABA_Mutants__P Parameter: Treatment Value: None
  misc_feature: MA Experiment ID: 20000574 Result: Down-regulated in Transcription
  misc_feature: MA Experiment 20000574 PARAMETER Experiment Name: At_100uM_ABA_Mutants__P Parameter: Organism Value: A. thaliana
  misc_feature: MA Experiment 20000574 PARAMETER Experiment Name: At_100uM_ABA_Mutants__P Parameter: Plant Line Value: CS23 vs. Ler wt
  misc_feature: MA Experiment 20000574 PARAMETER Experiment Name: At_100uM_ABA_Mutants__P Parameter: Timepoint (hr) Value: N/A
  misc_feature: MA Experiment 20000574 PARAMETER Experiment Name: At_100uM_ABA_Mutants__P Parameter: Tissue Value: Whole Plant
  misc_feature: MA Experiment 20000574 PARAMETER Experiment Name: At_100uM_ABA_Mutants__P Parameter: Treatment Value: None
  misc_feature: MA Experiment ID: 20000794 Result: Down-regulated in Transcription
  misc_feature: MA Experiment 20000794 PARAMETER Experiment Name: At_Petals_P Parameter: Age (day) Value: 23-25 days
  misc_feature: MA Experiment 20000794 PARAMETER Experiment Name: At_Petals_P Parameter: Plant Line Value: WS
  misc_feature: MA Experiment 20000794 PARAMETER Experiment Name: At_Petals_P Parameter: Tissue Value: Petals vs. Whole plant
  misc_feature: MA Experiment ID: 20001247 Result: Up-regulated in Transcription
  misc_feature: MA Experiment 20001247 PARAMETER Experiment Name: At_Far-red-induction_P Parameter: Age (day) Value: 7
  misc_feature: MA Experiment 20001247 PARAMETER Experiment Name: At_Far-red-induction_P Parameter: Light Value: Far-red vs. White
  misc_feature: MA Experiment 20001247 PARAMETER Experiment Name: At_Far-red-induction_P Parameter: Organism Value: A. thaliana
  misc_feature: MA Experiment 20001247 PARAMETER Experiment Name: At_Far-red-induction_P Parameter: Plant Line Value: Columbia
  misc_feature: MA Experiment 20001247 PARAMETER Experiment Name: At_Far-red-induction_P Parameter: Timepoint (hr) Value: 1
  misc_feature: MA Experiment 20001247 PARAMETER Experiment Name: At_Far-red-induction_P Parameter: Tissue Value: Whole Plant
  misc_feature: MA Experiment ID: 20001557 Result: Up-regulated in Transcription
  misc_feature: MA Experiment 20001557 PARAMETER Experiment Name: At_Drought_Soil_Dry_P Parameter: Age (day) Value: 27
  misc_feature: MA Experiment 20001557 PARAMETER Experiment Name: At_Drought_Soil_Dry_P Parameter: Organism Value: A. thaliana
  misc_feature: MA Experiment 20001557 PARAMETER Experiment Name: At_Drought_Soil_Dry_P Parameter: Plant Line Value: WS
  misc_feature: MA Experiment 20001557 PARAMETER Experiment Name: At_Drought_Soil_Dry_P Parameter: Post Timepoint (hr) Value: 3
  misc_feature: MA Experiment 20001557 PARAMETER Experiment Name: At_Drought_Soil_Dry_P Parameter: Post-Treatment Value: Re-Water vs. No Drought
  misc_feature: MA Experiment 20001557 PARAMETER Experiment Name: At_Drought_Soil_Dry_P Parameter: Timepoint (day) Value: 13
  misc_feature: MA Experiment 20001557 PARAMETER Experiment Name: At_Drought_Soil_Dry_P Parameter: Treatment Value: Drought vs. No Drought
  misc_feature: MA Experiment ID: 20001558 Result: Up-regulated in Transcription
  misc_feature: MA Experiment 20001558 PARAMETER Experiment Name: At_Drought_Soil_Dry_P Parameter: Age (day) Value: 27
  misc_feature: MA Experiment 20001558 PARAMETER Experiment Name: At_Drought_Soil_Dry_P Parameter: Organism Value: A. thaliana
  misc_feature: MA Experiment 20001558 PARAMETER Experiment Name: At_Drought_Soil_Dry_P Parameter: Plant Line Value: WS
  misc_feature: MA Experiment 20001558 PARAMETER Experiment Name: At_Drought_Soil_Dry_P Parameter: Post Timepoint (hr) Value: 6
  misc_feature: MA Experiment 20001558 PARAMETER Experiment Name: At_Drought_Soil_Dry_P Parameter: Post-Treatment Value: Re-Water vs. No Drought
  misc_feature: MA Experiment 20001558 PARAMETER Experiment Name: At_Drought_Soil_Dry_P Parameter: Timepoint (day) Value: 13
  misc_feature: MA Experiment 20001558 PARAMETER Experiment Name: At_Drought_Soil_Dry_P Parameter: Treatment Value: Drought vs. No Drought
  misc_feature: MA Experiment ID: 20001560 Result: Up-regulated in Transcription
  misc_feature: MA Experiment 20001560 PARAMETER Experiment Name: At_Drought_Soil_Dry_P Parameter: Age (day) Value: 28
  misc_feature: MA Experiment 20001560 PARAMETER Experiment Name: At_Drought_Soil_Dry_P Parameter: Organism Value: A. thaliana
  misc_feature: MA Experiment 20001560 PARAMETER Experiment Name: At_Drought_Soil_Dry_P Parameter: Plant Line Value: WS
  misc_feature: MA Experiment 20001560 PARAMETER Experiment Name: At_Drought_Soil_Dry_P Parameter: Post Timepoint (hr) Value: None
  misc_feature: MA Experiment 20001560 PARAMETER Experiment Name: At_Drought_Soil_Dry_P Parameter: Post-Treatment Value: None
  misc_feature: MA Experiment 20001560 PARAMETER Experiment Name: At_Drought_Soil_Dry_P Parameter: Timepoint (day) Value: 14
  misc_feature: MA Experiment 20001560 PARAMETER Experiment Name: At_Drought_Soil_Dry_P Parameter: Treatment Value: Drought vs. No Drought
  misc_feature: MA Experiment ID: 20001757 Result: Down-regulated in Transcription
  misc_feature: MA Experiment 20001757 PARAMETER Experiment Name: At_50mM_NH4NO3_L-to-H_P Parameter: Timepoint (hr) Value: 6
  misc_feature: MA Experiment 20001757 PARAMETER Experiment Name: At_50mM_NH4NO3_L-to-H_P Parameter: Tissue Value: Leaf
  misc_feature: MA Experiment 20001757 PARAMETER Experiment Name: At_50mM_NH4NO3_L-to-H_P Parameter: Treatment Value: 50mM NH4NO3 vs 100mM Mannitol
  misc_feature: MA Experiment ID: 20001911 Result: Down-regulated in Transcription
  misc_feature: MA Experiment 20001911 PARAMETER Experiment Name: At_Drought_Reproduction_P Parameter: Age (day) Value: 40
  misc_feature: MA Experiment 20001911 PARAMETER Experiment Name: At_Drought_Reproduction_P Parameter: Organism Value: A. thaliana
  misc_feature: MA Experiment 20001911 PARAMETER Experiment Name: At_Drought_Reproduction_P Parameter: Plant Line Value: WS
  misc_feature: MA Experiment 20001911 PARAMETER Experiment Name: At_Drought_Reproduction_P Parameter: Timepoint (day) Value: 10
  misc_feature: MA Experiment 20001911 PARAMETER Experiment Name: At_Drought_Reproduction_P Parameter: Tissue Value: Flowers
  misc_feature: MA Experiment 20001911 PARAMETER Experiment Name: At_Drought_Reproduction_P Parameter: Treatment Value: Drought vs. No Drought
atatttgattccttttctctctcatacgatctgcacaccactactaagaacaacagagctagagagacttgcaataattgtaaaacatgattggaacaagcttccccgaggatcttgattgtggcaacttctttgacaacatggatgatctcatggactttcccggtggagatatcgatgtcggtttcggcataggtgactccgactctttccctaccatctggaccactcatcacgacacgtggcccgccgcttctgatcctctcttctcttccaacaccaactctgattcatcacctgagctctatgttccgtttgaggacattgttaaggtggaaagacctccaacctttgtagaggaaacattggttgagaagaaggaagattcgttttcgacaaacactgattcatcatcttctcatagccaattcaggagctcaagtccagtgtcggttctcgagagcagctcctcctcgtctaaaaccaccaacacaacctcccttgttctccctggaaagcacggtcgtccacgcacaaaacgccctcgtccacctgtccaggataaagatagagtcaaagacaatgtgtgcggtggtgactcgcgcctcatcattagaataccgaaacagtttctctctgatcacaacaagatgatcaacaagaagaagaagaagaaggccaagattacttcttcctcttcttcgtccgggattgatcttgaagtcaatggaaacaacgtcgattcgtattcttcagagcaatatccgcttaggaaatgtatgcactgtgaggtcaccaagactccacagtggaggcttggtccaatgggtccaaagacactttgcaatgcgtgcggtgtacgttacaaatcagggaggcttttcccggagtaccgtccagctgctagtccaacatttactccagctcttcactcaaactcacacaagaaagtggctgaaatgagaaacaagagatgcagtgatggtagctacataaccgaagagaatgatctgcaaggactgattccgaacaatgcctacattggcgtagactaaaacctagagaagatgattcgatttccatgcgttgaagtgattagatatgccaggagtaggaaagagtcagtgagaagaaaagtttttagctttagaagagatgaaggaagagagcaatcaattggagggattaaaagttagatgagaattgattgtgtttgtattattttgtatttgtagtgtgaatgggcaaaaaactcttgaaacagaggaaaagtaagttgaggaagagcagaagattttgaagacattagagaatcattaggtgttgagtattacattaaatcttcctcttcttcttttgttctttcaattctttgtatttttattgtgaggattctcttttttttttttttttttgtagttgatttgtttattgtatctgataaaaagaatgttacttg

SEQ ID NO: 37580 - protein, 322 aa, Arabidopsis thaliana
  peptide (1)..(322): Ceres Seq. ID no. 13494019
  misc_feature (229)..(296): Homolog of NCBI NO: 37572449 NR Description: AG-motif binding protein-4 [Nicotiana tabacum]
  misc_feature (79)..(296): Homolog of NCBI NO: 37572447 NR Description: AG-motif binding protein-3 [Nicotiana tabacum]
  misc_feature (193)..(295): Homolog of NCBI NO: 15223086 NR Description: GATA zinc finger protein [Arabidopsis thaliana]
  misc_feature (115)..(295): Homolog of NCBI NO: 15223085 NR Description: GATA zinc finger protein [Arabidopsis thaliana]
  misc_feature (19)..(296): Homolog of NCBI NO: 15239503 NR Description: GATA zinc finger protein [Arabidopsis thaliana]
  misc_feature (93)..(301): Homolog of NCBI NO: 15451574 NR Description: Putative GATA-1 zinc finger protein [Oryza sativa]
  misc_feature (115)..(295): Homolog of NCBI NO: 12711287 NR Description: GATA-1 zinc finger protein [Nicotiana tabacum]
  misc_feature (2)..(301): Homolog of NCBI NO: 37572443 NR Description: AG-motif binding protein-1 [Nicotiana tabacum]
  misc_feature (2)..(301): Homolog of NCBI NO: 37572451 NR Description: AG-motif binding protein-5 [Nicotiana tabacum]
  misc_feature (1)..(322): Homolog of NCBI NO: 15233101 NR Description: GATA zinc finger protein [Arabidopsis thaliana]
MIGTSFPEDLDCGNFFDNMDDLMDFPGGDIDVGFGIGDSDSFPTIWTTHHDTWPAASDPLFSSNTNSDSSPELYVPFEDIVKVERPPTFVEETLVEKKEDSFSTNTDSSSSHSQFRSSSPVSVLESSSSSSKTTNTTSLVLPGKHGRPRTKRPRPPVQDKDRVKDNVCGGDSRLIIRIPKQFLSDHNKMINKKKKKKAKITSSSSSSGIDLEVNGNNVDSYSSEQYPLRKCMHCEVTKTPQWRLGPMGPKTLCNACGVRYKSGRLFPEYRPAASPTFTPALHSNSHKKVAEMRNKRCSDGSYITEENDLQGLIPNNAYIGVD

SEQ ID NO: 37581 - protein, 304 aa, Arabidopsis thaliana
  peptide (1)..(304): Ceres Seq. ID no. 13494020
  misc_feature (211)..(278): Homolog of NCBI NO: 37572449 NR Description: AG-motif binding protein-4 [Nicotiana tabacum]
  misc_feature (61)..(278): Homolog of NCBI NO: 37572447 NR Description: AG-motif binding protein-3 [Nicotiana tabacum]
  misc_feature (175)..(277): Homolog of NCBI NO: 15223086 NR Description: GATA zinc finger protein [Arabidopsis thaliana]
  misc_feature (97)..(277): Homolog of NCBI NO: 15223085 NR Description: GATA zinc finger protein [Arabidopsis thaliana]
  misc_feature (1)..(278): Homolog of NCBI NO: 15239503 NR Description: GATA zinc finger protein [Arabidopsis thaliana]
  misc_feature (75)..(283): Homolog of NCBI NO: 15451574 NR Description: Putative GATA-1 zinc finger protein [Oryza sativa]
  misc_feature (97)..(277): Homolog of NCBI NO: 12711287 NR Description: GATA-1 zinc finger protein [Nicotiana tabacum]
  misc_feature (1)..(283): Homolog of NCBI NO: 37572443 NR Description: AG-motif binding protein-1 [Nicotiana tabacum]
  misc_feature (1)..(283): Homolog of NCBI NO: 37572451 NR Description: AG-motif binding protein-5 [Nicotiana tabacum]
  misc_feature (1)..(304): Homolog of NCBI NO: 15233101 NR Description: GATA zinc finger protein [Arabidopsis thaliana]
MDDLMDFPGGDIDVGFGIGDSDSFPTIWTTHHDTWPAASDPLFSSNTNSDSSPELYVPFEDIVKVERPPTFVEETLVEKKEDSFSTNTDSSSSHSQFRSSSPVSVLESSSSSSKTTNTTSLVLPGKHGRPRTKRPRPPVQDKDRVKDNVCGGDSRLIIRIPKQFLSDHNKMINKKKKKKAKITSSSSSSGIDLEVNGNNVDSYSSEQYPLRKCMHCEVTKTPQWRLGPMGPKTLCNACGVRYKSGRLFPEYRPAASPTFTPALHSNSHKKVAEMRNKRCSDGSYITEENDLQGLIPNNAYIGVD

SEQ ID NO: 37582 - protein, 300 aa, Arabidopsis thaliana
  peptide (1)..(300): Ceres Seq. ID no. 13494021
  misc_feature (207)..(274): Homolog of NCBI NO: 37572449 NR Description: AG-motif binding protein-4 [Nicotiana tabacum]
  misc_feature (57)..(274): Homolog of NCBI NO: 37572447 NR Description: AG-motif binding protein-3 [Nicotiana tabacum]
  misc_feature (171)..(273): Homolog of NCBI NO: 15223086 NR Description: GATA zinc finger protein [Arabidopsis thaliana]
  misc_feature (93)..(273): Homolog of NCBI NO: 15223085 NR Description: GATA zinc finger protein [Arabidopsis thaliana]
  misc_feature (1)..(274): Homolog of NCBI NO: 15239503 NR Description: GATA zinc finger protein [Arabidopsis thaliana]
  misc_feature (71)..(279): Homolog of NCBI NO: 15451574 NR Description: Putative GATA-1 zinc finger protein [Oryza sativa]
  misc_feature (93)..(273): Homolog of NCBI NO: 12711287 NR Description: GATA-1 zinc finger protein [Nicotiana tabacum]
  misc_feature (1)..(279): Homolog of NCBI NO: 37572443 NR Description: AG-motif binding protein-1 [Nicotiana tabacum]
  misc_feature (1)..(279): Homolog of NCBI NO: 37572451 NR Description: AG-motif binding protein-5 [Nicotiana tabacum]
  misc_feature (1)..(300): Homolog of NCBI NO: 15233101 NR Description: GATA zinc finger protein [Arabidopsis thaliana]
MDFPGGDIDVGFGIGDSDSFPTIWTTHHDTWPAASDPLFSSNTNSDSSPELYVPFEDIVKVERPPTFVEETLVEKKEDSFSTNTDSSSSHSQFRSSSPVSVLESSSSSSKTTNTTSLVLPGKHGRPRTKRPRPPVQDKDRVKDNVCGGDSRLIIRIPKQFLSDHNKMINKKKKKKAKITSSSSSSGIDLEVNGNNVDSYSSEQYPLRKCMHCEVTKTPQWRLGPMGPKTLCNACGVRYKSGRLFPEYRPAASPTFTPALHSNSHKKVAEMRNKRCSDGSYITEENDLQGLIPNNAYIGVD

SEQ ID NO: 37583 - DNA, 1183 bp, Arabidopsis thaliana
  misc_feature (1)..(1183): Ceres Seq. ID no. 12321994
  misc_feature: MA Experiment ID: 108461 Result: Up-regulated in Transcription
  misc_feature: MA Experiment 108461 PARAMETER Experiment Name: At_Germinating_Seeds_cDNA_P Parameter: Age (day) Value: 1 vs. 0
  misc_feature: MA Experiment 108461 PARAMETER Experiment Name: At_Germinating_Seeds_cDNA_P Parameter: Tissue Value: Germinating Seeds
  misc_feature: MA Experiment ID: 108462 Result: Up-regulated in Transcription
  misc_feature: MA Experiment 108462 PARAMETER Experiment Name: At_Germinating_Seeds_cDNA_P Parameter: Age (day) Value: 2 vs. 0
  misc_feature: MA Experiment 108462 PARAMETER Experiment Name: At_Germinating_Seeds_cDNA_P Parameter: Tissue Value: Germinating Seeds
  misc_feature: MA Experiment ID: 108463 Result: Up-regulated in Transcription
  misc_feature: MA Experiment 108463 PARAMETER Experiment Name: At_Germinating_Seeds_cDNA_P Parameter: Age (day) Value: 3 vs. 0
  misc_feature: MA Experiment 108463 PARAMETER Experiment Name: At_Germinating_Seeds_cDNA_P Parameter: Tissue Value: Germinating Seeds
  misc_feature: MA Experiment ID: 108464 Result: Up-regulated in Transcription
  misc_feature: MA Experiment 108464 PARAMETER Experiment Name: At_Germinating_Seeds_cDNA_P Parameter: Age (day) Value: 4 vs. 0
  misc_feature: MA Experiment 108464 PARAMETER Experiment Name: At_Germinating_Seeds_cDNA_P Parameter: Tissue Value: Germinating Seeds
  misc_feature: MA Experiment ID: 108489 Result: Up-regulated in Transcription
  misc_feature: MA Experiment ID: 108501 Result: Down-regulated in Transcription
  misc_feature: MA Experiment 108501 PARAMETER Experiment Name: At_ap2_floral_buds_cDNA_P Parameter: Plant Line Value: ap2 (Ler.)
  misc_feature: MA Experiment 108501 PARAMETER Experiment Name: At_ap2_floral_buds_cDNA_P Parameter: Tissue Value: Closed Flower
  misc_feature: MA Experiment ID: 108569 Result: Down-regulated in Transcription
  misc_feature: MA Experiment 108569 PARAMETER Experiment Name: At_0.001%_MeJA__cDNA_P Parameter: Timepoint (hr) Value: 6
  misc_feature: MA Experiment 108569 PARAMETER Experiment Name: At_0.001%_MeJA__cDNA_P Parameter: Tissue Value: Aerial
  misc_feature: MA Experiment 108569 PARAMETER Experiment Name: At_0.001%_MeJA__cDNA_P Parameter: Treatment Value: 0.001% MeJA vs. No Treatment
  misc_feature: MA Experiment ID: 108573 Result: Up-regulated in Transcription
  misc_feature: MA Experiment 108573 PARAMETER Experiment Name: At_Drought_cDNA_P Parameter: Timepoint (hr) Value: 6
  misc_feature: MA Experiment 108573 PARAMETER Experiment Name: At_Drought_cDNA_P Parameter: Tissue Value: Aerial
  misc_feature: MA Experiment 108573 PARAMETER Experiment Name: At_Drought_cDNA_P Parameter: Treatment Value: Drought vs. No Drought
  misc_feature: MA Experiment ID: 108574 Result: Down-regulated in Transcription
  misc_feature: MA Experiment 108574 PARAMETER Experiment Name: At_Wounding__cDNA_P Parameter: Timepoint (hr) Value: 1
  misc_feature: MA Experiment 108574 PARAMETER Experiment Name: At_Wounding__cDNA_P Parameter: Tissue Value: Aerial
  misc_feature: MA Experiment 108574 PARAMETER Experiment Name: At_Wounding__cDNA_P Parameter: Treatment Value: Wounding vs. No Wounding
  misc_feature: MA Experiment ID: 108577 Result: Down-regulated in Transcription
  misc_feature: MA Experiment 108577 PARAMETER Experiment Name: At_42deg_Heat_cDNA_P Parameter: Temperature (deg C) Value: 42 vs. 22
  misc_feature: MA Experiment 108577 PARAMETER Experiment Name: At_42deg_Heat_cDNA_P Parameter: Timepoint (hr) Value: 6
  misc_feature: MA Experiment 108577 PARAMETER Experiment Name: At_42deg_Heat_cDNA_P Parameter: Tissue Value: Aerial
  misc_feature: MA Experiment ID: 108579 Result: Down-regulated in Transcription
  misc_feature: MA Experiment 108579 PARAMETER Experiment Name: At_4deg_Cold_cDNA_P Parameter: Temperature (deg C) Value: 4 vs. 22
  misc_feature: MA Experiment 108579 PARAMETER Experiment Name: At_4deg_Cold_cDNA_P Parameter: Timepoint (hr) Value: 6
  misc_feature: MA Experiment 108579 PARAMETER Experiment Name: At_4deg_Cold_cDNA_P Parameter: Tissue Value: Aerial
  misc_feature: MA Experiment ID: 108594 Result: Up-regulated in Transcription
  misc_feature: MA Experiment 108594 PARAMETER Experiment Name: At_Ler-rhl_Root_cDNA_P Parameter: Plant Line Value: null
  misc_feature: MA Experiment ID: 108595 Result: Down-regulated in Transcription
  misc_feature: MA Experiment 108595 PARAMETER Experiment Name: At_Ler-pi_Ovule_cDNA_P Parameter: Plant Line Value: null
  misc_feature: MA Experiment ID: 108668 Result: Down-regulated in Transcription
  misc_feature: MA Experiment 108668 PARAMETER Experiment Name: At_2mM_SA_cDNA_P Parameter: Plant Line Value: WS
  misc_feature: MA Experiment 108668 PARAMETER Experiment Name: At_2mM_SA_cDNA_P Parameter: Timepoint (hr) Value: 6
  misc_feature: MA Experiment 108668 PARAMETER Experiment Name: At_2mM_SA_cDNA_P Parameter: Treatment Value: 2mM SA vs. No Treatment
  misc_feature: MA Experiment ID: 20000069 Result: Up-regulated in Transcription
  misc_feature: MA Experiment 20000069 PARAMETER Experiment Name: At_100uM_ABA_Mutants_cDNA_P Parameter: Plant Line Value: CS23
  misc_feature: MA Experiment 20000069 PARAMETER Experiment Name: At_100uM_ABA_Mutants_cDNA_P Parameter: Timepoint (hr) Value: 6
  misc_feature: MA Experiment 20000069 PARAMETER Experiment Name: At_100uM_ABA_Mutants_cDNA_P Parameter: Tissue Value: Aerial
  misc_feature: MA Experiment 20000069 PARAMETER Experiment Name: At_100uM_ABA_Mutants_cDNA_P Parameter: Treatment Value: 100uM ABA vs. No Treatment
  misc_feature: MA Experiment ID: 20000071 Result: Up-regulated in Transcription
  misc_feature: MA Experiment 20000071 PARAMETER Experiment Name: At_100uM_ABA_Mutants_cDNA_P Parameter: Plant Line Value: CS8104
  misc_feature: MA Experiment 20000071 PARAMETER Experiment Name: At_100uM_ABA_Mutants_cDNA_P Parameter: Timepoint (hr) Value: 6
  misc_feature: MA Experiment 20000071 PARAMETER Experiment Name: At_100uM_ABA_Mutants_cDNA_P Parameter: Tissue Value: Aerial
  misc_feature: MA Experiment 20000071 PARAMETER Experiment Name: At_100uM_ABA_Mutants_cDNA_P Parameter: Treatment Value: 100uM ABA vs. No Treatment
  misc_feature: MA Experiment ID: 20000072 Result: Up-regulated in Transcription
  misc_feature: MA Experiment 20000072 PARAMETER Experiment Name: At_100uM_ABA_Mutants_cDNA_P Parameter: Plant Line Value: CS8105
  misc_feature: MA Experiment 20000072 PARAMETER Experiment Name: At_100uM_ABA_Mutants_cDNA_P Parameter: Timepoint (hr) Value: 6
  misc_feature: MA Experiment 20000072 PARAMETER Experiment Name: At_100uM_ABA_Mutants_cDNA_P Parameter: Tissue Value: Aerial
  misc_feature: MA Experiment 20000072 PARAMETER Experiment Name: At_100uM_ABA_Mutants_cDNA_P Parameter: Treatment Value: 100uM ABA vs. No Treatment
  misc_feature: MA Experiment ID: 20000089 Result: Up-regulated in Transcription
  misc_feature: MA Experiment ID: 20000090 Result: Up-regulated in Transcription
  misc_feature: MA Experiment ID: 20000112 Result: Down-regulated in Transcription
  misc_feature: MA Experiment 20000112 PARAMETER Experiment Name: At_42deg_Heat_cDNA_P Parameter: Temperature (deg C) Value: 42 vs. 22
  misc_feature: MA Experiment 20000112 PARAMETER Experiment Name: At_42deg_Heat_cDNA_P Parameter: Timepoint (hr) Value: 2
  misc_feature: MA Experiment 20000112 PARAMETER Experiment Name: At_42deg_Heat_cDNA_P Parameter: Tissue Value: Aerial
  misc_feature: MA Experiment ID: 20000113 Result: Down-regulated in Transcription
  misc_feature: MA Experiment 20000113 PARAMETER Experiment Name: At_42deg_Heat_cDNA_P Parameter: Temperature (deg C) Value: 42 vs. 22
  misc_feature: MA Experiment 20000113 PARAMETER Experiment Name: At_42deg_Heat_cDNA_P Parameter: Timepoint (hr) Value: 8
  misc_feature: MA Experiment 20000113 PARAMETER Experiment Name: At_42deg_Heat_cDNA_P Parameter: Tissue Value: Aerial
  misc_feature: MA Experiment ID: 20000173 Result: Down-regulated in Transcription
  misc_feature: MA Experiment 20000173 PARAMETER Experiment Name: At_42deg_Heat_P Parameter: Age (day) Value: 14
  misc_feature: MA Experiment 20000173 PARAMETER Experiment Name: At_42deg_Heat_P Parameter: Organism Value: A. thaliana
  misc_feature: MA Experiment 20000173 PARAMETER Experiment Name: At_42deg_Heat_P Parameter: Plant Line Value: WS
  misc_feature: MA Experiment 20000173 PARAMETER Experiment Name: At_42deg_Heat_P Parameter: Temperature (deg C) Value: 42 vs. 22
  misc_feature: MA Experiment 20000173 PARAMETER Experiment Name: At_42deg_Heat_P Parameter: Timepoint (hr) Value: 6
  misc_feature: MA Experiment 20000173 PARAMETER Experiment Name: At_42deg_Heat_P Parameter: Tissue Value: Aerial
  misc_feature: MA Experiment ID: 20000179 Result: Up-regulated in Transcription
  misc_feature: MA Experiment 20000179 PARAMETER Experiment Name: At_Germinating_Seeds_P Parameter: Age (hr) Value: 6 vs. 0
  misc_feature: MA Experiment 20000179 PARAMETER Experiment Name: At_Germinating_Seeds_P Parameter: Tissue Value: Germinating Seeds
  misc_feature: MA Experiment ID: 20000180 Result: Up-regulated in Transcription
  misc_feature: MA Experiment 20000180 PARAMETER Experiment Name: At_Germinating_Seeds_P Parameter: Age (hr) Value: 24 vs. 0
  misc_feature: MA Experiment 20000180 PARAMETER Experiment Name: At_Germinating_Seeds_P Parameter: Tissue Value: Germinating Seeds
  misc_feature: MA Experiment ID: 20000182 Result: Down-regulated in Transcription
  misc_feature: MA Experiment 20000182 PARAMETER Experiment Name: At_2mM_SA_P Parameter: Age (day) Value: 14
  misc_feature: MA Experiment 20000182 PARAMETER Experiment Name: At_2mM_SA_P Parameter: Organism Value: A. thaliana
  misc_feature: MA Experiment 20000182 PARAMETER Experiment Name: At_2mM_SA_P Parameter: Plant Line Value: WS
  misc_feature: MA Experiment 20000182 PARAMETER Experiment Name: At_2mM_SA_P Parameter: Timepoint (hr) Value: 6
  misc_feature: MA Experiment 20000182 PARAMETER Experiment Name: At_2mM_SA_P Parameter: Tissue Value: Aerial
  misc_feature: MA Experiment 20000182 PARAMETER Experiment Name: At_2mM_SA_P Parameter: Treatment Value: 2mM SA vs. No Treatment
  misc_feature: MA Experiment ID: 20000185 Result: Down-regulated in Transcription
  misc_feature: MA Experiment 20000185 PARAMETER Experiment Name: At_Roots__P Parameter: Age (day) Value: 7 vs. 21
  misc_feature: MA Experiment 20000185 PARAMETER Experiment Name: At_Roots__P Parameter: Organism Value: A. thaliana
  misc_feature: MA Experiment 20000185 PARAMETER Experiment Name: At_Roots__P Parameter: Tissue Value: Roots vs. Whole Plant
  misc_feature: MA Experiment ID: 20000224 Result: Down-regulated in Transcription
  misc_feature: MA Experiment ID: 20000227 Result: Down-regulated in Transcription
  misc_feature: MA Experiment 20000227 PARAMETER Experiment Name: At_Root-Tips-vs-Tops_P Parameter: Tissue Value: Root Tips vs. Root Tops
  misc_feature: MA Experiment ID: 20000234 Result: Down-regulated in Transcription
  misc_feature: MA Experiment 20000234 PARAMETER Experiment Name: At_Siliques_P Parameter: Age (day) Value: 21
  misc_feature: MA Experiment 20000234 PARAMETER Experiment Name: At_Siliques_P Parameter: Organism Value: A. thaliana
  misc_feature: MA Experiment 20000234 PARAMETER Experiment Name: At_Siliques_P Parameter: Plant Line Value: WS
  misc_feature: MA Experiment 20000234 PARAMETER Experiment Name: At_Siliques_P Parameter: Tissue Value: Less Than 5mm Siliques vs. Whole Plant
  misc_feature: MA Experiment ID: 20000235 Result: Down-regulated in Transcription
  misc_feature: MA Experiment 20000235 PARAMETER Experiment Name: At_Siliques_P Parameter: Age (day) Value: 21
  misc_feature: MA Experiment 20000235 PARAMETER Experiment Name: At_Siliques_P Parameter: Organism Value: A. thaliana
  misc_feature: MA Experiment 20000235 PARAMETER Experiment Name: At_Siliques_P Parameter: Plant Line Value: WS
  misc_feature: MA Experiment 20000235 PARAMETER Experiment Name: At_Siliques_P Parameter: Tissue Value: 5-10mm Siliques vs. Whole Plant
  misc_feature: MA Experiment ID: 20000264 Result: Down-regulated in Transcription
  misc_feature: MA Experiment 20000264 PARAMETER Experiment Name: At_Open_Flower_P Parameter: Age (day) Value: 21
  misc_feature: MA Experiment 20000264 PARAMETER Experiment Name: At_Open_Flower_P Parameter: Plant Line Value: WS
  misc_feature: MA Experiment 20000264 PARAMETER Experiment Name: At_Open_Flower_P Parameter: Tissue Value: Open Flower vs. Whole Plant
  misc_feature: MA Experiment ID: 20000265 Result: Down-regulated in Transcription
  misc_feature: MA Experiment 20000265 PARAMETER Experiment Name: At_Open_Flower_P Parameter: Age (day) Value: 21
  misc_feature: MA Experiment 20000265 PARAMETER Experiment Name: At_Open_Flower_P Parameter: Plant Line Value: WS
  misc_feature: MA Experiment 20000265 PARAMETER Experiment Name: At_Open_Flower_P Parameter: Tissue Value: Closed Flower vs. Whole Plant
  misc_feature: MA Experiment ID: 20000268 Result: Down-regulated in Transcription
  misc_feature: MA Experiment 20000268 PARAMETER Experiment Name: At_100mM_NaCl__P Parameter: Age (day) Value: 14
  misc_feature: MA Experiment 20000268 PARAMETER Experiment Name: At_100mM_NaCl__P Parameter: Organism Value: A. thaliana
  misc_feature: MA Experiment 20000268 PARAMETER Experiment Name: At_100mM_NaCl__P Parameter: Plant Line Value: WS
  misc_feature: MA Experiment 20000268 PARAMETER Experiment Name: At_100mM_NaCl__P Parameter: Timepoint (hr) Value: 6
  misc_feature: MA Experiment 20000268 PARAMETER Experiment Name: At_100mM_NaCl__P Parameter: Tissue Value: Whole Plant
  misc_feature: MA Experiment 20000268 PARAMETER Experiment Name: At_100mM_NaCl__P Parameter: Treatment Value: 100mM NaCl vs. No Treatment
  misc_feature: MA Experiment ID: 20000286 Result: Down-regulated in Transcription
  misc_feature: MA Experiment 20000286 PARAMETER Experiment Name: At_Open_Flower_P Parameter: Age (day) Value: 21
  misc_feature: MA Experiment 20000286 PARAMETER Experiment Name: At_Open_Flower_P Parameter: Plant Line Value: WS
  misc_feature: MA Experiment 20000286 PARAMETER Experiment Name: At_Open_Flower_P Parameter: Tissue Value: Half Open vs. Whole Plant
  misc_feature: MA Experiment ID: 20000308 Result: Down-regulated in Transcription
  misc_feature: MA Experiment 20000308 PARAMETER Experiment Name: At_100mM_NaCl__P Parameter: Age (day) Value: 17
  misc_feature: MA Experiment 20000308 PARAMETER Experiment Name: At_100mM_NaCl__P Parameter: Organism Value: A. thaliana
  misc_feature: MA Experiment 20000308 PARAMETER Experiment Name: At_100mM_NaCl__P Parameter: Plant Line Value: WS
  misc_feature: MA Experiment 20000308 PARAMETER Experiment Name: At_100mM_NaCl__P Parameter: Timepoint (hr) Value: 72
  misc_feature: MA Experiment 20000308 PARAMETER Experiment Name: At_100mM_NaCl__P Parameter: Tissue Value: Whole Plant
  misc_feature: MA Experiment 20000308 PARAMETER Experiment Name: At_100mM_NaCl__P Parameter: Treatment Value: 100mM NaCl vs. No Treatment
  misc_feature: MA Experiment ID: 20000436 Result: Down-regulated in Transcription
  misc_feature: MA Experiment 20000436 PARAMETER Experiment Name: At_Drought_P Parameter: Age (day) Value: 7
  misc_feature: MA Experiment 20000436 PARAMETER Experiment Name: At_Drought_P Parameter: Organism Value: A. thaliana
  misc_feature: MA Experiment 20000436 PARAMETER Experiment Name: At_Drought_P Parameter: Plant Line Value: WS
  misc_feature: MA Experiment 20000436 PARAMETER Experiment Name: At_Drought_P Parameter: Timepoint (hr) Value: 12
  misc_feature: MA Experiment 20000436 PARAMETER Experiment Name: At_Drought_P Parameter: Tissue Value: Whole Plant
  misc_feature: MA Experiment 20000436 PARAMETER Experiment Name: At_Drought_P Parameter: Treatment Value: Drought vs. No Drought
  misc_feature: MA Experiment ID: 20000438 Result: Down-regulated in Transcription
  misc_feature: MA Experiment 20000438 PARAMETER Experiment Name: At_Shoots__P Parameter: Age (day) Value: 14
  misc_feature: MA Experiment 20000438 PARAMETER Experiment Name: At_Shoots__P Parameter: Tissue Value: Shoots vs. Whole Plant
  misc_feature: MA Experiment ID: 20000439 Result: Down-regulated in Transcription
  misc_feature: MA Experiment 20000439 PARAMETER Experiment Name: At_Roots__P Parameter: Age (day) Value: 14 vs. 21
  misc_feature: MA Experiment 20000439 PARAMETER Experiment Name: At_Roots__P Parameter: Organism Value: A. thaliana
  misc_feature: MA Experiment 20000439 PARAMETER Experiment Name: At_Roots__P Parameter: Tissue Value: Roots vs. Whole Plant
  misc_feature: MA Experiment ID: 20000441 Result: Up-regulated in Transcription
  misc_feature: MA Experiment 20000441 PARAMETER Experiment Name: At_1uM_BR-BRZ__P Parameter: Tissue Value: Shoot Apices
  misc_feature: MA Experiment 20000441 PARAMETER Experiment Name: At_1uM_BR-BRZ__P Parameter: Treatment Value: 1uM BR vs. No Treatment
  misc_feature: MA Experiment ID: 20000451 Result: Down-regulated in Transcription
  misc_feature: MA Experiment 20000451 PARAMETER Experiment Name: At_CS6879_Shoots-Roots_P Parameter: Age (day) Value: 14
  misc_feature: MA Experiment 20000451 PARAMETER Experiment Name: At_CS6879_Shoots-Roots_P Parameter: Organism Value: A. thaliana
  misc_feature: MA Experiment 20000451 PARAMETER Experiment Name: At_CS6879_Shoots-Roots_P Parameter: Plant Line Value: CS6879 vs. WS
  misc_feature: MA Experiment 20000451 PARAMETER Experiment Name: At_CS6879_Shoots-Roots_P Parameter: Tissue Value: Roots
  misc_feature: MA Experiment ID: 20000455 Result: Down-regulated in Transcription
  misc_feature: MA Experiment 20000455 PARAMETER Experiment Name: At_100uM_ABA_P Parameter: Age (day) Value: 16
  misc_feature: MA Experiment 20000455 PARAMETER Experiment Name: At_100uM_ABA_P Parameter: Organism Value: A. thaliana
  misc_feature: MA Experiment 20000455 PARAMETER Experiment Name: At_100uM_ABA_P Parameter: Plant Line Value: WS
  misc_feature: MA Experiment 20000455 PARAMETER Experiment Name: At_100uM_ABA_P Parameter: Timepoint (hr) Value: 48
  misc_feature: MA Experiment 20000455 PARAMETER Experiment Name: At_100uM_ABA_P Parameter: Tissue Value: Aerial
  misc_feature: MA Experiment 20000455 PARAMETER Experiment Name: At_100uM_ABA_P Parameter: Treatment Value: 100uM ABA vs. No Treatment
  misc_feature: MA Experiment ID: 20000527 Result: Up-regulated in Transcription
  misc_feature: MA Experiment 20000527 PARAMETER Experiment Name: At_10percent_PEG_P Parameter: Age (day) Value: 20
  misc_feature: MA Experiment 20000527 PARAMETER Experiment Name: At_10percent_PEG_P Parameter: Organism Value: A. thaliana
  misc_feature: MA Experiment 20000527 PARAMETER Experiment Name: At_10percent_PEG_P Parameter: Plant Line Value: WS
  misc_feature: MA Experiment 20000527 PARAMETER Experiment Name: At_10percent_PEG_P Parameter: Timepoint (day) Value: 20
  misc_feature: MA Experiment 20000527 PARAMETER Experiment Name: At_10percent_PEG_P Parameter: Tissue Value: Whole Plant
  misc_feature: MA Experiment 20000527 PARAMETER Experiment Name: At_10percent_PEG_P Parameter: Treatment Value: 10percent PEG vs. No Treatment
  misc_feature: MA Experiment ID: 20000709 Result: Up-regulated in Transcription
  misc_feature: MA Experiment 20000709 PARAMETER Experiment Name: At_15mM_NH4NO3_L-to-H_P Parameter: Age (hr) Value: 14
  misc_feature: MA Experiment 20000709 PARAMETER Experiment Name: At_15mM_NH4NO3_L-to-H_P Parameter: Organism Value: A. thaliana
  misc_feature: MA Experiment 20000709 PARAMETER Experiment Name: At_15mM_NH4NO3_L-to-H_P Parameter: Plant Line Value: WS
  misc_feature: MA Experiment 20000709 PARAMETER Experiment Name: At_15mM_NH4NO3_L-to-H_P Parameter: Timepoint (hr) Value: 4
  misc_feature: MA Experiment 20000709 PARAMETER Experiment Name: At_15mM_NH4NO3_L-to-H_P Parameter: Tissue Value: Aerial
  misc_feature: MA Experiment 20000709 PARAMETER Experiment Name: At_15mM_NH4NO3_L-to-H_P Parameter: Treatment Value: 15mM NH4NO3 vs. 30mM Mannitol
  misc_feature: MA Experiment ID: 20001248 Result: Up-regulated in Transcription
  misc_feature: MA Experiment 20001248 PARAMETER Experiment Name: At_Far-red-induction_P Parameter: Age (day) Value: 7
  misc_feature: MA Experiment 20001248 PARAMETER Experiment Name: At_Far-red-induction_P Parameter: Light Value: Far-red vs. White
  misc_feature: MA Experiment 20001248 PARAMETER Experiment Name: At_Far-red-induction_P Parameter: Organism Value: A. thaliana
  misc_feature: MA Experiment 20001248 PARAMETER Experiment Name: At_Far-red-induction_P Parameter: Plant Line Value: Columbia
  misc_feature: MA Experiment 20001248 PARAMETER Experiment Name: At_Far-red-induction_P Parameter: Timepoint (hr) Value: 4
  misc_feature: MA Experiment 20001248 PARAMETER Experiment Name: At_Far-red-induction_P Parameter: Tissue Value: Whole Plant
  misc_feature: MA Experiment ID: 20001450 Result: Up-regulated in Transcription
  misc_feature: MA Experiment 20001450 PARAMETER Experiment Name: At_Far-red-induction_P Parameter: Age (day) Value: 7
  misc_feature: MA Experiment 20001450 PARAMETER Experiment Name: At_Far-red-induction_P Parameter: Light Value: Far-red vs. White
  misc_feature: MA Experiment 20001450 PARAMETER Experiment Name: At_Far-red-induction_P Parameter: Organism Value: A. thaliana
  misc_feature: MA Experiment 20001450 PARAMETER Experiment Name: At_Far-red-induction_P Parameter: Plant Line Value: Columbia
  misc_feature: MA Experiment 20001450 PARAMETER Experiment Name: At_Far-red-induction_P Parameter: Timepoint (hr) Value: 8
  misc_feature: MA Experiment 20001450 PARAMETER Experiment Name: At_Far-red-induction_P Parameter: Tissue Value: Whole Plant
  misc_feature: MA Experiment ID: 20001451 Result: Up-regulated in Transcription
  misc_feature: MA Experiment 20001451 PARAMETER Experiment Name: At_Far-red-induction_P Parameter: Age (day) Value: 7
  misc_feature: MA Experiment 20001451 PARAMETER Experiment Name: At_Far-red-induction_P Parameter: Light Value: Far-red vs. White
  misc_feature: MA Experiment 20001451 PARAMETER Experiment Name: At_Far-red-induction_P Parameter: Organism Value: A. thaliana
  misc_feature: MA Experiment 20001451 PARAMETER Experiment Name: At_Far-red-induction_P Parameter: Plant Line Value: Columbia
  misc_feature: MA Experiment 20001451 PARAMETER Experiment Name: At_Far-red-induction_P Parameter: Timepoint (hr) Value: 24
  misc_feature: MA Experiment 20001451 PARAMETER Experiment Name: At_Far-red-induction_P Parameter: Tissue Value: Whole Plant
  misc_feature: MA Experiment ID: 20001555 Result: Down-regulated in Transcription
  misc_feature: MA Experiment 20001555 PARAMETER Experiment Name: At_Drought_Soil_Dry_P Parameter: Age (day) Value: 24
  misc_feature: MA Experiment 20001555 PARAMETER Experiment Name: At_Drought_Soil_Dry_P Parameter: Organism Value: A. thaliana
  misc_feature: MA Experiment 20001555 PARAMETER Experiment Name: At_Drought_Soil_Dry_P Parameter: Plant Line Value: WS
  misc_feature: MA Experiment 20001555 PARAMETER Experiment Name: At_Drought_Soil_Dry_P Parameter: Post Timepoint (hr) Value: None
  misc_feature: MA Experiment 20001555 PARAMETER Experiment Name: At_Drought_Soil_Dry_P Parameter: Post-Treatment Value: None
  misc_feature: MA Experiment 20001555 PARAMETER Experiment Name: At_Drought_Soil_Dry_P Parameter: Timepoint (day) Value: 10
  misc_feature: MA Experiment 20001555 PARAMETER Experiment Name: At_Drought_Soil_Dry_P Parameter: Treatment Value: Drought vs. No Drought
  misc_feature: MA Experiment ID: 20001556 Result: Down-regulated in Transcription
  misc_feature: MA Experiment 20001556 PARAMETER Experiment Name: At_Drought_Soil_Dry_P Parameter: Age (day) Value: 26
  misc_feature: MA Experiment 20001556 PARAMETER Experiment Name: At_Drought_Soil_Dry_P Parameter: Organism Value: A. thaliana
  misc_feature: MA Experiment 20001556 PARAMETER Experiment Name: At_Drought_Soil_Dry_P Parameter: Plant Line Value: WS
  misc_feature: MA Experiment 20001556 PARAMETER Experiment Name: At_Drought_Soil_Dry_P Parameter: Post Timepoint (hr) Value: None
  misc_feature: MA Experiment 20001556 PARAMETER Experiment Name: At_Drought_Soil_Dry_P Parameter: Post-Treatment Value: None
  misc_feature: MA Experiment 20001556 PARAMETER Experiment Name: At_Drought_Soil_Dry_P Parameter: Timepoint (day) Value: 12
  misc_feature: MA Experiment 20001556 PARAMETER Experiment Name: At_Drought_Soil_Dry_P Parameter: Treatment Value: Drought vs. No Drought
  misc_feature: MA Experiment ID: 20001559 Result: Down-regulated in Transcription
  misc_feature: MA Experiment 20001559 PARAMETER Experiment Name: At_Drought_Soil_Dry_P Parameter: Age (day) Value: 28
  misc_feature: MA Experiment 20001559 PARAMETER Experiment Name: At_Drought_Soil_Dry_P Parameter: Organism Value: A. thaliana
  misc_feature: MA Experiment 20001559 PARAMETER Experiment Name: At_Drought_Soil_Dry_P Parameter: Plant Line Value: WS
  misc_feature: MA Experiment 20001559 PARAMETER Experiment Name: At_Drought_Soil_Dry_P Parameter: Post Timepoint (hr) Value: 29
  misc_feature: MA Experiment 20001559 PARAMETER Experiment Name: At_Drought_Soil_Dry_P Parameter: Post-Treatment Value: Re-Water vs. No Drought
  misc_feature: MA Experiment 20001559 PARAMETER Experiment Name: At_Drought_Soil_Dry_P Parameter: Timepoint (day) Value: 14
  misc_feature: MA Experiment 20001559 PARAMETER Experiment Name: At_Drought_Soil_Dry_P Parameter: Treatment Value: Drought vs. No Drought
  misc_feature: MA Experiment ID: 20001755 Result: Down-regulated in Transcription
  misc_feature: MA Experiment 20001755 PARAMETER Experiment Name: At_50mM_NH4NO3_L-to-H_P Parameter: Timepoint (hr) Value: 2
  misc_feature: MA Experiment 20001755 PARAMETER Experiment Name: At_50mM_NH4NO3_L-to-H_P Parameter: Tissue Value: Leaf
  misc_feature: MA Experiment 20001755 PARAMETER Experiment Name: At_50mM_NH4NO3_L-to-H_P Parameter: Treatment Value: 50mM NH4NO3 vs 100mM Mannitol
  misc_feature: MA Experiment ID: 20001757 Result: Up-regulated in Transcription
  misc_feature: MA Experiment 20001757 PARAMETER Experiment Name: At_50mM_NH4NO3_L-to-H_P Parameter: Timepoint (hr) Value: 6
  misc_feature: MA Experiment 20001757 PARAMETER Experiment Name: At_50mM_NH4NO3_L-to-H_P Parameter: Tissue Value: Leaf
  misc_feature: MA Experiment 20001757 PARAMETER Experiment Name: At_50mM_NH4NO3_L-to-H_P Parameter: Treatment Value: 50mM NH4NO3 vs 100mM Mannitol
  misc_feature: MA Experiment ID: 20001904 Result: Down-regulated in Transcription
  misc_feature: MA Experiment 20001904 PARAMETER Experiment Name: At_Drought_Reproduction_P Parameter: Age (day) Value: 37
  misc_feature: MA Experiment 20001904 PARAMETER Experiment Name: At_Drought_Reproduction_P Parameter: Organism Value: A. thaliana
  misc_feature: MA Experiment 20001904 PARAMETER Experiment Name: At_Drought_Reproduction_P Parameter: Plant Line Value: WS
  misc_feature: MA Experiment 20001904 PARAMETER Experiment Name: At_Drought_Reproduction_P Parameter: Timepoint (day) Value: 7
  misc_feature: MA Experiment 20001904 PARAMETER Experiment Name: At_Drought_Reproduction_P Parameter: Tissue Value: Rosettes
  misc_feature: MA Experiment 20001904 PARAMETER Experiment Name: At_Drought_Reproduction_P Parameter: Treatment Value: Drought vs. No Drought
  misc_feature: MA Experiment ID: 20001906 Result: Down-regulated in Transcription
  misc_feature: MA Experiment 20001906 PARAMETER Experiment Name: At_Drought_Reproduction_P Parameter: Age (day) Value: 35
  misc_feature: MA Experiment 20001906 PARAMETER Experiment Name: At_Drought_Reproduction_P Parameter: Organism Value: A. thaliana
  misc_feature: MA Experiment 20001906 PARAMETER Experiment Name: At_Drought_Reproduction_P Parameter: Plant Line Value: WS
  misc_feature: MA Experiment 20001906 PARAMETER Experiment Name: At_Drought_Reproduction_P Parameter: Timepoint (day) Value: 5
  misc_feature: MA Experiment 20001906 PARAMETER Experiment Name: At_Drought_Reproduction_P Parameter: Tissue Value: Siliques
  misc_feature: MA Experiment 20001906 PARAMETER Experiment Name: At_Drought_Reproduction_P Parameter: Treatment Value: Drought vs. No Drought
  misc_feature: MA Experiment ID: 20001908 Result: Down-regulated in Transcription
  misc_feature: MA Experiment 20001908 PARAMETER Experiment Name: At_Drought_Reproduction_P Parameter: Age (day) Value: 40
  misc_feature: MA Experiment 20001908 PARAMETER Experiment Name: At_Drought_Reproduction_P Parameter: Organism Value: A. thaliana
  misc_feature: MA Experiment 20001908 PARAMETER Experiment Name: At_Drought_Reproduction_P Parameter: Plant Line Value: WS
  misc_feature: MA Experiment 20001908 PARAMETER Experiment Name: At_Drought_Reproduction_P Parameter: Timepoint (day) Value: 10
  misc_feature: MA Experiment 20001908 PARAMETER Experiment Name: At_Drought_Reproduction_P Parameter: Tissue Value: Siliques
  misc_feature: MA Experiment 20001908 PARAMETER Experiment Name: At_Drought_Reproduction_P Parameter: Treatment Value: Drought vs. No Drought
  misc_feature: MA Experiment ID: 20001911 Result: Down-regulated in Transcription
  misc_feature: MA Experiment 20001911 PARAMETER Experiment Name: At_Drought_Reproduction_P Parameter: Age (day) Value: 40
  misc_feature: MA Experiment 20001911 PARAMETER Experiment Name: At_Drought_Reproduction_P Parameter: Organism Value: A. thaliana
  misc_feature: MA Experiment 20001911 PARAMETER Experiment Name: At_Drought_Reproduction_P Parameter: Plant Line Value: WS
  misc_feature: MA Experiment 20001911 PARAMETER Experiment Name: At_Drought_Reproduction_P Parameter: Timepoint (day) Value: 10
  misc_feature: MA Experiment 20001911 PARAMETER Experiment Name: At_Drought_Reproduction_P Parameter: Tissue Value: Flowers
  misc_feature: MA Experiment 20001911 PARAMETER Experiment Name: At_Drought_Reproduction_P Parameter: Treatment Value: Drought vs. No Drought
atctctgcaacttcctctgtttctgattaccaaacgtcgtcaatacatttcttcaaattacgtttcttttattctttcgttactctcaacaaattttgatatctgattggtgttgattccaagtaagaaagatcaaaactttaggtaaagtatggatatgggtttccatgaaaatgagcaaaatcaagaatttgcgaatctaatggagattggatctgggcattacgggtgttcacattatagaagacgatgcaagattagagcaccatgttgtgatgagatttttgattgcagacattgccacaacgaagctaaggattctcttcatattgaacagcatcatagacatgagcttcctcgacatgaagtttcaaaggtcatatgctcgctttgtgagacagaacaagacgttcagcaaaactgctccaattgtggtgtatgtatggggaagtacttctgttcaaaatgcaagttcttcgacgatgatctttccaagaagcaatatcactgtgatgagtgtgggatttgcaggaccggaggagaagaaaactttttccattgcaaaagatgccgatgttgctactccaaaattatggaggacaaacaccaatgtgttgaaggcgctatgcatcacaattgcccggtttgttttgagtatctgtttgattcaacaagagatatcactgtcctacgatgtggtcacactatgcatctagaatgcacgaaagatatggggctacataaccgatacacatgccctgtatgctccaaatccatatgtgacatgtctaatctgtggaagaaacttgatgaagaggttgctgcatacccaatgccaaagatgtatgaaaacaagatggtatggattctctgcaatgactgcggctcaaacacgaacgttcggtttcatttgatcgcgcataaatgcagtagctgtggttcctacaatacaagacagacacagagaggctctgatagtcactcttgctcctctggaatgcctcaggttgttggttcaaccggttaatttttaaccagagctggttttggtgtctgaatttcccatgaggagattatttgtactttctatagtttggtatcagtcaatgcctttggttgttaacaattatatcatcacagattcaaaagctgctttgagccaatccaacttgcaagtctagac

SEQ ID NO: 37584 - protein, 291 aa, Arabidopsis thaliana
  peptide (1)..(291): Ceres Seq. ID no. 12321995
  misc_feature (27)..(110): Pfam Name: CHY zinc finger Pfam Description: CHY zinc finger
  misc_feature (23)..(269): Homolog of NCBI NO: 34876576 NR Description: similar to androgen receptor
  misc_feature (19)..(275): Homolog of NCBI NO: 11358168 NR Description: hypothetical protein T20O10.70 - Arabidopsis
  misc_feature (19)..(275): Homolog of NCBI NO: 30695702 NR Description: expressed protein [Arabidopsis thaliana]
  misc_feature (19)..(275): Homolog of NCBI NO: 30102616 NR Description: At3g62970 [Arabidopsis thaliana]
  misc_feature (18)..(268): Homolog of NCBI NO: 15238890 NR Description: putative protein
  misc_feature (18)..(269): Homolog of NCBI NO: 34910658 NR Description: putative PGPD14 protein (pollen germination
  misc_feature (18)..(273): Homolog of NCBI NO: 37535002 NR Description: putative PGPD14 protein (pollen germination
  misc_feature (9)..(287): Homolog of NCBI NO: 4105798 NR Description: PGPD14 [Petunia x hybrida]
  misc_feature (18)..(291): Homolog of NCBI NO: 21593716 NR Description: PGPD14 protein [Arabidopsis thaliana]
  misc_feature (1)..(291): Homolog of NCBI NO: 15237169 NR Description: PGPD14 protein
MDMGFHENEQNQEFANLMEIGSGHYGCSHYRRRCKIRAPCCDEIFDCRHCHNEAKDSLHIEQHHRHELPRHEVSKVICSLCETEQDVQQNCSNCGVCMGKYFCSKCKFFDDDLSKKQYHCDECGICRTGGEENFFHCKRCRCCYSKIMEDKHQCVEGAMHHNCPVCFEYLFDSTRDITVLRCGHTMHLECTKDMGLHNRYTCPVCSKSICDMSNLWKKLDEEVAAYPMPKMYENKMVWILCNDCGSNTNVRFHLIAHKCSSCGSYNTRQTQRGSDSHSCSSGMPQVVGSTG

SEQ ID NO: 37585 - protein, 289 aa, Arabidopsis thaliana
  peptide (1)..(289): Ceres Seq. ID no. 12321996
  misc_feature (25)..(108): Pfam Name: CHY zinc finger Pfam Description: CHY zinc finger
  misc_feature (21)..(267): Homolog of NCBI NO: 34876576 NR Description: similar to androgen receptor
  misc_feature (17)..(273): Homolog of NCBI NO: 11358168 NR Description: hypothetical protein T20O10.70 - Arabidopsis
  misc_feature (17)..(273): Homolog of NCBI NO: 30695702 NR Description: expressed protein [Arabidopsis thaliana]
  misc_feature (17)..(273): Homolog of NCBI NO: 30102616 NR Description: At3g62970 [Arabidopsis thaliana]
  misc_feature (16)..(266): Homolog of NCBI NO: 15238890 NR Description: putative protein
  misc_feature (16)..(267): Homolog of NCBI NO: 34910658 NR Description: putative PGPD14 protein (pollen germination
  misc_feature (16)..(271): Homolog of NCBI NO: 37535002 NR Description: putative PGPD14 protein (pollen germination
  misc_feature (7)..(285): Homolog of NCBI NO: 4105798 NR Description: PGPD14 [Petunia x hybrida]
  misc_feature (16)..(289): Homolog of NCBI NO: 21593716 NR Description: PGPD14 protein [Arabidopsis thaliana]
  misc_feature (1)..(289): Homolog of NCBI NO: 15237169 NR Description: PGPD14 protein
MGFHENEQNQEFANLMEIGSGHYGCSHYRRRCKIRAPCCDEIFDCRHCHNEAKDSLHIEQHHRHELPRHEVSKVICSLCETEQDVQQNCSNCGVCMGKYFCSKCKFFDDDLSKKQYHCDECGICRTGGEENFFHCKRCRCCYSKIMEDKHQCVEGAMHHNCPVCFEYLFDSTRDITVLRCGHTMHLECTKDMGLHNRYTCPVCSKSICDMSNLWKKLDEEVAAYPMPKMYENKMVWILCNDCGSNTNVRFHLIAHKCSSCGSYNTRQTQRGSDSHSCSSGMPQVVGSTG

SEQ ID NO: 37586 - protein, 274 aa, Arabidopsis thaliana
  peptide (1)..(274): Ceres Seq. ID no. 12321997
  misc_feature (10)..(93): Pfam Name: CHY zinc finger Pfam Description: CHY zinc finger
  misc_feature (6)..(252): Homolog of NCBI NO: 34876576 NR Description: similar to androgen receptor
  misc_feature (2)..(258): Homolog of NCBI NO: 11358168 NR Description: hypothetical protein T20O10.70 - Arabidopsis
  misc_feature (2)..(258): Homolog of NCBI NO: 30695702 NR Description: expressed protein [Arabidopsis thaliana]
  misc_feature (2)..(258): Homolog of NCBI NO: 30102616 NR Description: At3g62970 [Arabidopsis thaliana]
  misc_feature (1)..(251): Homolog of NCBI NO: 15238890 NR Description: putative protein
  misc_feature (1)..(252): Homolog of NCBI NO: 34910658 NR Description: putative PGPD14 protein (pollen germination
  misc_feature (1)..(256): Homolog of NCBI NO: 37535002 NR Description: putative PGPD14 protein (pollen germination
  misc_feature (1)..(270): Homolog of NCBI NO: 4105798 NR Description: PGPD14 [Petunia x hybrida]
  misc_feature (1)..(274): Homolog of NCBI NO: 21593716 NR Description: PGPD14 protein [Arabidopsis thaliana]
  misc_feature (1)..(274): Homolog of NCBI NO: 15237169 NR Description: PGPD14 protein
MEIGSGHYGCSHYRRRCKIRAPCCDEIFDCRHCHNEAKDSLHIEQHHRHELPRHEVSKVICSLCETEQDVQQNCSNCGVCMGKYFCSKCKFFDDDLSKKQYHCDECGICRTGGEENFFHCKRCRCCYSKIMEDKHQCVEGAMHHNCPVCFEYLFDSTRDITVLRCGHTMHLECTKDMGLHNRYTCPVCSKSICDMSNLWKKLDEEVAAYPMPKMYENKMVWILCNDCGSNTNVRFHLIAHKCSSCGSYNTRQTQRGSDSHSCSSGMPQVVGSTG

SEQ ID NO: 37587 - DNA, 1278 bp, Arabidopsis thaliana
  misc_feature (1)..(1278): Ceres Seq. ID no. 13509213
  misc_feature: MA Experiment ID: 108464 Result: Up-regulated in Transcription
  misc_feature: MA Experiment 108464 PARAMETER Experiment Name: At_Germinating_Seeds_cDNA_P Parameter: Age (day) Value: 4 vs. 0
  misc_feature: MA Experiment 108464 PARAMETER Experiment Name: At_Germinating_Seeds_cDNA_P Parameter: Tissue Value: Germinating Seeds
  misc_feature: MA Experiment ID: 108501 Result: Down-regulated in Transcription
  misc_feature: MA Experiment 108501 PARAMETER Experiment Name: At_ap2_floral_buds_cDNA_P Parameter: Plant Line Value: ap2 (Ler.)
  misc_feature: MA Experiment 108501 PARAMETER Experiment Name: At_ap2_floral_buds_cDNA_P Parameter: Tissue Value: Closed Flower
  misc_feature: MA Experiment ID: 108573 Result: Up-regulated in Transcription
  misc_feature: MA Experiment 108573 PARAMETER Experiment Name: At_Drought_cDNA_P Parameter: Timepoint (hr) Value: 6
  misc_feature: MA Experiment 108573 PARAMETER Experiment Name: At_Drought_cDNA_P Parameter: Tissue Value: Aerial
  misc_feature: MA Experiment 108573 PARAMETER Experiment Name: At_Drought_cDNA_P Parameter: Treatment Value: Drought vs. No Drought
  misc_feature: MA Experiment ID: 108574 Result: Down-regulated in Transcription
  misc_feature: MA Experiment 108574 PARAMETER Experiment Name: At_Wounding__cDNA_P Parameter: Timepoint (hr) Value: 1
  misc_feature: MA Experiment 108574 PARAMETER Experiment Name: At_Wounding__cDNA_P Parameter: Tissue Value: Aerial
  misc_feature: MA Experiment 108574 PARAMETER Experiment Name: At_Wounding__cDNA_P Parameter: Treatment Value: Wounding vs. No Wounding
  misc_feature: MA Experiment ID: 108579 Result: Down-regulated in Transcription
  misc_feature: MA Experiment 108579 PARAMETER Experiment Name: At_4deg_Cold_cDNA_P Parameter: Temperature (deg C) Value: 4 vs. 22
  misc_feature: MA Experiment 108579 PARAMETER Experiment Name: At_4deg_Cold_cDNA_P Parameter: Timepoint (hr) Value: 6
  misc_feature: MA Experiment 108579 PARAMETER Experiment Name: At_4deg_Cold_cDNA_P Parameter: Tissue Value: Aerial
  misc_feature: MA Experiment ID: 20000185 Result: Down-regulated in Transcription
  misc_feature: MA Experiment 20000185 PARAMETER Experiment Name: At_Roots__P Parameter: Age (day) Value: 7 vs. 21
  misc_feature: MA Experiment 20000185 PARAMETER Experiment Name: At_Roots__P Parameter: Organism Value: A. thaliana
  misc_feature: MA Experiment 20000185 PARAMETER Experiment Name: At_Roots__P Parameter: Tissue Value: Roots vs. Whole Plant
  misc_feature: MA Experiment ID: 20000213 Result: Down-regulated in Transcription
  misc_feature: MA Experiment 20000213 PARAMETER Experiment Name: At_4deg_Cold_P Parameter: Timepoint (hr) Value: 2
  misc_feature: MA Experiment ID: 20000214 Result: Down-regulated in Transcription
  misc_feature: MA Experiment 20000214 PARAMETER Experiment Name: At_4deg_Cold_P Parameter: Timepoint (hr) Value: 6
  misc_feature: MA Experiment ID: 20000234 Result: Down-regulated in Transcription
  misc_feature: MA Experiment 20000234 PARAMETER Experiment Name: At_Siliques_P Parameter: Age (day) Value: 21
  misc_feature: MA Experiment 20000234 PARAMETER Experiment Name: At_Siliques_P Parameter: Organism Value: A. thaliana
  misc_feature: MA Experiment 20000234 PARAMETER Experiment Name: At_Siliques_P Parameter: Plant Line Value: WS
  misc_feature: MA Experiment 20000234 PARAMETER Experiment Name: At_Siliques_P Parameter: Tissue Value: Less Than 5mm Siliques vs. Whole Plant
  misc_feature: MA Experiment ID: 20000264 Result: Down-regulated in Transcription
  misc_feature: MA Experiment 20000264 PARAMETER Experiment Name: At_Open_Flower_P Parameter: Age (day) Value: 21
  misc_feature: MA Experiment 20000264 PARAMETER Experiment Name: At_Open_Flower_P Parameter: Plant Line Value: WS
  misc_feature: MA Experiment 20000264 PARAMETER Experiment Name: At_Open_Flower_P Parameter: Tissue Value: Open Flower vs. Whole Plant
  misc_feature: MA Experiment ID: 20000265 Result: Down-regulated in Transcription
  misc_feature: MA Experiment 20000265 PARAMETER Experiment Name: At_Open_Flower_P Parameter: Age (day) Value: 21
  misc_feature: MA Experiment 20000265 PARAMETER Experiment Name: At_Open_Flower_P Parameter: Plant Line Value: WS
  misc_feature: MA Experiment 20000265 PARAMETER Experiment Name: At_Open_Flower_P Parameter: Tissue Value: Closed Flower vs. Whole Plant
  misc_feature: MA Experiment ID: 20000268 Result: Down-regulated in Transcription
  misc_feature: MA Experiment 20000268 PARAMETER Experiment Name: At_100mM_NaCl__P Parameter: Age (day) Value: 14
  misc_feature: MA Experiment 20000268 PARAMETER Experiment Name: At_100mM_NaCl__P Parameter: Organism Value: A. thaliana
  misc_feature: MA Experiment 20000268 PARAMETER Experiment Name: At_100mM_NaCl__P Parameter: Plant Line Value: WS
  misc_feature: MA Experiment 20000268 PARAMETER Experiment Name: At_100mM_NaCl__P Parameter: Timepoint (hr) Value: 6
  misc_feature: MA Experiment 20000268 PARAMETER Experiment Name: At_100mM_NaCl__P Parameter: Tissue Value: Whole Plant
  misc_feature: MA Experiment 20000268 PARAMETER Experiment Name: At_100mM_NaCl__P Parameter: Treatment Value: 100mM NaCl vs. No Treatment
  misc_feature: MA Experiment ID: 20000286 Result: Down-regulated in Transcription
  misc_feature: MA Experiment 20000286 PARAMETER Experiment Name: At_Open_Flower_P Parameter: Age (day) Value: 21
  misc_feature: MA Experiment 20000286 PARAMETER Experiment Name: At_Open_Flower_P Parameter: Plant Line Value: WS
  misc_feature: MA Experiment 20000286 PARAMETER Experiment Name: At_Open_Flower_P Parameter: Tissue Value: Half Open vs. Whole Plant
  misc_feature: MA Experiment ID: 20000308 Result: Down-regulated in Transcription
  misc_feature: MA Experiment 20000308 PARAMETER Experiment Name: At_100mM_NaCl__P Parameter: Age (day) Value: 17
  misc_feature: MA Experiment 20000308 PARAMETER Experiment Name: At_100mM_NaCl__P Parameter: Organism Value: A. thaliana
  misc_feature: MA Experiment 20000308 PARAMETER Experiment Name: At_100mM_NaCl__P Parameter: Plant Line Value: WS
  misc_feature: MA Experiment 20000308 PARAMETER Experiment Name: At_100mM_NaCl__P Parameter: Timepoint (hr) Value: 72
  misc_feature: MA Experiment 20000308 PARAMETER Experiment Name: At_100mM_NaCl__P Parameter: Tissue Value: Whole Plant
  misc_feature: MA Experiment 20000308 PARAMETER Experiment Name: At_100mM_NaCl__P Parameter: Treatment Value: 100mM NaCl vs. No Treatment
  misc_feature: MA Experiment ID: 20000439 Result: Down-regulated in Transcription
  misc_feature: MA Experiment 20000439 PARAMETER Experiment Name: At_Roots__P Parameter: Age (day) Value: 14 vs. 21
  misc_feature: MA Experiment 20000439 PARAMETER Experiment Name: At_Roots__P Parameter: Organism Value: A. thaliana
  misc_feature: MA Experiment 20000439 PARAMETER Experiment Name: At_Roots__P Parameter: Tissue Value: Roots vs. Whole Plant
  misc_feature: MA Experiment ID: 20000441 Result: Up-regulated in Transcription
  misc_feature: MA Experiment 20000441 PARAMETER Experiment Name: At_1uM_BR-BRZ__P Parameter: Tissue Value: Shoot Apices
  misc_feature: MA Experiment 20000441 PARAMETER Experiment Name: At_1uM_BR-BRZ__P Parameter: Treatment Value: 1uM BR vs. No Treatment
  misc_feature: MA Experiment ID: 20000443 Result: Up-regulated in Transcription
  misc_feature: MA Experiment 20000443 PARAMETER Experiment Name: At_1uM_BR-BRZ__P Parameter: Tissue Value: Shoot Apices
  misc_feature: MA Experiment 20000443 PARAMETER Experiment Name: At_1uM_BR-BRZ__P Parameter: Treatment Value: 1uM BRZ vs. No Treatment
  misc_feature: MA Experiment ID: 20000573 Result: Up-regulated in Transcription
  misc_feature: MA Experiment 20000573 PARAMETER Experiment Name: At_100uM_ABA_Mutants__P Parameter: Organism Value: A. thaliana
  misc_feature: MA Experiment 20000573 PARAMETER Experiment Name: At_100uM_ABA_Mutants__P Parameter: Plant Line Value: CS22 vs. Ler wt
  misc_feature: MA Experiment 20000573 PARAMETER Experiment Name: At_100uM_ABA_Mutants__P Parameter: Timepoint (hr) Value: N/A
  misc_feature: MA Experiment 20000573 PARAMETER Experiment Name: At_100uM_ABA_Mutants__P Parameter: Tissue Value: Whole Plant
  misc_feature: MA Experiment 20000573 PARAMETER Experiment Name: At_100uM_ABA_Mutants__P Parameter: Treatment Value: None
  misc_feature: MA Experiment ID: 20000794 Result: Down-regulated in Transcription
  misc_feature: MA Experiment 20000794 PARAMETER Experiment Name: At_Petals_P Parameter: Age (day) Value: 23-25 days
  misc_feature: MA Experiment 20000794 PARAMETER Experiment Name: At_Petals_P Parameter: Plant Line Value: WS
  misc_feature: MA Experiment 20000794 PARAMETER Experiment Name: At_Petals_P Parameter: Tissue Value: Petals vs. Whole plant
  misc_feature: MA Experiment ID: 20001248 Result: Up-regulated in Transcription
  misc_feature: MA Experiment 20001248 PARAMETER Experiment Name: At_Far-red-induction_P Parameter: Age (day) Value: 7
  misc_feature: MA Experiment 20001248 PARAMETER Experiment Name: At_Far-red-induction_P Parameter: Light Value: Far-red vs. White
  misc_feature: MA Experiment 20001248 PARAMETER Experiment Name: At_Far-red-induction_P Parameter: Organism Value: A. thaliana
  misc_feature: MA Experiment 20001248 PARAMETER Experiment Name: At_Far-red-induction_P Parameter: Plant Line Value: Columbia
  misc_feature: MA Experiment 20001248 PARAMETER Experiment Name: At_Far-red-induction_P Parameter: Timepoint (hr) Value: 4
  misc_feature: MA Experiment 20001248 PARAMETER Experiment Name: At_Far-red-induction_P Parameter: Tissue Value: Whole Plant
  misc_feature: MA Experiment ID: 20001450 Result: Up-regulated in Transcription
  misc_feature: MA Experiment 20001450 PARAMETER Experiment Name: At_Far-red-induction_P Parameter: Age (day) Value: 7
  misc_feature: MA Experiment 20001450 PARAMETER Experiment Name: At_Far-red-induction_P Parameter: Light Value: Far-red vs. White
  misc_feature: MA Experiment 20001450 PARAMETER Experiment Name: At_Far-red-induction_P Parameter: Organism Value: A. thaliana
  misc_feature: MA Experiment 20001450 PARAMETER Experiment Name: At_Far-red-induction_P Parameter: Plant Line Value: Columbia
  misc_feature: MA Experiment 20001450 PARAMETER Experiment Name: At_Far-red-induction_P Parameter: Timepoint (hr) Value: 8
  misc_feature: MA Experiment 20001450 PARAMETER Experiment Name: At_Far-red-induction_P Parameter: Tissue Value: Whole Plant
  misc_feature: MA Experiment ID: 20001451 Result: Up-regulated in Transcription
  misc_feature: MA Experiment 20001451 PARAMETER Experiment Name: At_Far-red-induction_P Parameter: Age (day) Value: 7
  misc_feature: MA Experiment 20001451 PARAMETER Experiment Name: At_Far-red-induction_P Parameter: Light Value: Far-red vs. White
  misc_feature: MA Experiment 20001451 PARAMETER Experiment Name: At_Far-red-induction_P Parameter: Organism Value: A. thaliana
  misc_feature: MA Experiment 20001451 PARAMETER Experiment Name: At_Far-red-induction_P Parameter: Plant Line Value: Columbia
  misc_feature: MA Experiment 20001451 PARAMETER Experiment Name: At_Far-red-induction_P Parameter: Timepoint (hr) Value: 24
  misc_feature: MA Experiment 20001451 PARAMETER Experiment Name: At_Far-red-induction_P Parameter: Tissue Value: Whole Plant
  misc_feature: MA Experiment ID: 20001556 Result: Down-regulated in Transcription
  misc_feature: MA Experiment 20001556 PARAMETER Experiment Name: At_Drought_Soil_Dry_P Parameter: Age (day) Value: 26
  misc_feature: MA Experiment 20001556 PARAMETER Experiment Name: At_Drought_Soil_Dry_P Parameter: Organism Value: A. thaliana
  misc_feature: MA Experiment 20001556 PARAMETER Experiment Name: At_Drought_Soil_Dry_P Parameter: Plant Line Value: WS
  misc_feature: MA Experiment 20001556 PARAMETER Experiment Name: At_Drought_Soil_Dry_P Parameter: Post Timepoint (hr) Value: None
  misc_feature: MA Experiment 20001556 PARAMETER Experiment Name: At_Drought_Soil_Dry_P Parameter: Post-Treatment Value: None
  misc_feature: MA Experiment 20001556 PARAMETER Experiment Name: At_Drought_Soil_Dry_P Parameter: Timepoint (day) Value: 12
  misc_feature: MA Experiment 20001556 PARAMETER Experiment Name: At_Drought_Soil_Dry_P Parameter: Treatment Value: Drought vs. No Drought
  misc_feature: MA Experiment ID: 20001557 Result: Down-regulated in Transcription
  misc_feature: MA Experiment 20001557 PARAMETER Experiment Name: At_Drought_Soil_Dry_P Parameter: Age (day) Value: 27
  misc_feature: MA Experiment 20001557 PARAMETER Experiment Name: At_Drought_Soil_Dry_P Parameter: Organism Value: A. thaliana
  misc_feature: MA Experiment 20001557 PARAMETER Experiment Name: At_Drought_Soil_Dry_P Parameter: Plant Line Value: WS
  misc_feature: MA Experiment 20001557 PARAMETER Experiment Name: At_Drought_Soil_Dry_P Parameter: Post Timepoint (hr) Value: 3
  misc_feature: MA Experiment 20001557 PARAMETER Experiment Name: At_Drought_Soil_Dry_P Parameter: Post-Treatment Value: Re-Water vs. No Drought
  misc_feature: MA Experiment 20001557 PARAMETER Experiment Name: At_Drought_Soil_Dry_P Parameter: Timepoint (day) Value: 13
  misc_feature: MA Experiment 20001557 PARAMETER Experiment Name: At_Drought_Soil_Dry_P Parameter: Treatment Value: Drought vs. No Drought
  misc_feature: MA Experiment ID: 20001558 Result: Down-regulated in Transcription
  misc_feature: MA Experiment 20001558 PARAMETER Experiment Name: At_Drought_Soil_Dry_P Parameter: Age (day) Value: 27
  misc_feature: MA Experiment 20001558 PARAMETER Experiment Name: At_Drought_Soil_Dry_P Parameter: Organism Value: A. thaliana
  misc_feature: MA Experiment 20001558 PARAMETER Experiment Name: At_Drought_Soil_Dry_P Parameter: Plant Line Value: WS
  misc_feature: MA Experiment 20001558 PARAMETER Experiment Name: At_Drought_Soil_Dry_P Parameter: Post Timepoint (hr) Value: 6
  misc_feature: MA Experiment 20001558 PARAMETER Experiment Name: At_Drought_Soil_Dry_P Parameter: Post-Treatment Value: Re-Water vs. No Drought
  misc_feature: MA Experiment 20001558 PARAMETER Experiment Name: At_Drought_Soil_Dry_P Parameter: Timepoint (day) Value: 13
  misc_feature: MA Experiment 20001558 PARAMETER Experiment Name: At_Drought_Soil_Dry_P Parameter: Treatment Value: Drought vs. No Drought
  misc_feature: MA Experiment ID: 20001559 Result: Down-regulated in Transcription
  misc_feature: MA Experiment 20001559 PARAMETER Experiment Name: At_Drought_Soil_Dry_P Parameter: Age (day) Value: 28
  misc_feature: MA Experiment 20001559 PARAMETER Experiment Name: At_Drought_Soil_Dry_P Parameter: Organism Value: A. thaliana
  misc_feature: MA Experiment 20001559 PARAMETER Experiment Name: At_Drought_Soil_Dry_P Parameter: Plant Line Value: WS
  misc_feature: MA Experiment 20001559 PARAMETER Experiment Name: At_Drought_Soil_Dry_P Parameter: Post Timepoint (hr) Value: 29
  misc_feature: MA Experiment 20001559 PARAMETER Experiment Name: At_Drought_Soil_Dry_P Parameter: Post-Treatment Value: Re-Water vs. No Drought
  misc_feature: MA Experiment 20001559 PARAMETER Experiment Name: At_Drought_Soil_Dry_P Parameter: Timepoint (day) Value: 14
  misc_feature: MA Experiment 20001559 PARAMETER Experiment Name: At_Drought_Soil_Dry_P Parameter: Treatment Value: Drought vs. No Drought
  misc_feature: MA Experiment ID: 20001560 Result: Down-regulated in Transcription
  misc_feature: MA Experiment 20001560 PARAMETER Experiment Name: At_Drought_Soil_Dry_P Parameter: Age (day) Value: 28
  misc_feature: MA Experiment 20001560 PARAMETER Experiment Name: At_Drought_Soil_Dry_P Parameter: Organism Value: A. thaliana
  misc_feature: MA Experiment 20001560 PARAMETER Experiment Name: At_Drought_Soil_Dry_P Parameter: Plant Line Value: WS
  misc_feature: MA Experiment 20001560 PARAMETER Experiment Name: At_Drought_Soil_Dry_P Parameter: Post Timepoint (hr) Value: None
  misc_feature: MA Experiment 20001560 PARAMETER Experiment Name: At_Drought_Soil_Dry_P Parameter: Post-Treatment Value: None
  misc_feature: MA Experiment 20001560 PARAMETER Experiment Name: At_Drought_Soil_Dry_P Parameter: Timepoint (day) Value: 14
  misc_feature: MA Experiment 20001560 PARAMETER Experiment Name: At_Drought_Soil_Dry_P Parameter: Treatment Value: Drought vs. No Drought
  misc_feature: MA Experiment ID: 20001757 Result: Up-regulated in Transcription
  misc_feature: MA Experiment 20001757 PARAMETER Experiment Name: At_50mM_NH4NO3_L-to-H_P Parameter: Timepoint (hr) Value: 6
  misc_feature: MA Experiment 20001757 PARAMETER Experiment Name: At_50mM_NH4NO3_L-to-H_P Parameter: Tissue Value: Leaf
  misc_feature: MA Experiment 20001757 PARAMETER Experiment Name: At_50mM_NH4NO3_L-to-H_P Parameter: Treatment Value: 50mM NH4NO3 vs 100mM Mannitol
  misc_feature: MA Experiment ID: 20001906 Result: Down-regulated in Transcription
  misc_feature: MA Experiment 20001906 PARAMETER Experiment Name: At_Drought_Reproduction_P Parameter: Age (day) Value: 35
  misc_feature: MA Experiment 20001906 PARAMETER Experiment Name: At_Drought_Reproduction_P Parameter: Organism Value: A. thaliana
  misc_feature: MA Experiment 20001906 PARAMETER Experiment Name: At_Drought_Reproduction_P Parameter: Plant Line Value: WS
  misc_feature: MA Experiment 20001906 PARAMETER Experiment Name: At_Drought_Reproduction_P Parameter: Timepoint (day) Value: 5
  misc_feature: MA Experiment 20001906 PARAMETER Experiment Name: At_Drought_Reproduction_P Parameter: Tissue Value: Siliques
  misc_feature: MA Experiment 20001906 PARAMETER Experiment Name: At_Drought_Reproduction_P Parameter: Treatment Value: Drought vs. No Drought
  misc_feature: MA Experiment ID: 20001908 Result: Down-regulated in Transcription
  misc_feature: MA Experiment 20001908 PARAMETER Experiment Name: At_Drought_Reproduction_P Parameter: Age (day) Value: 40
  misc_feature: MA Experiment 20001908 PARAMETER Experiment Name: At_Drought_Reproduction_P Parameter: Organism Value: A. thaliana
  misc_feature: MA Experiment 20001908 PARAMETER Experiment Name: At_Drought_Reproduction_P Parameter: Plant Line Value: WS
  misc_feature: MA Experiment 20001908 PARAMETER Experiment Name: At_Drought_Reproduction_P Parameter: Timepoint (day) Value: 10
  misc_feature: MA Experiment 20001908 PARAMETER Experiment Name: At_Drought_Reproduction_P Parameter: Tissue Value: Siliques
  misc_feature: MA Experiment 20001908 PARAMETER Experiment Name: At_Drought_Reproduction_P Parameter: Treatment Value: Drought vs. No Drought
tcgacccacgcgtccggtaattaacttctaacttgaggggcttttcattatctcctcctcgtcgtcctccctccatttttcttcacgtctggttttctctctcttttcctctatcttttcctctatctctctcctctctttgtctctctcgcttctgtgatttgggctttttcagatgggaaatgcgaacggcaaagacgaagacgccgccgccggtagcggtggtgcagatgttacctcgtcctcggcgagatctaatggcggcgatccttctgcacgcagtcgtcaccgtcgtccttcttcagactctatgagcagttctcctcccggaagtcctgctcgatctccatctcctttcttattcgctcctcaggttcccgtggctccattgcagagagcaaacgcccctccttctcctaataacatccaatggaaccaatcacagagagtttttgataatcccccagagcaaggaatccctaccatcattacatggaaccaaggaggtaatgatgtgacggtggaaggatcatgggacaattggagatcaaggaagaagctgcagaaatcaggaaaagaccactcgattctctttgtccttccatctggcatataccattacaaggtgattgtggacggtgaatccaaatacatcccagatttaccctttgtagcagacgaagttggcaatgtctgtaacattctcgatgttcataactttgtgccagaaaacccagaaagcatagtggagtttgaggcgccaccatcacctgatcatagctacggtcaaaccctaccagccgcagaagattacgcgaaagagccactggcggtgccacctcagcttcatctaacacttcttggcactactgaagagacagccatagccacaaagcctcaacatgtggtgcttaaccatgtgttcatagagcaaggatggactcctcaatccatagtagctttgggtttaacccacaggttcgagtctaagtacataactgttgtcctctacaaaccgctcacacggtaaccctaaaaattcagtgccacattgttctctctctttctttttttttcatctctcaattatgtgaaaacatgttctttgttcatagtgactagtgagtgcccaacatttgagtttattaacctctttcttacctggtttgtggtgcttgtgtacaaagcttctctcattgtaacgattgttgttttattttctgcaaaaactgtaaaatacattcgctaataatggctataagaagcttatctgctagc

SEQ ID NO: 37588 - protein, 284 aa, Arabidopsis thaliana
  peptide (1)..(284): Ceres Seq. ID no. 13509214
  misc_feature (196)..(282): Pfam Name: 5'-AMP-activated protein kinase, beta subunit, Pfam Description: 5'-AMP-activated protein kinase, beta subunit,
  misc_feature (196)..(282): Pfam Name: 5'-AMP-activated protein kinase, beta subunit, Pfam Description: 5'-AMP-activated protein kinase, beta subunit,
  misc_feature (69)..(282): Homolog of NCBI NO: 12018316 NR Description: AMP-activated protein kinase beta-2 regulatory
  misc_feature (29)..(282): Homolog of NCBI NO: 4885561 NR Description: protein kinase, AMP-activated, beta 2
  misc_feature (62)..(284): Homolog of NCBI NO: 11935162 NR Description: SNF1-related kinase complex anchoring protein
  misc_feature (47)..(284): Homolog of NCBI NO: 22324436 NR Description: AKIN beta1-like protein [Oryza sativa (japonica
  misc_feature (38)..(284): Homolog of NCBI NO: 15234895 NR Description: kinase like protein [Arabidopsis thaliana]
  misc_feature (69)..(282): Homolog of NCBI NO: 12018316 NR Description: AMP-activated protein kinase beta-2 regulatory
  misc_feature (62)..(284): Homolog of NCBI NO: 11935162 NR Description: SNF1-related kinase complex anchoring protein
  misc_feature (38)..(284): Homolog of NCBI NO: 15234895 NR Description: kinase like protein [Arabidopsis thaliana]
  misc_feature (1)..(284): Homolog of NCBI NO: 6686782 NR Description: AKIN gamma [Arabidopsis thaliana]
  misc_feature (1)..(284): Homolog of NCBI NO: 15242175 NR Description: AMPKBI (5'-AMP-activated protein kinase, beta
  misc_feature (1)..(284): Homolog of NCBI NO: 5702015 NR Description: GAL83 protein [Solanum tuberosum]
  misc_feature (1)..(284): Homolog of NCBI NO: 6686784 NR Description: AKIN beta2 [Arabidopsis thaliana]
  misc_feature (23)..(242): Homolog of NCBI NO: 29725558 NR Description: SNF1 kinase complex anchoring protein
  misc_feature (47)..(284): Homolog of NCBI NO: 22324436 NR Description: AKIN beta1-like protein [Oryza sativa (japonica
  misc_feature (29)..(282): Homolog of NCBI NO: 4885561 NR Description: protein kinase, AMP-activated, beta 2
  misc_feature (23)..(242): Homolog of NCBI NO: 29725558 NR Description: SNF1 kinase complex anchoring protein
  misc_feature (1)..(284): Homolog of NCBI NO: 6686784 NR Description: AKIN beta2 [Arabidopsis thaliana]
  misc_feature (1)..(284): Homolog of NCBI NO: 5702015 NR Description: GAL83 protein [Solanum tuberosum]
  misc_feature (1)..(284): Homolog of NCBI NO: 15242175 NR Description: AMPKBI (5'-AMP-activated protein kinase, beta
  misc_feature (1)..(284): Homolog of NCBI NO: 6686782 NR Description: AKIN gamma [Arabidopsis thaliana]
MGNANGKDEDAAAGSGGADVTSSSARSNGGDPSARSRHRRPSSDSMSSSPPGSPARSPSPFLFAPQVPVAPLQRANAPPSPNNIQWNQSQRVFDNPPEQGIPTIITWNQGGNDVTVEGSWDNWRSRKKLQKSGKDHSILFVLPSGIYHYKVIVDGESKYIPDLPFVADEVGNVCNILDVHNFVPENPESIVEFEAPPSPDHSYGQTLPAAEDYAKEPLAVPPQLHLTLLGTTEETAIATKPQHVVLNHVFIEQGWTPQSIVALGLTHRFESKYITVVLYKPLTR

SEQ ID NO: 37589 - protein, 239 aa, Arabidopsis thaliana
  peptide (1)..(239): Ceres Seq. ID no. 13509215
  misc_feature (151)..(237): Pfam Name: 5'-AMP-activated protein kinase, beta subunit, Pfam Description: 5'-AMP-activated protein kinase, beta subunit,
  misc_feature (151)..(237): Pfam Name: 5'-AMP-activated protein kinase, beta subunit, Pfam Description: 5'-AMP-activated protein kinase, beta subunit,
  misc_feature (24)..(237): Homolog of NCBI NO: 12018316 NR Description: AMP-activated protein kinase beta-2 regulatory
  misc_feature (1)..(237): Homolog of NCBI NO: 4885561 NR Description: protein kinase, AMP-activated, beta 2
  misc_feature (17)..(239): Homolog of NCBI NO: 11935162 NR Description: SNF1-related kinase complex anchoring protein
  misc_feature (2)..(239): Homolog of NCBI NO: 22324436 NR Description: AKIN beta1-like protein [Oryza sativa (japonica
  misc_feature (1)..(239): Homolog of NCBI NO: 15234895 NR Description: kinase like protein [Arabidopsis thaliana]
  misc_feature (24)..(237): Homolog of NCBI NO: 12018316 NR Description: AMP-activated protein kinase beta-2 regulatory
  misc_feature (17)..(239): Homolog of NCBI NO: 11935162 NR Description: SNF1-related kinase complex anchoring protein
  misc_feature (1)..(239): Homolog of NCBI NO: 15234895 NR Description: kinase like protein [Arabidopsis thaliana]
  misc_feature (1)..(239): Homolog of NCBI NO: 6686782 NR Description: AKIN gamma [Arabidopsis thaliana]
  misc_feature (1)..(239): Homolog of NCBI NO: 15242175 NR Description: AMPKBI (5'-AMP-activated protein kinase, beta
  misc_feature (1)..(239): Homolog of NCBI NO: 5702015 NR Description: GAL83 protein [Solanum tuberosum]
  misc_feature (1)..(239): Homolog of NCBI NO: 6686784 NR Description: AKIN beta2 [Arabidopsis thaliana]
  misc_feature (1)..(197): Homolog of NCBI NO: 29725558 NR Description: SNF1 kinase complex anchoring protein
  misc_feature (2)..(239): Homolog of NCBI NO: 22324436 NR Description: AKIN beta1-like protein [Oryza sativa (japonica
  misc_feature (1)..(237): Homolog of NCBI NO: 4885561 NR Description: protein kinase, AMP-activated, beta 2
  misc_feature (1)..(197): Homolog of NCBI NO: 29725558 NR Description: SNF1 kinase complex anchoring protein
  misc_feature (1)..(239): Homolog of NCBI NO: 6686784 NR Description: AKIN beta2 [Arabidopsis thaliana]
  misc_feature (1)..(239): Homolog of NCBI NO: 5702015 NR Description: GAL83 protein [Solanum tuberosum]
  misc_feature (1)..(239): Homolog of NCBI NO: 15242175 NR Description: AMPKBI (5'-AMP-activated protein kinase, beta
  misc_feature (1)..(239): Homolog of NCBI NO: 6686782 NR Description: AKIN gamma [Arabidopsis thaliana]
MSSSPPGSPARSPSPFLFAPQVPVAPLQRANAPPSPNNIQWNQSQRVFDNPPEQGIPTIITWNQGGNDVTVEGSWDNWRSRKKLQKSGKDHSILFVLPSGIYHYKVIVDGESKYIPDLPFVADEVGNVCNILDVHNFVPENPESIVEFEAPPSPDHSYGQTLPAAEDYAKEPLAVPPQLHLTLLGTTEETAIATKPQHVVLNHVFIEQGWTPQSIVALGLTHRFESKYITVVLYKPLTR

SEQ ID NO: 37590 - DNA, 2094 bp, Arabidopsis thaliana
  misc_feature (1)..(2094): Ceres Seq. ID no. 13495750
  misc_feature: MA Experiment ID: 108501 Result: Up-regulated in Transcription
  misc_feature: MA Experiment 108501 PARAMETER Experiment Name: At_ap2_floral_buds_cDNA_P Parameter: Plant Line Value: ap2 (Ler.)
  misc_feature: MA Experiment 108501 PARAMETER Experiment Name: At_ap2_floral_buds_cDNA_P Parameter: Tissue Value: Closed Flower
  misc_feature: MA Experiment ID: 108572 Result: Up-regulated in Transcription
  misc_feature: MA Experiment 108572 PARAMETER Experiment Name: At_Drought_cDNA_P Parameter: Timepoint (hr) Value: 1
  misc_feature: MA Experiment 108572 PARAMETER Experiment Name: At_Drought_cDNA_P Parameter: Tissue Value: Aerial
  misc_feature: MA Experiment 108572 PARAMETER Experiment Name: At_Drought_cDNA_P Parameter: Treatment Value: Drought vs. No Drought
  misc_feature: MA Experiment ID: 108573 Result: Up-regulated in Transcription
  misc_feature: MA Experiment 108573 PARAMETER Experiment Name: At_Drought_cDNA_P Parameter: Timepoint (hr) Value: 6
  misc_feature: MA Experiment 108573 PARAMETER Experiment Name: At_Drought_cDNA_P Parameter: Tissue Value: Aerial
  misc_feature: MA Experiment 108573 PARAMETER Experiment Name: At_Drought_cDNA_P Parameter: Treatment Value: Drought vs. No Drought
  misc_feature: MA Experiment ID: 108574 Result: Up-regulated in Transcription
  misc_feature: MA Experiment 108574 PARAMETER Experiment Name: At_Wounding__cDNA_P Parameter: Timepoint (hr) Value: 1
  misc_feature: MA Experiment 108574 PARAMETER Experiment Name: At_Wounding__cDNA_P Parameter: Tissue Value: Aerial
  misc_feature: MA Experiment 108574 PARAMETER Experiment Name: At_Wounding__cDNA_P Parameter: Treatment Value: Wounding vs. No Wounding
  misc_feature: MA Experiment ID: 108585 Result: Up-regulated in Transcription
  misc_feature: MA Experiment 108585 PARAMETER Experiment Name: At_5mM_NaNP_cDNA_P Parameter: Timepoint (hr) Value: 6
  misc_feature: MA Experiment 108585 PARAMETER Experiment Name: At_5mM_NaNP_cDNA_P Parameter: Tissue Value: Aerial
  misc_feature: MA Experiment 108585 PARAMETER Experiment Name: At_5mM_NaNP_cDNA_P Parameter: Treatment Value: null
  misc_feature: MA Experiment ID: 20000088 Result: Up-regulated in Transcription
  misc_feature: MA Experiment 20000088 PARAMETER Experiment Name: At_100uM_ABA_Mutants_cDNA_P Parameter: Plant Line Value: Landsberg
  misc_feature: MA Experiment 20000088 PARAMETER Experiment Name: At_100uM_ABA_Mutants_cDNA_P Parameter: Timepoint (hr) Value: 6
  misc_feature: MA Experiment 20000088 PARAMETER Experiment Name: At_100uM_ABA_Mutants_cDNA_P Parameter: Tissue Value: Aerial
  misc_feature: MA Experiment 20000088 PARAMETER Experiment Name: At_100uM_ABA_Mutants_cDNA_P Parameter: Treatment Value: 100uM ABA vs. No Treatment
  misc_feature: MA Experiment ID: 20000093 Result: Up-regulated in Transcription
  misc_feature: MA Experiment 20000093 PARAMETER Experiment Name: At_42deg_Heat_cDNA_P Parameter: Temperature (deg C) Value: 42 vs. 22
  misc_feature: MA Experiment 20000093 PARAMETER Experiment Name: At_42deg_Heat_cDNA_P Parameter: Timepoint (hr) Value: 0.5
  misc_feature: MA Experiment 20000093 PARAMETER Experiment Name: At_42deg_Heat_cDNA_P Parameter: Tissue Value: Aerial
  misc_feature: MA Experiment ID: 20000166 Result: Up-regulated in Transcription
  misc_feature: MA Experiment 20000166 PARAMETER Experiment Name: At_100uM_ABA_P Parameter: Age (day) Value: 14
  misc_feature: MA Experiment 20000166 PARAMETER Experiment Name: At_100uM_ABA_P Parameter: Organism Value: A. thaliana
  misc_feature: MA Experiment 20000166 PARAMETER Experiment Name: At_100uM_ABA_P Parameter: Plant Line Value: WS
  misc_feature: MA Experiment 20000166 PARAMETER Experiment Name: At_100uM_ABA_P Parameter: Timepoint (hr) Value: 1
  misc_feature: MA Experiment 20000166 PARAMETER Experiment Name: At_100uM_ABA_P Parameter: Tissue Value: Aerial
  misc_feature: MA Experiment 20000166 PARAMETER Experiment Name: At_100uM_ABA_P Parameter: Treatment Value: 100uM ABA vs. No Treatment
  misc_feature: MA Experiment ID: 20000171 Result: Up-regulated in Transcription
  misc_feature: MA Experiment 20000171 PARAMETER Experiment Name: At_42deg_Heat_P Parameter: Age (day) Value: 14
  misc_feature: MA Experiment 20000171 PARAMETER Experiment Name: At_42deg_Heat_P Parameter: Organism Value: A. thaliana
  misc_feature: MA Experiment 20000171 PARAMETER Experiment Name: At_42deg_Heat_P Parameter: Plant Line Value: WS
  misc_feature: MA Experiment 20000171 PARAMETER Experiment Name: At_42deg_Heat_P Parameter: Temperature (deg C) Value: 42 vs. 22
  misc_feature: MA Experiment 20000171 PARAMETER Experiment Name: At_42deg_Heat_P Parameter: Timepoint (hr) Value: 1
  misc_feature: MA Experiment 20000171 PARAMETER Experiment Name: At_42deg_Heat_P Parameter: Tissue Value: Aerial
  misc_feature: MA Experiment ID: 20000184 Result: Down-regulated in Transcription
  misc_feature: MA Experiment 20000184 PARAMETER Experiment Name: At_Shoots__P Parameter: Age (day) Value: 7
  misc_feature: MA Experiment 20000184 PARAMETER Experiment Name: At_Shoots__P Parameter: Tissue Value: Shoots vs. Whole Plant
  misc_feature: MA Experiment ID: 20000211 Result: Up-regulated in Transcription
  misc_feature: MA Experiment 20000211 PARAMETER Experiment Name: At_0.001percent_MeJA__P Parameter: Age (day) Value: 14
  misc_feature: MA Experiment 20000211 PARAMETER Experiment Name: At_0.001percent_MeJA__P Parameter: Organism Value: A. thaliana
  misc_feature: MA Experiment 20000211 PARAMETER Experiment Name: At_0.001percent_MeJA__P Parameter: Plant Line Value: WS
  misc_feature: MA Experiment 20000211 PARAMETER Experiment Name: At_0.001percent_MeJA__P Parameter: Timepoint (hr) Value: 1
  misc_feature: MA Experiment 20000211 PARAMETER Experiment Name: At_0.001percent_MeJA__P Parameter: Tissue Value: Aerial
  misc_feature: MA Experiment 20000211 PARAMETER Experiment Name: At_0.001percent_MeJA__P Parameter: Treatment Value: 0.001percent MeJA vs. No Treatment
  misc_feature: MA Experiment ID: 20000227 Result: Down-regulated in Transcription
  misc_feature: MA Experiment 20000227 PARAMETER Experiment Name: At_Root-Tips-vs-Tops_P Parameter: Tissue Value: Root Tips vs. Root Tops
  misc_feature: MA Experiment ID: 20000234 Result: Up-regulated in Transcription
  misc_feature: MA Experiment 20000234 PARAMETER Experiment Name: At_Siliques_P Parameter: Age (day) Value: 21
  misc_feature: MA Experiment 20000234 PARAMETER Experiment Name: At_Siliques_P Parameter: Organism Value: A. thaliana
  misc_feature: MA Experiment 20000234 PARAMETER Experiment Name: At_Siliques_P Parameter: Plant Line Value: WS
  misc_feature: MA Experiment 20000234 PARAMETER Experiment Name: At_Siliques_P Parameter: Tissue Value: Less Than 5mm Siliques vs. Whole Plant
  misc_feature: MA Experiment ID: 20000264 Result: Up-regulated in Transcription
  misc_feature: MA Experiment 20000264 PARAMETER Experiment Name: At_Open_Flower_P Parameter: Age (day) Value: 21
  misc_feature: MA Experiment 20000264 PARAMETER Experiment Name: At_Open_Flower_P Parameter: Plant Line Value: WS
  misc_feature: MA Experiment 20000264 PARAMETER Experiment Name: At_Open_Flower_P Parameter: Tissue Value: Open Flower vs. Whole Plant
  misc_feature: MA Experiment ID: 20000265 Result: Up-regulated in Transcription
  misc_feature: MA Experiment 20000265 PARAMETER Experiment Name: At_Open_Flower_P Parameter: Age (day) Value: 21
  misc_feature: MA Experiment 20000265 PARAMETER Experiment Name: At_Open_Flower_P Parameter: Plant Line Value: WS
  misc_feature: MA Experiment 20000265 PARAMETER Experiment Name: At_Open_Flower_P Parameter: Tissue Value: Closed Flower vs. Whole Plant
  misc_feature: MA Experiment ID: 20000268 Result: Up-regulated in Transcription
  misc_feature: MA Experiment 20000268 PARAMETER Experiment Name: At_100mM_NaCl__P Parameter: Age (day) Value: 14
  misc_feature: MA Experiment 20000268 PARAMETER Experiment Name: At_100mM_NaCl__P Parameter: Organism Value: A. thaliana
  misc_feature: MA Experiment 20000268 PARAMETER Experiment Name: At_100mM_NaCl__P Parameter: Plant Line Value: WS
  misc_feature: MA Experiment 20000268 PARAMETER Experiment Name: At_100mM_NaCl__P Parameter: Timepoint (hr) Value: 6
  misc_feature: MA Experiment 20000268 PARAMETER Experiment Name: At_100mM_NaCl__P Parameter: Tissue Value: Whole Plant
  misc_feature: MA Experiment 20000268 PARAMETER Experiment Name: At_100mM_NaCl__P Parameter: Treatment Value: 100mM NaCl vs. No Treatment
  misc_feature: MA Experiment ID: 20000286 Result: Up-regulated in Transcription
  misc_feature: MA Experiment 20000286 PARAMETER Experiment Name: At_Open_Flower_P Parameter: Age (day) Value: 21
  misc_feature: MA Experiment 20000286 PARAMETER Experiment Name: At_Open_Flower_P Parameter: Plant Line Value: WS
  misc_feature: MA Experiment 20000286 PARAMETER Experiment Name: At_Open_Flower_P Parameter: Tissue Value: Half Open vs. Whole Plant
  misc_feature: MA Experiment ID: 20000308 Result: Up-regulated in Transcription
  misc_feature: MA Experiment 20000308 PARAMETER Experiment Name: At_100mM_NaCl__P Parameter: Age (day) Value: 17
  misc_feature: MA Experiment 20000308 PARAMETER Experiment Name: At_100mM_NaCl__P Parameter: Organism Value: A. thaliana
  misc_feature: MA Experiment 20000308 PARAMETER Experiment Name: At_100mM_NaCl__P Parameter: Plant Line Value: WS
  misc_feature: MA Experiment 20000308 PARAMETER Experiment Name: At_100mM_NaCl__P Parameter: Timepoint (hr) Value: 72
  misc_feature: MA Experiment 20000308 PARAMETER Experiment Name: At_100mM_NaCl__P Parameter: Tissue Value: Whole Plant
  misc_feature: MA Experiment 20000308 PARAMETER Experiment Name: At_100mM_NaCl__P Parameter: Treatment Value: 100mM NaCl vs. No Treatment
  misc_feature: MA Experiment ID: 20000452 Result: Up-regulated in Transcription
  misc_feature: MA Experiment 20000452 PARAMETER Experiment Name: At_CS6879_Shoots-Roots_P Parameter: Age (day) Value: 14
  misc_feature: MA Experiment 20000452 PARAMETER Experiment Name: At_CS6879_Shoots-Roots_P Parameter: Organism Value: A. thaliana
  misc_feature: MA Experiment 20000452 PARAMETER Experiment Name: At_CS6879_Shoots-Roots_P Parameter: Plant Line Value: CS6879 vs. WS
  misc_feature: MA Experiment 20000452 PARAMETER Experiment Name: At_CS6879_Shoots-Roots_P Parameter: Tissue Value: Shoots
  misc_feature: MA Experiment ID: 20000453 Result: Up-regulated in Transcription
  misc_feature: MA Experiment 20000453 PARAMETER Experiment Name: At_100uM_ABA_P Parameter: Age (day) Value: 15
  misc_feature: MA Experiment 20000453 PARAMETER Experiment Name: At_100uM_ABA_P Parameter: Organism Value: A. thaliana
  misc_feature: MA Experiment 20000453 PARAMETER Experiment Name: At_100uM_ABA_P Parameter: Plant Line Value: WS
  misc_feature: MA Experiment 20000453 PARAMETER Experiment Name: At_100uM_ABA_P Parameter: Timepoint (hr) Value: 24
  misc_feature: MA Experiment 20000453 PARAMETER Experiment Name: At_100uM_ABA_P Parameter: Tissue Value: Aerial
  misc_feature: MA Experiment 20000453 PARAMETER Experiment Name: At_100uM_ABA_P Parameter: Treatment Value: 100uM ABA vs. No Treatment
  misc_feature: MA Experiment ID: 20000455 Result: Up-regulated in Transcription
  misc_feature: MA Experiment 20000455 PARAMETER Experiment Name: At_100uM_ABA_P Parameter: Age (day) Value: 16
  misc_feature: MA Experiment 20000455 PARAMETER Experiment Name: At_100uM_ABA_P Parameter: Organism Value: A. thaliana
  misc_feature: MA Experiment 20000455 PARAMETER Experiment Name: At_100uM_ABA_P Parameter: Plant Line Value: WS
  misc_feature: MA Experiment 20000455 PARAMETER Experiment Name: At_100uM_ABA_P Parameter: Timepoint (hr) Value: 48
  misc_feature: MA Experiment 20000455 PARAMETER Experiment Name: At_100uM_ABA_P Parameter: Tissue Value: Aerial
  misc_feature: MA Experiment 20000455 PARAMETER Experiment Name: At_100uM_ABA_P Parameter: Treatment Value: 100uM ABA vs. No Treatment
  misc_feature: MA Experiment ID: 20000496 Result: Down-regulated in Transcription
  misc_feature: MA Experiment 20000496 PARAMETER Experiment Name: At_Guard_Cells_P Parameter: Harvest Date Value: 7/19/2002
  misc_feature: MA Experiment 20000496 PARAMETER Experiment Name: At_Guard_Cells_P Parameter: Organism Value: Canola
  misc_feature: MA Experiment 20000496 PARAMETER Experiment Name: At_Guard_Cells_P Parameter: Tissue Value: Guard Cells vs. Leaves
  misc_feature: MA Experiment ID: 20000794 Result: Up-regulated in Transcription
  misc_feature: MA Experiment 20000794 PARAMETER Experiment Name: At_Petals_P Parameter: Age (day) Value: 23-25 days
  misc_feature: MA Experiment 20000794 PARAMETER Experiment Name: At_Petals_P Parameter: Plant Line Value: WS
  misc_feature: MA Experiment 20000794 PARAMETER Experiment Name: At_Petals_P Parameter: Tissue Value: Petals vs. Whole plant
  misc_feature: MA Experiment ID: 20001247 Result: Down-regulated in Transcription
  misc_feature: MA Experiment 20001247 PARAMETER Experiment Name: At_Far-red-induction_P Parameter: Age (day) Value: 7
  misc_feature: MA Experiment 20001247 PARAMETER Experiment Name: At_Far-red-induction_P Parameter: Light Value: Far-red vs. White
  misc_feature: MA Experiment 20001247 PARAMETER Experiment Name: At_Far-red-induction_P Parameter: Organism Value: A. thaliana
  misc_feature: MA Experiment 20001247 PARAMETER Experiment Name: At_Far-red-induction_P Parameter: Plant Line Value: Columbia
  misc_feature: MA Experiment 20001247 PARAMETER Experiment Name: At_Far-red-induction_P Parameter: Timepoint (hr) Value: 1
  misc_feature: MA Experiment 20001247 PARAMETER Experiment Name: At_Far-red-induction_P Parameter: Tissue Value: Whole Plant
  misc_feature: MA Experiment ID: 20001248 Result: Down-regulated in Transcription
  misc_feature: MA Experiment 20001248 PARAMETER Experiment Name: At_Far-red-induction_P Parameter: Age (day) Value: 7
  misc_feature: MA Experiment 20001248 PARAMETER Experiment Name: At_Far-red-induction_P Parameter: Light Value: Far-red vs. White
  misc_feature: MA Experiment 20001248 PARAMETER Experiment Name: At_Far-red-induction_P Parameter: Organism Value: A. thaliana
  misc_feature: MA Experiment 20001248 PARAMETER Experiment Name: At_Far-red-induction_P Parameter: Plant Line Value: Columbia
  misc_feature: MA Experiment 20001248 PARAMETER Experiment Name: At_Far-red-induction_P Parameter: Timepoint (hr) Value: 4
  misc_feature: MA Experiment 20001248 PARAMETER Experiment Name: At_Far-red-induction_P Parameter: Tissue Value: Whole Plant
  misc_feature: MA Experiment ID: 20001450 Result: Down-regulated in Transcription
  misc_feature: MA Experiment 20001450 PARAMETER Experiment Name: At_Far-red-induction_P Parameter: Age (day) Value: 7
  misc_feature: MA Experiment 20001450 PARAMETER Experiment Name: At_Far-red-induction_P Parameter: Light Value: Far-red vs. White
  misc_feature: MA Experiment 20001450 PARAMETER Experiment Name: At_Far-red-induction_P Parameter: Organism Value: A. thaliana
  misc_feature: MA Experiment 20001450 PARAMETER Experiment Name: At_Far-red-induction_P Parameter: Plant Line Value: Columbia
  misc_feature: MA Experiment 20001450 PARAMETER Experiment Name: At_Far-red-induction_P Parameter: Timepoint (hr) Value: 8
  misc_feature: MA Experiment 20001450 PARAMETER Experiment Name: At_Far-red-induction_P Parameter: Tissue Value: Whole Plant
  misc_feature: MA Experiment ID: 20001451 Result: Down-regulated in Transcription
  misc_feature: MA Experiment 20001451 PARAMETER Experiment Name: At_Far-red-induction_P Parameter: Age (day) Value: 7
  misc_feature: MA Experiment 20001451 PARAMETER Experiment Name: At_Far-red-induction_P Parameter: Light Value: Far-red vs. White
  misc_feature: MA Experiment 20001451 PARAMETER Experiment Name: At_Far-red-induction_P Parameter: Organism Value: A. thaliana
  misc_feature: MA Experiment 20001451 PARAMETER Experiment Name: At_Far-red-induction_P Parameter: Plant Line Value: Columbia
  misc_feature: MA Experiment 20001451 PARAMETER Experiment Name: At_Far-red-induction_P Parameter: Timepoint (hr) Value: 24
  misc_feature: MA Experiment 20001451 PARAMETER Experiment Name: At_Far-red-induction_P Parameter: Tissue Value: Whole Plant
  misc_feature: MA Experiment ID: 20001904 Result: Up-regulated in Transcription
  misc_feature: MA Experiment 20001904 PARAMETER Experiment Name: At_Drought_Reproduction_P Parameter: Age (day) Value: 37
  misc_feature: MA Experiment 20001904 PARAMETER Experiment Name: At_Drought_Reproduction_P Parameter: Organism Value: A. thaliana
  misc_feature: MA Experiment 20001904 PARAMETER Experiment Name: At_Drought_Reproduction_P Parameter: Plant Line Value: WS
  misc_feature: MA Experiment 20001904 PARAMETER Experiment Name: At_Drought_Reproduction_P Parameter: Timepoint (day) Value: 7
  misc_feature: MA Experiment 20001904 PARAMETER Experiment Name: At_Drought_Reproduction_P Parameter: Tissue Value: Rosettes
  misc_feature: MA Experiment 20001904 PARAMETER Experiment Name: At_Drought_Reproduction_P Parameter: Treatment Value: Drought vs. No Drought
  misc_feature: MA Experiment ID: 20001905 Result: Up-regulated in Transcription
  misc_feature: MA Experiment 20001905 PARAMETER Experiment Name: At_Drought_Reproduction_P Parameter: Age (day) Value: 40
  misc_feature: MA Experiment 20001905 PARAMETER Experiment Name: At_Drought_Reproduction_P Parameter: Organism Value: A. thaliana
  misc_feature: MA Experiment 20001905 PARAMETER Experiment Name: At_Drought_Reproduction_P Parameter: Plant Line Value: WS
  misc_feature: MA Experiment 20001905 PARAMETER Experiment Name: At_Drought_Reproduction_P Parameter: Timepoint (day) Value: 10
  misc_feature: MA Experiment 20001905 PARAMETER Experiment Name: At_Drought_Reproduction_P Parameter: Tissue Value: Rosettes
  misc_feature: MA Experiment 20001905 PARAMETER Experiment Name: At_Drought_Reproduction_P Parameter: Treatment Value: Drought vs. No Drought
caaagcctaaaaaaatccgaccttttttgttttctctctctagaagtctctctgtttccatctttctctctctctagctcttcttcctcgtttctggcttttctgggaattttgctctatttgccccaattgttcgcttgaattacgaatccgatatcgccgatcgtcgtagatctgcgttgatattgtccggctgagtaaacagagtgaacgaaaaccaaaaacagagagggggtttaaaaatcctgaagaaaatcgcatgaatttgtttggaagcctgattttttcatcttcgatttcgagccacttcacgacttgtcttctcatctttattcttcatttctctccccagcttaatagtaataataataataataatagtaatcgtaattccaataatctcgagagtaatcgtttgatcaattgaaaaaaaaatcatggagtccaggaaaaactctgatcgtcaaatgcgtagagctaattgcttttcagctggtgagaggatgaagacaaggtcgccctccgtgattgtgatcggaggtggtttcggtgggatttcagctgctcgcactcttcaggatgcttcctttcaggttatggtactggagtcccgtgacagaattggtggacgagttcacactgattactcatttggttttcctgttgatcttggtgcatcatggctgcatggagtatgcaaggagaatcctctcgcaccagttattggaagacttggactgcccttgtatcgtactagcggtgacaattccgtcctgtatgatcatgatctcgagagctatgctctgtttgatatggatggcaaccaagttcctcaagaattggtaactcagattggcgtaacgtttgagcgtattttggaagagatcaataaagtcagggatgagcaggatgctgacatttcaatttctcaggctttctcaattgtcttttctaggaaacccgagctgaggttagaggggcttgcacacaacgtacttcaatggtatgtatgccgcatggaaggatggtttgccgcagatgctgaaaccatctctgcaaagtgttgggaccaggaggaattgttgcctggtggacacggtcttatggttagagggtatcgtcctgtcatcaatactctggcgaaaggtcttgatatccgagtaggccacagggttactaagattgtcaggcggtacaatggagtgaaggtaacgacagaaaacgggcaaacttttgttgcggatgctgcagtcattgctgtccctcttggagttttaaaatcgggaaccataaagttcgaacctaagctacctgagtggaaacaagaagcaatcaacgacctaggagtaggtattgagaacaagatcatactacattttgagaaagtcttttggccgaaagtagagtttctaggagtggtagctgaaacctcctacggttgcagttattttttgaacctgcacaaggccacgggtcatccggttctggtttacatgccggctggtcagcttgccaaagacattgagaaaatgtctgatgaagcagctgcaaatttcgccgtcttgcaactccagagaattcttcccgatgcattgcctccggtacagtatctcgtgtcgaggtggggatctgatgtgaattcaatgggatcttatagctatgatatcgtgggcaaacctcatgatctctacgagaggcttagggttccagtggataacttattctttgccggtgaagcgacgagctcgagcttcccgggctcggttcacggcgcttattcaactggattgatggcagctgaagattgtaggatgcgagttctggagcggtatggtgagttggatctgttccagcctgtgatgggcgaggaaggacctgcctctgtacctcttcttatatctcgtctctaaactccatcagttatcgtttactagaaggaacctcaagtgatgattgtcttaatatgaaactaaaattattctcgtgtcggatcgtttaaaacattcccagtcttattttctcagtgtttttaattcaataaattggaacattatatccttgtgatattatttatatatgataatcatctttaac

SEQ ID NO: 37591 - protein, 490 aa, Arabidopsis thaliana
  peptide (1)..(490): Ceres Seq. ID no. 15222960
  misc_feature (37)..(458): Pfam Name: Flavin containing amine oxidoreductase Pfam Description: Flavin containing amine oxidoreductase
  misc_feature (27)..(456): Homolog of NCBI NO: 38505628 NR Description: slr5093 [Synechocystis sp. PCC 6803]
  misc_feature (357)..(490): Homolog of NCBI NO: 25404949 NR Description: protein F1E22.18 [imported] - Arabidopsis
  misc_feature (1)..(392): Homolog of NCBI NO: 25404949 NR Description: protein F1E22.18 [imported] - Arabidopsis
  misc_feature (1)..(490): Homolog of NCBI NO: 13877615 NR Description: putative protein kinase gb|AAD22129 [Arabidopsis
  misc_feature (1)..(490): Homolog of NCBI NO: 15218830 NR Description: amine oxidase family [Arabidopsis thaliana]
  misc_feature (14)..(490): Homolog of NCBI NO: 38344167 NR Description: OSJNBa0053K19.6 [Oryza sativa (japonica
  misc_feature (1)..(490): Homolog of NCBI NO: 15231622 NR Description: amine oxidase family [Arabidopsis thaliana]
  misc_feature (1)..(490): Homolog of NCBI NO: 21553762 NR Description: putative amine oxidase [Arabidopsis thaliana]
  misc_feature (1)..(490): Homolog of NCBI NO: 18650598 NR Description: At2g43020/MFL8.12 [Arabidopsis thaliana]
  misc_feature (1)..(490): Homolog of NCBI NO: 15224204 NR Description: amine oxidase family [Arabidopsis thaliana]
MESRKNSDRQMRRANCFSAGERMKTRSPSVIVIGGGFGGISAARTLQDASFQVMVLESRDRIGGRVHTDYSFGFPVDLGASWLHGVCKENPLAPVIGRLGLPLYRTSGDNSVLYDHDLESYALFDMDGNQVPQELVTQIGVTFERILEEINKVRDEQDADISISQAFSIVFSRKPELRLEGLAHNVLQWYVCRMEGWFAADAETISAKCWDQEELLPGGHGLMVRGYRPVINTLAKGLDIRVGHRVTKIVRRYNGVKVTTENGQTFVADAAVIAVPLGVLKSGTIKFEPKLPEWKQEAINDLGVGIENKIILHFEKVFWPKVEFLGVVAETSYGCSYFLNLHKATGHPVLVYMPAGQLAKDIEKMSDEAAANFAVLQLQRILPDALPPVQYLVSRWGSDVNSMGSYSYDIVGKPHDLYERLRVPVDNLFFAGEATSSSFPGSVHGAYSTGLMAAEDCRMRVLERYGELDLFQPVMGEEGPASVPLLISRL

SEQ ID NO: 37592 - protein, 480 aa, Arabidopsis thaliana
  peptide (1)..(480): Ceres Seq. ID no. 15222961
  misc_feature (27)..(448): Pfam Name: Flavin containing amine oxidoreductase Pfam Description: Flavin containing amine oxidoreductase
  misc_feature (17)..(446): Homolog of NCBI NO: 38505628 NR Description: slr5093 [Synechocystis sp. PCC 6803]
  misc_feature (347)..(480): Homolog of NCBI NO: 25404949 NR Description: protein F1E22.18 [imported] - Arabidopsis
  misc_feature (1)..(382): Homolog of NCBI NO: 25404949 NR Description: protein F1E22.18 [imported] - Arabidopsis
  misc_feature (1)..(480): Homolog of NCBI NO: 13877615 NR Description: putative protein kinase gb|AAD22129 [Arabidopsis
  misc_feature (1)..(480): Homolog of NCBI NO: 15218830 NR Description: amine oxidase family [Arabidopsis thaliana]
  misc_feature (4)..(480): Homolog of NCBI NO: 38344167 NR Description: OSJNBa0053K19.6 [Oryza sativa (japonica
  misc_feature (1)..(480): Homolog of NCBI NO: 15231622 NR Description: amine oxidase family [Arabidopsis thaliana]
  misc_feature (1)..(480): Homolog of NCBI NO: 21553762 NR Description: putative amine oxidase [Arabidopsis thaliana]
  misc_feature (1)..(480): Homolog of NCBI NO: 18650598 NR Description: At2g43020/MFL8.12 [Arabidopsis thaliana]
  misc_feature (1)..(480): Homolog of NCBI NO: 15224204 NR Description: amine oxidase family [Arabidopsis thaliana]
MRRANCFSAGERMKTRSPSVIVIGGGFGGISAARTLQDASFQVMVLESRDRIGGRVHTDYSFGFPVDLGASWLHGVCKENPLAPVIGRLGLPLYRTSGDNSVLYDHDLESYALFDMDGNQVPQELVTQIGVTFERILEEINKVRDEQDADISISQAFSIVFSRKPELRLEGLAHNVLQWYVCRMEGWFAADAETISAKCWDQEELLPGGHGLMVRGYRPVINTLAKGLDIRVGHRVTKIVRRYNGVKVTTENGQTFVADAAVIAVPLGVLKSGTIKFEPKLPEWKQEAINDLGVGIENKIILHFEKVFWPKVEFLGVVAETSYGCSYFLNLHKATGHPVLVYMPAGQLAKDIEKMSDEAAANFAVLQLQRILPDALPPVQYLVSRWGSDVNSMGSYSYDIVGKPHDLYERLRVPVDNLFFAGEATSSSFPGSVHGAYSTGLMAAEDCRMRVLERYGELDLFQPVMGEEGPASVPLLISRL

SEQ ID NO: 37593 - protein, 468 aa, Arabidopsis thaliana
  peptide (1)..(468): Ceres Seq. ID no. 15222962
  misc_feature (15)..(436): Pfam Name: Flavin containing amine oxidoreductase Pfam Description: Flavin containing amine oxidoreductase
  misc_feature (5)..(434): Homolog of NCBI NO: 38505628 NR Description: slr5093 [Synechocystis sp. PCC 6803]
  misc_feature (335)..(468): Homolog of NCBI NO: 25404949 NR Description: protein F1E22.18 [imported] - Arabidopsis
  misc_feature (1)..(370): Homolog of NCBI NO: 25404949 NR Description: protein F1E22.18 [imported] - Arabidopsis
  misc_feature (1)..(468): Homolog of NCBI NO: 13877615 NR Description: putative protein kinase gb|AAD22129 [Arabidopsis
  misc_feature (1)..(468): Homolog of NCBI NO: 15218830 NR Description: amine oxidase family [Arabidopsis thaliana]
  misc_feature (1)..(468): Homolog of NCBI NO: 38344167 NR Description: OSJNBa0053K19.6 [Oryza sativa (japonica
  misc_feature (1)..(468): Homolog of NCBI NO: 15231622 NR Description: amine oxidase family [Arabidopsis thaliana]
  misc_feature (1)..(468): Homolog of NCBI NO: 21553762 NR Description: putative amine oxidase [Arabidopsis thaliana]
  misc_feature (1)..(468): Homolog of NCBI NO: 18650598 NR Description: At2g43020/MFL8.12 [Arabidopsis thaliana]
  misc_feature (1)..(468): Homolog of NCBI NO: 15224204 NR Description: amine oxidase family [Arabidopsis thaliana]
MKTRSPSVIVIGGGFGGISAARTLQDASFQVMVLESRDRIGGRVHTDYSFGFPVDLGASWLHGVCKENPLAPVIGRLGLPLYRTSGDNSVLYDHDLESYALFDMDGNQVPQELVTQIGVTFERILEEINKVRDEQDADISISQAFSIVFSRKPELRLEGLAHNVLQWYVCRMEGWFAADAETISAKCWDQEELLPGGHGLMVRGYRPVINTLAKGLDIRVGHRVTKIVRRYNGVKVTTENGQTFVADAAVIAVPLGVLKSGTIKFEPKLPEWKQEAINDLGVGIENKIILHFEKVFWPKVEFLGVVAETSYGCSYFLNLHKATGHPVLVYMPAGQLAKDIEKMSDEAAANFAVLQLQRILPDALPPVQYLVSRWGSDVNSMGSYSYDIVGKPHDLYERLRVPVDNLFFAGEATSSSFPGSVHGAYSTGLMAAEDCRMRVLERYGELDLFQPVMGEEGPASVPLLISRL

SEQ ID NO: 37594 - DNA, 1616 bp, Arabidopsis thaliana; identical to SEQ ID NO: 36446
  misc_feature (1)..(1616): Ceres Seq. ID no. 13493832
  misc_feature: MA Experiment ID: 20000179 Result: Up-regulated in Transcription
  misc_feature: MA Experiment 20000179 PARAMETER Experiment Name: At_Germinating_Seeds_P Parameter: Age (hr) Value: 6 vs. 0
  misc_feature: MA Experiment 20000179 PARAMETER Experiment Name: At_Germinating_Seeds_P Parameter: Tissue Value: Germinating Seeds
  misc_feature: MA Experiment ID: 20000180 Result: Up-regulated in Transcription
  misc_feature: MA Experiment 20000180 PARAMETER Experiment Name: At_Germinating_Seeds_P Parameter: Age (hr) Value: 24 vs. 0
  misc_feature: MA Experiment 20000180 PARAMETER Experiment Name: At_Germinating_Seeds_P Parameter: Tissue Value: Germinating Seeds
  misc_feature: MA Experiment ID: 20000184 Result: Up-regulated in Transcription
  misc_feature: MA Experiment 20000184 PARAMETER Experiment Name: At_Shoots__P Parameter: Age (day) Value: 7
  misc_feature: MA Experiment 20000184 PARAMETER Experiment Name: At_Shoots__P Parameter: Tissue Value: Shoots vs. Whole Plant
  misc_feature: MA Experiment ID: 20000185 Result: Up-regulated in Transcription
  misc_feature: MA Experiment 20000185 PARAMETER Experiment Name: At_Roots__P Parameter: Age (day) Value: 7 vs. 21
  misc_feature: MA Experiment 20000185 PARAMETER Experiment Name: At_Roots__P Parameter: Organism Value: A. thaliana
  misc_feature: MA Experiment 20000185 PARAMETER Experiment Name: At_Roots__P Parameter: Tissue Value: Roots vs. Whole Plant
  misc_feature: MA Experiment ID: 20001450 Result: Up-regulated in Transcription
  misc_feature: MA Experiment 20001450 PARAMETER Experiment Name: At_Far-red-induction_P Parameter: Age (day) Value: 7
  misc_feature: MA Experiment 20001450 PARAMETER Experiment Name: At_Far-red-induction_P Parameter: Light Value: Far-red vs. White
  misc_feature: MA Experiment 20001450 PARAMETER Experiment Name: At_Far-red-induction_P Parameter: Organism Value: A. thaliana
  misc_feature: MA Experiment 20001450 PARAMETER Experiment Name: At_Far-red-induction_P Parameter: Plant Line Value: Columbia
  misc_feature: MA Experiment 20001450 PARAMETER Experiment Name: At_Far-red-induction_P Parameter: Timepoint (hr) Value: 8
  misc_feature: MA Experiment 20001450 PARAMETER Experiment Name: At_Far-red-induction_P Parameter: Tissue Value: Whole Plant
  misc_feature: Phenotype: INFLORESCENCE Flowering Time-Late Flowering
  misc_feature: Phenotype: INFLORESCENCE Flowering Time-Late Flowering

SEQ ID NO: 37595 - protein, 468 aa, Arabidopsis thaliana; identical to SEQ ID NO: 36447
  peptide (1)..(468): Ceres Seq. ID no. 13493833
  misc_feature (129)..(433): Pfam Name: Dehydrogenase E1 component Pfam Description: Dehydrogenase E1 component
  misc_feature (129)..(433): Pfam Name: Dehydrogenase E1 component Pfam Description: Dehydrogenase E1 component
  misc_feature (129)..(433): Pfam Name: Dehydrogenase E1 component Pfam Description: Dehydrogenase E1 component
  misc_feature (119)..(442): Homolog of NCBI NO: 33861844 NR Description: Pyruvate dehydrogenase E1 alpha subunit
  misc_feature (119)..(442): Homolog of NCBI NO: 22298712 NR Description: pyruvate dehydrogenase E1 component, alpha
  misc_feature (112)..(442): Homolog of NCBI NO: 11465733 NR Description: pyruvate dehydrogenase E1 component alpha subunit
  misc_feature (113)..(442): Homolog of NCBI NO: 16331186 NR Description: pyruvate dehydrogenase E1 component, alpha
  misc_feature (113)..(442): Homolog of NCBI NO: 23128827 NR Description: hypothetical protein [Nostoc punctiforme]
  misc_feature (119)..(442): Homolog of NCBI NO: 33861844 NR Description: Pyruvate dehydrogenase E1 alpha subunit
  misc_feature (112)..(442): Homolog of NCBI NO: 11465733 NR Description: pyruvate dehydrogenase E1 component alpha subunit
  misc_feature (113)..(442): Homolog of NCBI NO: 23128827 NR Description: hypothetical protein [Nostoc punctiforme]
  misc_feature (113)..(442): Homolog of NCBI NO: 16331186 NR Description: pyruvate dehydrogenase E1 component, alpha
  misc_feature (112)..(442): Homolog of NCBI NO: 11465733 NR Description: pyruvate dehydrogenase E1 component alpha subunit
  misc_feature (119)..(442): Homolog of NCBI NO: 22298712 NR Description: pyruvate dehydrogenase E1 component, alpha
  misc_feature (119)..(442): Homolog of NCBI NO: 33861844 NR Description: Pyruvate dehydrogenase E1 alpha subunit
  misc_feature (41)..(468): Homolog of NCBI NO: 15223294 NR Description: pyruvate dehydrogenase E1 alpha subunit
  misc_feature (41)..(457): Homolog of NCBI NO: 6715645 NR Description: T25K16.8 [Arabidopsis thaliana]
  misc_feature (119)..(468): Homolog of NCBI NO: 38344868 NR Description: OSJNBa0020P07.11 [Oryza sativa (japonica
  misc_feature (102)..(442): Homolog of NCBI NO: 23041416 NR Description: hypothetical protein [Trichodesmium erythraeum
  misc_feature (102)..(442): Homolog of NCBI NO: 17230200 NR Description: pyruvate dehydrogenase E1 component, alpha
  misc_feature (41)..(468): Homolog of NCBI NO: 15223294 NR Description: pyruvate dehydrogenase E1 alpha subunit
  misc_feature (41)..(457): Homolog of NCBI NO: 6715645 NR Description: T25K16.8 [Arabidopsis thaliana]
  misc_feature (119)..(468): Homolog of NCBI NO: 38344868 NR Description: OSJNBa0020P07.11 [Oryza sativa (japonica
  misc_feature (102)..(442): Homolog of NCBI NO: 23041416 NR Description: hypothetical protein [Trichodesmium erythraeum
  misc_feature (102)..(442): Homolog of NCBI NO: 17230200 NR Description: pyruvate dehydrogenase E1 component, alpha
  misc_feature (113)..(442): Homolog of NCBI NO: 23128827 NR Description: hypothetical protein [Nostoc punctiforme]
  misc_feature (113)..(442): Homolog of NCBI NO: 16331186 NR Description: pyruvate dehydrogenase E1 component, alpha
  misc_feature (119)..(442): Homolog of NCBI NO: 22298712 NR Description: pyruvate dehydrogenase E1 component, alpha
  misc_feature (102)..(442): Homolog of NCBI NO: 17230200 NR Description: pyruvate dehydrogenase E1 component, alpha
  misc_feature (102)..(442): Homolog of NCBI NO: 23041416 NR Description: hypothetical protein [Trichodesmium erythraeum
  misc_feature (119)..(468): Homolog of NCBI NO: 38344868 NR Description: OSJNBa0020P07.11 [Oryza sativa (japonica
  misc_feature (41)..(457): Homolog of NCBI NO: 6715645 NR Description: T25K16.8 [Arabidopsis thaliana]
  misc_feature (41)..(468): Homolog of NCBI NO: 15223294 NR Description: pyruvate dehydrogenase E1 alpha subunit

SEQ ID NO: 37596 - protein, 428 aa, Arabidopsis thaliana; identical to SEQ ID NO: 36448
  peptide (1)..(428): Ceres Seq. ID no. 13493834
  misc_feature (89)..(393): Pfam Name: Dehydrogenase E1 component Pfam Description: Dehydrogenase E1 component
  misc_feature (89)..(393): Pfam Name: Dehydrogenase E1 component Pfam Description: Dehydrogenase E1 component
  misc_feature (89)..(393): Pfam Name: Dehydrogenase E1 component Pfam Description: Dehydrogenase E1 component
  misc_feature (79)..(402): Homolog of NCBI NO: 33861844 NR Description: Pyruvate dehydrogenase E1 alpha subunit
  misc_feature (79)..(402): Homolog of NCBI NO: 22298712 NR Description: pyruvate dehydrogenase E1 component, alpha
  misc_feature (72)..(402): Homolog of NCBI NO: 11465733 NR Description: pyruvate dehydrogenase E1 component alpha subunit
  misc_feature (73)..(402): Homolog of NCBI NO: 16331186 NR Description: pyruvate dehydrogenase E1 component, alpha
  misc_feature (73)..(402): Homolog of NCBI NO: 23128827 NR Description: hypothetical protein [Nostoc punctiforme]
  misc_feature (79)..(402): Homolog of NCBI NO: 33861844 NR Description: Pyruvate dehydrogenase E1 alpha subunit
  misc_feature (72)..(402): Homolog of NCBI NO: 11465733 NR Description: pyruvate dehydrogenase E1 component alpha subunit
  misc_feature (73)..(402): Homolog of NCBI NO: 23128827 NR Description: hypothetical protein [Nostoc punctiforme]
  misc_feature (73)..(402): Homolog of NCBI NO: 16331186 NR Description: pyruvate dehydrogenase E1 component, alpha
  misc_feature (72)..(402): Homolog of NCBI NO: 11465733 NR Description: pyruvate dehydrogenase E1 component alpha subunit
  misc_feature (79)..(402): Homolog of NCBI NO: 22298712 NR Description: pyruvate dehydrogenase E1 component, alpha
  misc_feature (79)..(402): Homolog of NCBI NO: 33861844 NR Description: Pyruvate dehydrogenase E1 alpha subunit
  misc_feature (1)..(428): Homolog of NCBI NO: 15223294 NR Description: pyruvate dehydrogenase E1 alpha subunit
  misc_feature (1)..(417): Homolog of NCBI NO: 6715645 NR Description: T25K16.8 [Arabidopsis thaliana]
  misc_feature (79)..(428): Homolog of NCBI NO: 38344868 NR Description: OSJNBa0020P07.11 [Oryza sativa (japonica
  misc_feature (62)..(402): Homolog of NCBI NO: 23041416 NR Description: hypothetical protein [Trichodesmium erythraeum
  misc_feature (62)..(402): Homolog of NCBI NO: 17230200 NR Description: pyruvate dehydrogenase E1 component, alpha
  misc_feature (1)..(428): Homolog of NCBI NO: 15223294 NR Description: pyruvate dehydrogenase E1 alpha subunit
  misc_feature (1)..(417): Homolog of NCBI NO: 6715645 NR Description: T25K16.8 [Arabidopsis thaliana]
  misc_feature (79)..(428): Homolog of NCBI NO: 38344868 NR Description: OSJNBa0020P07.11 [Oryza sativa (japonica
  misc_feature (62)..(402): Homolog of NCBI NO: 23041416 NR Description: hypothetical protein [Trichodesmium erythraeum
  misc_feature (62)..(402): Homolog of NCBI NO: 17230200 NR Description: pyruvate dehydrogenase E1 component, alpha
  misc_feature (73)..(402): Homolog of NCBI NO: 23128827 NR Description: hypothetical protein [Nostoc punctiforme]
  misc_feature (73)..(402): Homolog of NCBI NO: 16331186 NR Description: pyruvate dehydrogenase E1 component, alpha
  misc_feature (79)..(402): Homolog of NCBI NO: 22298712 NR Description: pyruvate dehydrogenase E1 component, alpha
  misc_feature (62)..(402): Homolog of NCBI NO: 17230200 NR Description: pyruvate dehydrogenase E1 component, alpha
  misc_feature (62)..(402): Homolog of NCBI NO: 23041416 NR Description: hypothetical protein [Trichodesmium erythraeum
  misc_feature (79)..(428): Homolog of NCBI NO: 38344868 NR Description: OSJNBa0020P07.11 [Oryza sativa (japonica
  misc_feature (1)..(417): Homolog of NCBI NO: 6715645 NR Description: T25K16.8 [Arabidopsis thaliana]
  misc_feature (1)..(428): Homolog of NCBI NO: 15223294 NR Description: pyruvate dehydrogenase E1 alpha subunit

SEQ ID NO: 37597 - protein, 338 aa, Arabidopsis thaliana; identical to SEQ ID NO: 24106
  peptide (1)..(338): Ceres Seq. ID no. 13493835
  misc_feature (1)..(303): Pfam Name: Dehydrogenase E1 component Pfam Description: Dehydrogenase E1 component
  misc_feature (1)..(303): Pfam Name: Dehydrogenase E1 component Pfam Description: Dehydrogenase E1 component
  misc_feature (1)..(303): Pfam Name: Dehydrogenase E1 component Pfam Description: Dehydrogenase E1 component
  misc_feature (1)..(312): Homolog of NCBI NO: 33861844 NR Description: Pyruvate dehydrogenase E1 alpha subunit
  misc_feature (1)..(312): Homolog of NCBI NO: 22298712 NR Description: pyruvate dehydrogenase E1 component, alpha
  misc_feature (1)..(312): Homolog of NCBI NO: 11465733 NR Description: pyruvate dehydrogenase E1 component alpha subunit
  misc_feature (1)..(312): Homolog of NCBI NO: 16331186 NR Description: pyruvate dehydrogenase E1 component, alpha
  misc_feature (1)..(312): Homolog of NCBI NO: 23128827 NR Description: hypothetical protein [Nostoc punctiforme]
  misc_feature (1)..(312): Homolog of NCBI NO: 33861844 NR Description: Pyruvate dehydrogenase E1 alpha subunit
  misc_feature (1)..(312): Homolog of NCBI NO: 11465733 NR Description: pyruvate dehydrogenase E1 component alpha subunit
  misc_feature (1)..(312): Homolog of NCBI NO: 23128827 NR Description: hypothetical protein [Nostoc punctiforme]
  misc_feature (1)..(312): Homolog of NCBI NO: 16331186 NR Description: pyruvate dehydrogenase E1 component, alpha
  misc_feature (1)..(312): Homolog of NCBI NO: 11465733 NR Description: pyruvate dehydrogenase E1 component alpha subunit
  misc_feature (1)..(312): Homolog of NCBI NO: 22298712 NR Description: pyruvate dehydrogenase E1 component, alpha
  misc_feature (1)..(312): Homolog of NCBI NO: 33861844 NR Description: Pyruvate dehydrogenase E1 alpha subunit
  misc_feature (1)..(338): Homolog of NCBI NO: 15223294 NR Description: pyruvate dehydrogenase E1 alpha subunit
  misc_feature (1)..(327): Homolog of NCBI NO: 6715645 NR Description: T25K16.8 [Arabidopsis thaliana]
  misc_feature (1)..(338): Homolog of NCBI NO: 38344868 NR Description: OSJNBa0020P07.11 [Oryza sativa (japonica
  misc_feature (1)..(312): Homolog of NCBI NO: 23041416 NR Description: hypothetical protein [Trichodesmium erythraeum
  misc_feature (1)..(312): Homolog of NCBI NO: 17230200 NR Description: pyruvate dehydrogenase E1 component, alpha
  misc_feature (1)..(338): Homolog of NCBI NO: 15223294 NR Description: pyruvate dehydrogenase E1 alpha subunit
  misc_feature (1)..(327): Homolog of NCBI NO: 6715645 NR Description: T25K16.8 [Arabidopsis thaliana]
  misc_feature (1)..(338): Homolog of NCBI NO: 38344868 NR Description: OSJNBa0020P07.11 [Oryza sativa (japonica
  misc_feature (1)..(312): Homolog of NCBI NO: 23041416 NR Description: hypothetical protein [Trichodesmium erythraeum
  misc_feature (1)..(312): Homolog of NCBI NO: 17230200 NR Description: pyruvate dehydrogenase E1 component, alpha
  misc_feature (1)..(312): Homolog of NCBI NO: 23128827 NR Description: hypothetical protein [Nostoc punctiforme]
  misc_feature (1)..(312): Homolog of NCBI NO: 16331186 NR Description: pyruvate dehydrogenase E1 component, alpha
  misc_feature (1)..(312): Homolog of NCBI NO: 22298712 NR Description: pyruvate dehydrogenase E1 component, alpha
  misc_feature (1)..(312): Homolog of NCBI NO: 17230200 NR Description: pyruvate dehydrogenase E1 component, alpha
  misc_feature (1)..(312): Homolog of NCBI NO: 23041416 NR Description: hypothetical protein [Trichodesmium erythraeum
  misc_feature (1)..(338): Homolog of NCBI NO: 38344868 NR Description: OSJNBa0020P07.11 [Oryza sativa (japonica
  misc_feature (1)..(327): Homolog of NCBI NO: 6715645 NR Description: T25K16.8 [Arabidopsis thaliana]
  misc_feature (1)..(338): Homolog of NCBI NO: 15223294 NR Description: pyruvate dehydrogenase E1 alpha subunit

SEQ ID NO: 37598 - DNA, 1167 bp, Arabidopsis thaliana; identical to SEQ ID NO: 36245
  misc_feature (1)..(1167): Ceres Seq. ID no. 12321925
  misc_feature: MA Experiment ID: 20000182 Result: Up-regulated in Transcription
  misc_feature: MA Experiment 20000182 PARAMETER Experiment Name: At_2mM_SA_P Parameter: Age (day) Value: 14
  misc_feature: MA Experiment 20000182 PARAMETER Experiment Name: At_2mM_SA_P Parameter: Organism Value: A. thaliana
  misc_feature: MA Experiment 20000182 PARAMETER Experiment Name: At_2mM_SA_P Parameter: Plant Line Value: WS
  misc_feature: MA Experiment 20000182 PARAMETER Experiment Name: At_2mM_SA_P Parameter: Timepoint (hr) Value: 6
  misc_feature: MA Experiment 20000182 PARAMETER Experiment Name: At_2mM_SA_P Parameter: Tissue Value: Aerial
  misc_feature: MA Experiment 20000182 PARAMETER Experiment Name: At_2mM_SA_P Parameter: Treatment Value: 2mM SA vs. No Treatment

SEQ ID NO: 37599 - protein, 199 aa, Arabidopsis thaliana; identical to SEQ ID NO: 36246
  peptide (1)..(199): Ceres Seq. ID no. 12321926
  misc_feature (4)..(184): Pfam Name: ADP-ribosylation factor family Pfam Description: ADP-ribosylation factor family
  misc_feature (4)..(184): Pfam Name: ADP-ribosylation factor family Pfam Description: ADP-ribosylation factor family
  misc_feature (1)..(186): Homolog of NCBI NO: 39584902 NR Description: Hypothetical protein CBG09004 [Caenorhabditis
  misc_feature (1)..(186): Homolog of NCBI NO: 17551730 NR Description: ADP-Ribosylation Factor related ARF-1 (20.5 kD)
  misc_feature (1)..(186): Homolog of NCBI NO: 31240205 NR Description: ENSANGP00000015770 [Anopheles gambiae]
  misc_feature (1)..(186): Homolog of NCBI NO: 17136866 NR Description: ADP ribosylation factor 79F CG8385-PB
  misc_feature (1)..(188): Homolog of NCBI NO: 32401087 NR Description: ADP-ribosylation factor 1 [Aiptasia pulchella]
  misc_feature (1)..(186): Homolog of NCBI NO: 39584902 NR Description: Hypothetical protein CBG09004 [Caenorhabditis
  misc_feature (1)..(186): Homolog of NCBI NO: 31240205 NR Description: ENSANGP00000015770 [Anopheles gambiae]
  misc_feature (1)..(188): Homolog of NCBI NO: 32401087 NR Description: ADP-ribosylation factor 1 [Aiptasia pulchella]
  misc_feature (1)..(199): Homolog of NCBI NO: 15237901 NR Description: ADP-ribosylation factor -like protein
  misc_feature (1)..(199): Homolog of NCBI NO: 15228464 NR Description: putative ADP-ribosylation factor
  misc_feature (1)..(198): Homolog of NCBI NO: 37537196 NR Description: putative ADP-ribosylation factor
  misc_feature (1)..(195): Homolog of NCBI NO: 34897926 NR Description: Similar to Drosophila melanogaster
  misc_feature (1)..(186): Homolog of NCBI NO: 3182915 NR Description: ADP-RIBOSYLATION FACTOR
  misc_feature (1)..(186): Homolog of NCBI NO: 17136866 NR Description: ADP ribosylation factor 79F CG8385-PB
  misc_feature (1)..(186): Homolog of NCBI NO: 17551730 NR Description: ADP-Ribosylation Factor related ARF-1 (20.5 kD)
  misc_feature (1)..(186): Homolog of NCBI NO: 3182915 NR Description: ADP-RIBOSYLATION FACTOR
  misc_feature (1)..(195): Homolog of NCBI NO: 34897926 NR Description: Similar to Drosophila melanogaster
  misc_feature (1)..(198): Homolog of NCBI NO: 37537196 NR Description: putative ADP-ribosylation factor
  misc_feature (1)..(199): Homolog of NCBI NO: 15228464 NR Description: putative ADP-ribosylation factor
  misc_feature (1)..(199): Homolog of NCBI NO: 15237901 NR Description: ADP-ribosylation factor -like protein
  misc_feature (86)..(86): Xaa is any aa, unknown or other
  misc_feature (89)..(89): Xaa is any aa, unknown or other

SEQ ID NO: 37600 - protein, 182 aa, Arabidopsis thaliana; identical to SEQ ID NO: 36247
  peptide (1)..(182): Ceres Seq. ID no. 12321927
  misc_feature (1)..(167): Pfam Name: ADP-ribosylation factor family Pfam Description: ADP-ribosylation factor family
  misc_feature (1)..(167): Pfam Name: ADP-ribosylation factor family Pfam Description: ADP-ribosylation factor family
  misc_feature (1)..(169): Homolog of NCBI NO: 39584902 NR Description: Hypothetical protein CBG09004 [Caenorhabditis
  misc_feature (1)..(169): Homolog of NCBI NO: 17551730 NR Description: ADP-Ribosylation Factor related ARF-1 (20.5 kD)
  misc_feature (1)..(169): Homolog of NCBI NO: 31240205 NR Description: ENSANGP00000015770 [Anopheles gambiae]
  misc_feature (1)..(169): Homolog of NCBI NO: 17136866 NR Description: ADP ribosylation factor 79F CG8385-PB
  misc_feature (1)..(171): Homolog of NCBI NO: 32401087 NR Description: ADP-ribosylation factor 1 [Aiptasia pulchella]
  misc_feature (1)..(169): Homolog of NCBI NO: 39584902 NR Description: Hypothetical protein CBG09004 [Caenorhabditis
  misc_feature (1)..(169): Homolog of NCBI NO: 31240205 NR Description: ENSANGP00000015770 [Anopheles gambiae]
  misc_feature (1)..(171): Homolog of NCBI NO: 32401087 NR Description: ADP-ribosylation factor 1 [Aiptasia pulchella]
  misc_feature (1)..(182): Homolog of NCBI NO: 15237901 NR Description: ADP-ribosylation factor -like protein
  misc_feature (1)..(182): Homolog of NCBI NO: 15228464 NR Description: putative ADP-ribosylation factor
  misc_feature (1)..(181): Homolog of NCBI NO: 37537196 NR Description: putative ADP-ribosylation factor
  misc_feature (1)..(178): Homolog of NCBI NO: 34897926 NR Description: Similar to Drosophila melanogaster
  misc_feature (1)..(169): Homolog of NCBI NO: 3182915 NR Description: ADP-RIBOSYLATION FACTOR
  misc_feature (1)..(169): Homolog of NCBI NO: 17136866 NR Description: ADP ribosylation factor 79F CG8385-PB
  misc_feature (1)..(169): Homolog of NCBI NO: 17551730 NR Description: ADP-Ribosylation Factor related ARF-1 (20.5 kD)
  misc_feature (1)..(169): Homolog of NCBI NO: 3182915 NR Description: ADP-RIBOSYLATION FACTOR
  misc_feature (1)..(178): Homolog of NCBI NO: 34897926 NR Description: Similar to Drosophila melanogaster
  misc_feature (1)..(181): Homolog of NCBI NO: 37537196 NR Description: putative ADP-ribosylation factor
  misc_feature (1)..(182): Homolog of NCBI NO: 15228464 NR Description: putative ADP-ribosylation factor
  misc_feature (1)..(182): Homolog of NCBI NO: 15237901 NR Description: ADP-ribosylation factor -like protein
  misc_feature (69)..(69): Xaa is any aa, unknown or other
  misc_feature (72)..(72): Xaa is any aa, unknown or other

SEQ ID NO: 37601 - protein, 178 aa, Arabidopsis thaliana; identical to SEQ ID NO: 36248
  peptide (1)..(178): Ceres Seq. ID no. 12321928
  misc_feature (1)..(163): Pfam Name: ADP-ribosylation factor family Pfam Description: ADP-ribosylation factor family
  misc_feature (1)..(163): Pfam Name: ADP-ribosylation factor family Pfam Description: ADP-ribosylation factor family
  misc_feature (1)..(165): Homolog of NCBI NO: 39584902 NR Description: Hypothetical protein CBG09004 [Caenorhabditis
  misc_feature (1)..(165): Homolog of NCBI NO: 17551730 NR Description: ADP-Ribosylation Factor related ARF-1 (20.5 kD)
  misc_feature (1)..(165): Homolog of NCBI NO: 31240205 NR Description: ENSANGP00000015770 [Anopheles gambiae]
  misc_feature (1)..(165): Homolog of NCBI NO: 17136866 NR Description: ADP ribosylation factor 79F CG8385-PB
  misc_feature (1)..(167): Homolog of NCBI NO: 32401087 NR Description: ADP-ribosylation factor 1 [Aiptasia pulchella]
  misc_feature (1)..(165): Homolog of NCBI NO: 39584902 NR Description: Hypothetical protein CBG09004 [Caenorhabditis
  misc_feature (1)..(165): Homolog of NCBI NO: 31240205 NR Description: ENSANGP00000015770 [Anopheles gambiae]
  misc_feature (1)..(167): Homolog of NCBI NO: 32401087 NR Description: ADP-ribosylation factor 1 [Aiptasia pulchella]
  misc_feature (1)..(178): Homolog of NCBI NO: 15237901 NR Description: ADP-ribosylation factor -like protein
  misc_feature (1)..(178): Homolog of NCBI NO: 15228464 NR Description: putative ADP-ribosylation factor
  misc_feature (1)..(177): Homolog of NCBI NO: 37537196 NR Description: putative ADP-ribosylation factor
  misc_feature (1)..(174): Homolog of NCBI NO: 34897926 NR Description: Similar to Drosophila melanogaster
  misc_feature (1)..(165): Homolog of NCBI NO: 3182915 NR Description: ADP-RIBOSYLATION FACTOR
  misc_feature (1)..(165): Homolog of NCBI NO: 17136866 NR Description: ADP ribosylation factor 79F CG8385-PB
  misc_feature (1)..(165): Homolog of NCBI NO: 17551730 NR Description: ADP-Ribosylation Factor related ARF-1 (20.5 kD)
  misc_feature (1)..(165): Homolog of NCBI NO: 3182915 NR Description: ADP-RIBOSYLATION FACTOR
  misc_feature (1)..(174): Homolog of NCBI NO: 34897926 NR Description: Similar to Drosophila melanogaster
  misc_feature (1)..(177): Homolog of NCBI NO: 37537196 NR Description: putative ADP-ribosylation factor
  misc_feature (1)..(178): Homolog of NCBI NO: 15228464 NR Description: putative ADP-ribosylation factor
  misc_feature (1)..(178): Homolog of NCBI NO: 15237901 NR Description: ADP-ribosylation factor -like protein
  misc_feature (65)..(65): Xaa is any aa, unknown or other
  misc_feature (68)..(68): Xaa is any aa, unknown or other

SEQ ID NO: 37602 - DNA, 692 bp, Arabidopsis thaliana
  misc_feature (1)..(692): Ceres Seq. ID no. 12331275
  misc_feature: MA Experiment ID: 108576 Result: Up-regulated in Transcription
  misc_feature: MA Experiment 108576 PARAMETER Experiment Name: At_42deg_Heat_cDNA_P Parameter: Temperature (deg C) Value: 42 vs. 22
  misc_feature: MA Experiment 108576 PARAMETER Experiment Name: At_42deg_Heat_cDNA_P Parameter: Timepoint (hr) Value: 1
  misc_feature: MA Experiment 108576 PARAMETER Experiment Name: At_42deg_Heat_cDNA_P Parameter: Tissue Value: Aerial
  misc_feature: MA Experiment ID: 20000069 Result: Up-regulated in Transcription
  misc_feature: MA Experiment 20000069 PARAMETER Experiment Name: At_100uM_ABA_Mutants_cDNA_P Parameter: Plant Line Value: CS23
  misc_feature: MA Experiment 20000069 PARAMETER Experiment Name: At_100uM_ABA_Mutants_cDNA_P Parameter: Timepoint (hr) Value: 6
  misc_feature: MA Experiment 20000069 PARAMETER Experiment Name: At_100uM_ABA_Mutants_cDNA_P Parameter: Tissue Value: Aerial
  misc_feature: MA Experiment 20000069 PARAMETER Experiment Name: At_100uM_ABA_Mutants_cDNA_P Parameter: Treatment Value: 100uM ABA vs. No Treatment
  misc_feature: MA Experiment ID: 20000072 Result: Up-regulated in Transcription
  misc_feature: MA Experiment 20000072 PARAMETER Experiment Name: At_100uM_ABA_Mutants_cDNA_P Parameter: Plant Line Value: CS8105
  misc_feature: MA Experiment 20000072 PARAMETER Experiment Name: At_100uM_ABA_Mutants_cDNA_P Parameter: Timepoint (hr) Value: 6
  misc_feature: MA Experiment 20000072 PARAMETER Experiment Name: At_100uM_ABA_Mutants_cDNA_P Parameter: Tissue Value: Aerial
  misc_feature: MA Experiment 20000072 PARAMETER Experiment Name: At_100uM_ABA_Mutants_cDNA_P Parameter: Treatment Value: 100uM ABA vs. No Treatment
  misc_feature: MA Experiment ID: 20000088 Result: Up-regulated in Transcription
  misc_feature: MA Experiment 20000088 PARAMETER Experiment Name: At_100uM_ABA_Mutants_cDNA_P Parameter: Plant Line Value: Landsberg
  misc_feature: MA Experiment 20000088 PARAMETER Experiment Name: At_100uM_ABA_Mutants_cDNA_P Parameter: Timepoint (hr) Value: 6
  misc_feature: MA Experiment 20000088 PARAMETER Experiment Name: At_100uM_ABA_Mutants_cDNA_P Parameter: Tissue Value: Aerial
  misc_feature: MA Experiment 20000088 PARAMETER Experiment Name: At_100uM_ABA_Mutants_cDNA_P Parameter: Treatment Value: 100uM ABA vs. No Treatment
  misc_feature: MA Experiment ID: 20000173 Result: Up-regulated in Transcription
  misc_feature: MA Experiment 20000173 PARAMETER Experiment Name: At_42deg_Heat_P Parameter: Age (day) Value: 14
  misc_feature: MA Experiment 20000173 PARAMETER Experiment Name: At_42deg_Heat_P Parameter: Organism Value: A. thaliana
  misc_feature: MA Experiment 20000173 PARAMETER Experiment Name: At_42deg_Heat_P Parameter: Plant Line Value: WS
  misc_feature: MA Experiment 20000173 PARAMETER Experiment Name: At_42deg_Heat_P Parameter: Temperature (deg C) Value: 42 vs. 22
  misc_feature: MA Experiment 20000173 PARAMETER Experiment Name: At_42deg_Heat_P Parameter: Timepoint (hr) Value: 6
  misc_feature: MA Experiment 20000173 PARAMETER Experiment Name: At_42deg_Heat_P Parameter: Tissue Value: Aerial
  misc_feature: MA Experiment ID: 20000180 Result: Down-regulated in Transcription
  misc_feature: MA Experiment 20000180 PARAMETER Experiment Name: At_Germinating_Seeds_P Parameter: Age (hr) Value: 24 vs. 0
  misc_feature: MA Experiment 20000180 PARAMETER Experiment Name: At_Germinating_Seeds_P Parameter: Tissue Value: Germinating Seeds
  misc_feature: MA Experiment ID: 20000184 Result: Down-regulated in Transcription
  misc_feature: MA Experiment 20000184 PARAMETER Experiment Name: At_Shoots__P Parameter: Age (day) Value: 7
  misc_feature: MA Experiment 20000184 PARAMETER Experiment Name: At_Shoots__P Parameter: Tissue Value: Shoots vs. Whole Plant
  misc_feature: MA Experiment ID: 20000794 Result: Up-regulated in Transcription
  misc_feature: MA Experiment 20000794 PARAMETER Experiment Name: At_Petals_P Parameter: Age (day) Value: 23-25 days
  misc_feature: MA Experiment 20000794 PARAMETER Experiment Name: At_Petals_P Parameter: Plant Line Value: WS
  misc_feature: MA Experiment 20000794 PARAMETER Experiment Name: At_Petals_P Parameter: Tissue Value: Petals vs. Whole plant
aacttgtcacctgcagagaaagaaagaagccctagattttgtcaaaaggcggttgcagaacaaaaaaccatggccggaattggaccgataactcaggattgggagccggtggtgatccgtaagaaacccgctaacgccgctgccaagcgcgacgagaaaactgtcaacgccgctcgtcgatccggcgccgatatcgagaccgtcagaaaattcaatgctggaaccaacaaggcggcatcaagcggcacatctctgaacacaaaaatgcttgatgatgacactgagaaccttactcatgaacgtgtgcctactgagctaaagaaagccattatgcaagccaggacagacaagaagctaacccagtcccaacttgctcaaatcatcaatgagaagccacaagtgattcaagagtatgagtctggcaaagctatacccaaccagcaaatcctttctaagctggagagagcgcttggagctaagcttcgtggaaagaagtgagccaagttctactgatgtagcaagtaacaagaatcaatgctttcgtctaatgccgtaactttgccaagaagaatattttctgattgtaagaaagcaaaaccgtttgaatgtttgtttcgttgatggaatctctatctcataaactcatatcaatataataacttgggtcttttcatcacatagttgaactgctt

SEQ ID NO: 37603 - protein, 165 aa, Arabidopsis thaliana
  peptide (1)..(165): Ceres Seq. ID no. 12331276
  misc_feature (110)..(164): Pfam Name: Helix-turn-helix Pfam Description: Helix-turn-helix
  misc_feature (24)..(164): Homolog of NCBI NO: 5669634 NR Description: ethylene-responsive transcriptional coactivator
  misc_feature (28)..(164): Homolog of NCBI NO: 19225065 NR Description: ethylene-responsive transciptional
  misc_feature (30)..(164): Homolog of NCBI NO: 21553721 NR Description: ethylene-responsive transcriptional coactivator,
  misc_feature (28)..(164): Homolog of NCBI NO: 15230125 NR Description: ethylene-responsive transcriptional coactivator,
  misc_feature (28)..(165): Homolog of NCBI NO: 20086364 NR Description: putative multiprotein bridging factor 1
  misc_feature (30)..(165): Homolog of NCBI NO: 8895787 NR Description: multiprotein bridging factor 1 [Solanum tuberosum]
  misc_feature (24)..(165): Homolog of NCBI NO: 38637102 NR Description: putative ethylene-responsive transcriptional
  misc_feature (24)..(165): Homolog of NCBI NO: 7488897 NR Description: hypothetical protein - castor bean
  misc_feature (24)..(165): Homolog of NCBI NO: 15231105 NR Description: transcriptional coactivator - like protein
  misc_feature (24)..(165): Homolog of NCBI NO: 18406032 NR Description: expressed protein
NLSPAEKERSPRFCQKAVAEQKTMAGIGPITQDWEPVVIRKKPANAAAKRDEKTVNAARRSGADIETVRKFNAGTNKAASSGTSLNTKMLDDDTENLTHERVPTELKKAIMQARTDKKLTQSQLAQIINEKPQVIQEYESGKAIPNQQILSKLERALGAKLRGKK

SEQ ID NO: 37604 - protein, 142 aa, Arabidopsis thaliana
  peptide (1)..(142): Ceres Seq. ID no. 12331277
  misc_feature (87)..(141): Pfam Name: Helix-turn-helix Pfam Description: Helix-turn-helix
  misc_feature (1)..(141): Homolog of NCBI NO: 5669634 NR Description: ethylene-responsive transcriptional coactivator
  misc_feature (5)..(141): Homolog of NCBI NO: 19225065 NR Description: ethylene-responsive transciptional
  misc_feature (7)..(141): Homolog of NCBI NO: 21553721 NR Description: ethylene-responsive transcriptional coactivator,
  misc_feature (5)..(141): Homolog of NCBI NO: 15230125 NR Description: ethylene-responsive transcriptional coactivator,
  misc_feature (5)..(142): Homolog of NCBI NO: 20086364 NR Description: putative multiprotein bridging factor 1
  misc_feature (7)..(142): Homolog of NCBI NO: 8895787 NR Description: multiprotein bridging factor 1 [Solanum tuberosum]
  misc_feature (1)..(142): Homolog of NCBI NO: 38637102 NR Description: putative ethylene-responsive transcriptional
  misc_feature (1)..(142): Homolog of NCBI NO: 7488897 NR Description: hypothetical protein - castor bean
  misc_feature (1)..(142): Homolog of NCBI NO: 15231105 NR Description: transcriptional coactivator - like protein
  misc_feature (1)..(142): Homolog of NCBI NO: 18406032 NR Description: expressed protein
MAGIGPITQDWEPVVIRKKPANAAAKRDEKTVNAARRSGADIETVRKFNAGTNKAASSGTSLNTKMLDDDTENLTHERVPTELKKAIMQARTDKKLTQSQLAQIINEKPQVIQEYESGKAIPNQQILSKLERALGAKLRGKK

SEQ ID NO: 37605 - DNA, 2181 bp, Arabidopsis thaliana
  misc_feature (1)..(2181): Ceres Seq. ID no. 13646180
  misc_feature: MA Experiment ID: 108561 Result: Up-regulated in Transcription
  misc_feature: MA Experiment 108561 PARAMETER Experiment Name: At_100uM_ABA_cDNA_P Parameter: Timepoint (hr) Value: 6
  misc_feature: MA Experiment 108561 PARAMETER Experiment Name: At_100uM_ABA_cDNA_P Parameter: Tissue Value: Aerial
  misc_feature: MA Experiment 108561 PARAMETER Experiment Name: At_100uM_ABA_cDNA_P Parameter: Treatment Value: 100uM ABA vs. No Treatment
  misc_feature: MA Experiment ID: 108572 Result: Up-regulated in Transcription
  misc_feature: MA Experiment 108572 PARAMETER Experiment Name: At_Drought_cDNA_P Parameter: Timepoint (hr) Value: 1
  misc_feature: MA Experiment 108572 PARAMETER Experiment Name: At_Drought_cDNA_P Parameter: Tissue Value: Aerial
  misc_feature: MA Experiment 108572 PARAMETER Experiment Name: At_Drought_cDNA_P Parameter: Treatment Value: Drought vs. No Drought
  misc_feature: MA Experiment ID: 20000169 Result: Up-regulated in Transcription
  misc_feature: MA Experiment 20000169 PARAMETER Experiment Name: At_100uM_ABA_P Parameter: Age (day) Value: 14
  misc_feature: MA Experiment 20000169 PARAMETER Experiment Name: At_100uM_ABA_P Parameter: Organism Value: A. thaliana
  misc_feature: MA Experiment 20000169 PARAMETER Experiment Name: At_100uM_ABA_P Parameter: Plant Line Value: WS
  misc_feature: MA Experiment 20000169 PARAMETER Experiment Name: At_100uM_ABA_P Parameter: Timepoint (hr) Value: 6
  misc_feature: MA Experiment 20000169 PARAMETER Experiment Name: At_100uM_ABA_P Parameter: Tissue Value: Aerial
  misc_feature: MA Experiment 20000169 PARAMETER Experiment Name: At_100uM_ABA_P Parameter: Treatment Value: 100uM ABA vs. No Treatment
  misc_feature: MA Experiment ID: 20000180 Result: Up-regulated in Transcription
  misc_feature: MA Experiment 20000180 PARAMETER Experiment Name: At_Germinating_Seeds_P Parameter: Age (hr) Value: 24 vs. 0
  misc_feature: MA Experiment 20000180 PARAMETER Experiment Name: At_Germinating_Seeds_P Parameter: Tissue Value: Germinating Seeds
  misc_feature: MA Experiment ID: 20000185 Result: Down-regulated in Transcription
  misc_feature: MA Experiment 20000185 PARAMETER Experiment Name: At_Roots__P Parameter: Age (day) Value: 7 vs. 21
  misc_feature: MA Experiment 20000185 PARAMETER Experiment Name: At_Roots__P Parameter: Organism Value: A. thaliana
  misc_feature: MA Experiment 20000185 PARAMETER Experiment Name: At_Roots__P Parameter: Tissue Value: Roots vs. Whole Plant
  misc_feature: MA Experiment ID: 20000439 Result: Down-regulated in Transcription
  misc_feature: MA Experiment 20000439 PARAMETER Experiment Name: At_Roots__P Parameter: Age (day) Value: 14 vs. 21
  misc_feature: MA Experiment 20000439 PARAMETER Experiment Name: At_Roots__P Parameter: Organism Value: A. thaliana
  misc_feature: MA Experiment 20000439 PARAMETER Experiment Name: At_Roots__P Parameter: Tissue Value: Roots vs. Whole Plant
  misc_feature: MA Experiment ID: 20000794 Result: Up-regulated in Transcription
  misc_feature: MA Experiment 20000794 PARAMETER Experiment Name: At_Petals_P Parameter: Age (day) Value: 23-25 days
  misc_feature: MA Experiment 20000794 PARAMETER Experiment Name: At_Petals_P Parameter: Plant Line Value: WS
  misc_feature: MA Experiment 20000794 PARAMETER Experiment Name: At_Petals_P Parameter: Tissue Value: Petals vs. Whole plant
  misc_feature: MA Experiment ID: 20001554 Result: Up-regulated in Transcription
  misc_feature: MA Experiment 20001554 PARAMETER Experiment Name: At_Drought_Soil_Dry_P Parameter: Age (day) Value: 21
  misc_feature: MA Experiment 20001554 PARAMETER Experiment Name: At_Drought_Soil_Dry_P Parameter: Organism Value: A. thaliana
  misc_feature: MA Experiment 20001554 PARAMETER Experiment Name: At_Drought_Soil_Dry_P Parameter: Plant Line Value: WS
  misc_feature: MA Experiment 20001554 PARAMETER Experiment Name: At_Drought_Soil_Dry_P Parameter: Post Timepoint (hr) Value: None
  misc_feature: MA Experiment 20001554 PARAMETER Experiment Name: At_Drought_Soil_Dry_P Parameter: Post-Treatment Value: None
  misc_feature: MA Experiment 20001554 PARAMETER Experiment Name: At_Drought_Soil_Dry_P Parameter: Timepoint (day) Value: 7
  misc_feature: MA Experiment 20001554 PARAMETER Experiment Name: At_Drought_Soil_Dry_P Parameter: Treatment Value: Drought vs. No Drought
aaataccctaatcacattttgtaacaataatacaattatacattaaaactctccgacgatgcctcaggcaccgatgccagagttctctagctcggtgaagctcaagtacgtgaaacttggttaccaatatttggttaaccatttcttgagttttcttttgatcccgatcatggctattgtcgccgttgagcttcttcggatgggtcctgaagagatccttaatgtttggaattcactccagtttgacctagttcaggttctatgttcttccttctttgtcatcttcatctccactgtttacttcatgtccaagccacgcaccatctacctcgttgactattcttgttacaagccacctgtcacgtgtcgtgtccccttcgcaactttcatggaacactctcgtttgatcctcaaggacaagcctaagagcgtcgagttccaaatgagaatccttgaacgttctggcctcggtgaggagacttgtctccctccggctattcattatattcctcccacaccaaccatggacgcggctagaagcgaggctcagatggttatcttcgaggccatggacgatcttttcaagaaaaccggtcttaaacctaaagacgtcgacatccttatcgtcaactgctctcttttctctcccacaccatcgctctcagctatggtcatcaacaaatataagcttaggagtaatatcaagagcttcaatctttcggggatgggctgcagcgcgggcctgatctcagttgatctagcccgcgacttgctccaagttcatcccaattcaaatgcaatcatcgtcagcacggagatcataacgcctaattactatcaaggcaacgagagagccatgttgttacccaattgtctcttccgcatgggtgcggcagccatacacatgtcaaaccgccggtctgaccggtggcgagccaaatacaagctttcccacctcgtccggacacaccgtggcgctgacgacaagtctttctactgtgtctacgaacaggaagacaaagaaggacacgttggcatcaacttgtccaaagatctcatggccatcgccggtgaagccctcaaggcaaacatcaccacaataggtcctttggtcctaccggcgtcagaacaacttctcttcctcacgtccctaatcggacgtaaaatcttcaacccgaaatggaaaccatacataccggatttcaagctggccttcgaacacttttgcattcacgcaggaggcagagcggtgatcgacgagctccaaaagaatctacaactatcaggagaacacgttgaggcctcaagaatgacactacatcgttttggtaacacgtcatcttcatcgttatggtacgagcttagctacatcgagtctaaagggagaatgaggagaggcgatcgcgtttggcaaatcgcgtttgggagtggtttcaagtgtaactctgccgtgtggaaatgtaaccgtacgattaagacacctaaggacggaccatggtccgattgtatcgaccgttaccctgtctttattcccgaagttgtcaaactctaaactgaaaacgtctttgaacggtttagtaacggtttgattttgtgttacggtttaggtttatttggtctcgggatttggtttaaaggggattgagaaatgggaagttagagagaagaaaaagcaaagcataaatgtttgtatttaattgctctgcatatacttaaatctctgcttttcatttggggtattttttagtttctcgtgctgtaattaataacttgtggtgtactcaaataagaatatttctctctgttttattatttttaaattggagaataaacttctttgtttccaaaaaaaaaaaaaaaaaacgatgacaagaccaacgtcaaggccgcctggggtaaggtcggcgcgcacgctggcgagtatggtgcggaggccctggagaggatgttcctgtccttccccaccaccaagacctacttcccgcacttcgacctgagccacggctctgcccaggttaagggccacggcaagaaggtggccgacgcgctgaccaacgccgtggcgcacgtggacgacatgcccaacgcgctgtccgccctgagcgacctgcacgcgcacaagcttcgggtggacccggtcaacttcaagctcctaagccactgcctgctggtgagcccatc

SEQ ID NO: 37606 - protein, 497 aa, Arabidopsis thaliana; identical to SEQ ID NO: 23374
  peptide (1)..(497): Ceres Seq. ID no. 13646181
  misc_feature (330)..(470): Pfam Name: Chalcone and stilbene synthases, C-terminal domain Pfam Description: Chalcone and stilbene synthases, C-terminal
  misc_feature (330)..(470): Pfam Name: Chalcone and stilbene synthases, C-terminal domain Pfam Description: Chalcone and stilbene synthases, C-terminal
  misc_feature (330)..(470): Pfam Name: Chalcone and stilbene synthases, C-terminal domain Pfam Description: Chalcone and stilbene synthases, C-terminal
  misc_feature (6)..(492): Homolog of NCBI NO: 29417540 NR Description: beta-ketoacyl-CoA-synthase [Marchantia polymorpha]
  misc_feature (6)..(489): Homolog of NCBI NO: 15223556 NR Description: very-long-chain fatty acid condensing enzyme
  misc_feature (6)..(489): Homolog of NCBI NO: 15226724 NR Description: very-long-chain fatty acid condensing enzyme
  misc_feature (1)..(349): Homolog of NCBI NO: 30697701 NR Description: very-long-chain fatty acid condensing enzyme
  misc_feature (6)..(497): Homolog of NCBI NO: 28393607 NR Description: putative fatty acid condensing enzyme CUT1
  misc_feature (6)..(492): Homolog of NCBI NO: 29417540 NR Description: beta-ketoacyl-CoA-synthase [Marchantia polymorpha]
  misc_feature (6)..(489): Homolog of NCBI NO: 15226724 NR Description: very-long-chain fatty acid condensing enzyme
  misc_feature (6)..(497): Homolog of NCBI NO: 28393607 NR Description: putative fatty acid condensing enzyme CUT1
  misc_feature (1)..(349): Homolog of NCBI NO: 30697701 NR Description: very-long-chain fatty acid condensing enzyme
  misc_feature (6)..(489): Homolog of NCBI NO: 15226724 NR Description: very-long-chain fatty acid condensing enzyme
  misc_feature (6)..(489): Homolog of NCBI NO: 15223556 NR Description: very-long-chain fatty acid condensing enzyme
  misc_feature (6)..(492): Homolog of NCBI NO: 29417540 NR Description: beta-ketoacyl-CoA-synthase [Marchantia polymorpha]
  misc_feature (1)..(497): Homolog of NCBI NO: 15221431 NR Description: very-long-chain fatty acid condensing enzyme
  misc_feature (1)..(497): Homolog of NCBI NO: 17979464 NR Description: At1g68530/T26J14_10 [Arabidopsis thaliana]
  misc_feature (6)..(497): Homolog of NCBI NO: 21593111 NR Description: very-long-chain fatty acid condensing enzyme CUT1
  misc_feature (6)..(497): Homolog of NCBI NO: 15222592 NR Description: very-long-chain fatty acid condensing enzyme
  misc_feature (6)..(497): Homolog of NCBI NO: 21618184 NR Description: fatty acid condensing enzyme CUT1, putative
  misc_feature (1)..(497): Homolog of NCBI NO: 15221431 NR Description: very-long-chain fatty acid condensing enzyme
  misc_feature (1)..(497): Homolog of NCBI NO: 17979464 NR Description: At1g68530/T26J14_10 [Arabidopsis thaliana]
  misc_feature (6)..(497): Homolog of NCBI NO: 21593111 NR Description: very-long-chain fatty acid condensing enzyme CUT1
  misc_feature (6)..(497): Homolog of NCBI NO: 15222592 NR Description: very-long-chain fatty acid condensing enzyme
  misc_feature (6)..(497): Homolog of NCBI NO: 21618184 NR Description: fatty acid condensing enzyme CUT1, putative
  misc_feature (6)..(497): Homolog of NCBI NO: 28393607 NR Description: putative fatty acid condensing enzyme CUT1
  misc_feature (1)..(349): Homolog of NCBI NO: 30697701 NR Description: very-long-chain fatty acid condensing enzyme
  misc_feature (6)..(489): Homolog of NCBI NO: 15223556 NR Description: very-long-chain fatty acid condensing enzyme
  misc_feature (6)..(497): Homolog of NCBI NO: 21618184 NR Description: fatty acid condensing enzyme CUT1, putative
  misc_feature (6)..(497): Homolog of NCBI NO: 15222592 NR Description: very-long-chain fatty acid condensing enzyme
  misc_feature (6)..(497): Homolog of NCBI NO: 21593111 NR Description: very-long-chain fatty acid condensing enzyme CUT1
  misc_feature (1)..(497): Homolog of NCBI NO: 17979464 NR Description: At1g68530/T26J14_10 [Arabidopsis thaliana]
  misc_feature (1)..(497): Homolog of NCBI NO: 15221431 NR Description: very-long-chain fatty acid condensing enzyme

SEQ ID NO: 37607 - protein, 492 aa, Arabidopsis thaliana; identical to SEQ ID NO: 23375
  peptide (1)..(492): Ceres Seq. ID no. 13646182
  misc_feature (325)..(465): Pfam Name: Chalcone and stilbene synthases, C-terminal domain Pfam Description: Chalcone and stilbene synthases, C-terminal
  misc_feature (325)..(465): Pfam Name: Chalcone and stilbene synthases, C-terminal domain Pfam Description: Chalcone and stilbene synthases, C-terminal
  misc_feature (325)..(465): Pfam Name: Chalcone and stilbene synthases, C-terminal domain Pfam Description: Chalcone and stilbene synthases, C-terminal
  misc_feature (1)..(487): Homolog of NCBI NO: 29417540 NR Description: beta-ketoacyl-CoA-synthase [Marchantia polymorpha]
  misc_feature (1)..(484): Homolog of NCBI NO: 15223556 NR Description: very-long-chain fatty acid condensing enzyme
  misc_feature (1)..(484): Homolog of NCBI NO: 15226724 NR Description: very-long-chain fatty acid condensing enzyme
  misc_feature (1)..(344): Homolog of NCBI NO: 30697701 NR Description: very-long-chain fatty acid condensing enzyme
  misc_feature (1)..(492): Homolog of NCBI NO: 28393607 NR Description: putative fatty acid condensing enzyme CUT1
  misc_feature (1)..(487): Homolog of NCBI NO: 29417540 NR Description: beta-ketoacyl-CoA-synthase [Marchantia polymorpha]
  misc_feature (1)..(484): Homolog of NCBI NO: 15226724 NR Description: very-long-chain fatty acid condensing enzyme
  misc_feature (1)..(492): Homolog of NCBI NO: 28393607 NR Description: putative fatty acid condensing enzyme CUT1
  misc_feature (1)..(344): Homolog of NCBI NO: 30697701 NR Description: very-long-chain fatty acid condensing enzyme
  misc_feature (1)..(484): Homolog of NCBI NO: 15226724 NR Description: very-long-chain fatty acid condensing enzyme
  misc_feature (1)..(484): Homolog of NCBI NO: 15223556 NR Description: very-long-chain fatty acid condensing enzyme
  misc_feature (1)..(487): Homolog of NCBI NO: 29417540 NR Description: beta-ketoacyl-CoA-synthase [Marchantia polymorpha]
  misc_feature (1)..(492): Homolog of NCBI NO: 15221431 NR Description: very-long-chain fatty acid condensing enzyme
  misc_feature (1)..(492): Homolog of NCBI NO: 17979464 NR Description: At1g68530/T26J14_10 [Arabidopsis thaliana]
  misc_feature (1)..(492): Homolog of NCBI NO: 21593111 NR Description: very-long-chain fatty acid condensing enzyme CUT1
  misc_feature (1)..(492): Homolog of NCBI NO: 15222592 NR Description: very-long-chain fatty acid condensing enzyme
  misc_feature (1)..(492): Homolog of NCBI NO: 21618184 NR Description: fatty acid condensing enzyme CUT1, putative
  misc_feature (1)..(492): Homolog of NCBI NO: 15221431 NR Description: very-long-chain fatty acid condensing enzyme
  misc_feature (1)..(492): Homolog of NCBI NO: 17979464 NR Description: At1g68530/T26J14_10 [Arabidopsis thaliana]
  misc_feature (1)..(492): Homolog of NCBI NO: 21593111 NR Description: very-long-chain fatty acid condensing enzyme CUT1
  misc_feature (1)..(492): Homolog of NCBI NO: 15222592 NR Description: very-long-chain fatty acid condensing enzyme
  misc_feature (1)..(492): Homolog of NCBI NO: 21618184 NR Description: fatty acid condensing enzyme CUT1, putative
  misc_feature (1)..(492): Homolog of NCBI NO: 28393607 NR Description: putative fatty acid condensing enzyme CUT1
  misc_feature (1)..(344): Homolog of NCBI NO: 30697701 NR Description: very-long-chain fatty acid condensing enzyme
  misc_feature (1)..(484): Homolog of NCBI NO: 15223556 NR Description: very-long-chain fatty acid condensing enzyme
  misc_feature (1)..(492): Homolog of NCBI NO: 21618184 NR Description: fatty acid condensing enzyme CUT1, putative
  misc_feature (1)..(492): Homolog of NCBI NO: 15222592 NR Description: very-long-chain fatty acid condensing enzyme
  misc_feature (1)..(492): Homolog of NCBI NO: 21593111 NR Description: very-long-chain fatty acid condensing enzyme CUT1
  misc_feature (1)..(492): Homolog of NCBI NO: 17979464 NR Description: At1g68530/T26J14_10 [Arabidopsis thaliana]
  misc_feature (1)..(492): Homolog of NCBI NO: 15221431 NR Description: very-long-chain fatty acid condensing enzyme

SEQ ID NO: 37608 - protein, 460 aa, Arabidopsis thaliana; identical to SEQ ID NO: 23376
  peptide (1)..(460): Ceres Seq. ID no. 13646183
  misc_feature (293)..(433): Pfam Name: Chalcone and stilbene synthases, C-terminal domain Pfam Description: Chalcone and stilbene synthases, C-terminal
  misc_feature (293)..(433): Pfam Name: Chalcone and stilbene synthases, C-terminal domain Pfam Description: Chalcone and stilbene synthases, C-terminal
  misc_feature (293)..(433): Pfam Name: Chalcone and stilbene synthases, C-terminal domain Pfam Description: Chalcone and stilbene synthases, C-terminal
  misc_feature (1)..(455): Homolog of NCBI NO: 29417540 NR Description: beta-ketoacyl-CoA-synthase [Marchantia polymorpha]
  misc_feature (1)..(452): Homolog of NCBI NO: 15223556 NR Description: very-long-chain fatty acid condensing enzyme
  misc_feature (1)..(452): Homolog of NCBI NO: 15226724 NR Description: very-long-chain fatty acid condensing enzyme
  misc_feature (1)..(312): Homolog of NCBI NO: 30697701 NR Description: very-long-chain fatty acid condensing enzyme
  misc_feature (1)..(460): Homolog of NCBI NO: 28393607 NR Description: putative fatty acid condensing enzyme CUT1
  misc_feature (1)..(455): Homolog of NCBI NO: 29417540 NR Description: beta-ketoacyl-CoA-synthase [Marchantia polymorpha]
  misc_feature (1)..(452): Homolog of NCBI NO: 15226724 NR Description: very-long-chain fatty acid condensing enzyme
  misc_feature (1)..(460): Homolog of NCBI NO: 28393607 NR Description: putative fatty acid condensing enzyme CUT1
  misc_feature (1)..(312): Homolog of NCBI NO: 30697701 NR Description: very-long-chain fatty acid condensing enzyme
  misc_feature (1)..(452): Homolog of NCBI NO: 15226724 NR Description: very-long-chain fatty acid condensing enzyme
  misc_feature (1)..(452): Homolog of NCBI NO: 15223556 NR Description: very-long-chain fatty acid condensing enzyme
  misc_feature (1)..(455): Homolog of NCBI NO: 29417540 NR Description: beta-ketoacyl-CoA-synthase [Marchantia polymorpha]
  misc_feature (1)..(460): Homolog of NCBI NO: 15221431 NR Description: very-long-chain fatty acid condensing enzyme
  misc_feature (1)..(460): Homolog of NCBI NO: 17979464 NR Description: At1g68530/T26J14_10 [Arabidopsis thaliana]
  misc_feature (1)..(460): Homolog of NCBI NO: 21593111 NR Description: very-long-chain fatty acid condensing enzyme CUT1
  misc_feature (1)..(460): Homolog of NCBI NO: 15222592 NR Description: very-long-chain fatty acid condensing enzyme
  misc_feature (1)..(460): Homolog of NCBI NO: 21618184 NR Description: fatty acid condensing enzyme CUT1, putative
  misc_feature (1)..(460): Homolog of NCBI NO: 15221431 NR Description: very-long-chain fatty acid condensing enzyme
  misc_feature (1)..(460): Homolog of NCBI NO: 17979464 NR Description: At1g68530/T26J14_10 [Arabidopsis thaliana]
  misc_feature (1)..(460): Homolog of NCBI NO: 21593111 NR Description: very-long-chain fatty acid condensing enzyme CUT1
  misc_feature (1)..(460): Homolog of NCBI NO: 15222592 NR Description: very-long-chain fatty acid condensing enzyme
  misc_feature (1)..(460): Homolog of NCBI NO: 21618184 NR Description: fatty acid condensing enzyme CUT1, putative
  misc_feature (1)..(460): Homolog of NCBI NO: 28393607 NR Description: putative fatty acid condensing enzyme CUT1
  misc_feature (1)..(312): Homolog of NCBI NO: 30697701 NR Description: very-long-chain fatty acid condensing enzyme
  misc_feature (1)..(452): Homolog of NCBI NO: 15223556 NR Description: very-long-chain fatty acid condensing enzyme
  misc_feature (1)..(460): Homolog of NCBI NO: 21618184 NR Description: fatty acid condensing enzyme CUT1, putative
  misc_feature (1)..(460): Homolog of NCBI NO: 15222592 NR Description: very-long-chain fatty acid condensing enzyme
  misc_feature (1)..(460): Homolog of NCBI NO: 21593111 NR Description: very-long-chain fatty acid condensing enzyme CUT1
  misc_feature (1)..(460): Homolog of NCBI NO: 17979464 NR Description: At1g68530/T26J14_10 [Arabidopsis thaliana]
  misc_feature (1)..(460): Homolog of NCBI NO: 15221431 NR Description: very-long-chain fatty acid condensing enzyme

SEQ ID NO: 37609 - DNA, 1338 bp, Arabidopsis thaliana
  misc_feature (1)..(1338): Ceres Seq. ID no. 13496332
  misc_feature: MA Experiment ID: 108577 Result: Down-regulated in Transcription
  misc_feature: MA Experiment 108577 PARAMETER Experiment Name: At_42deg_Heat_cDNA_P Parameter: Temperature (deg C) Value: 42 vs. 22
  misc_feature: MA Experiment 108577 PARAMETER Experiment Name: At_42deg_Heat_cDNA_P Parameter: Timepoint (hr) Value: 6
  misc_feature: MA Experiment 108577 PARAMETER Experiment Name: At_42deg_Heat_cDNA_P Parameter: Tissue Value: Aerial
  misc_feature: MA Experiment ID: 20000184 Result: Down-regulated in Transcription
  misc_feature: MA Experiment 20000184 PARAMETER Experiment Name: At_Shoots__P Parameter: Age (day) Value: 7
  misc_feature: MA Experiment 20000184 PARAMETER Experiment Name: At_Shoots__P Parameter: Tissue Value: Shoots vs. Whole Plant
  misc_feature: MA Experiment ID: 20000496 Result: Up-regulated in Transcription
  misc_feature: MA Experiment 20000496 PARAMETER Experiment Name: At_Guard_Cells_P Parameter: Harvest Date Value: 7/19/2002
  misc_feature: MA Experiment 20000496 PARAMETER Experiment Name: At_Guard_Cells_P Parameter: Organism Value: Canola
  misc_feature: MA Experiment 20000496 PARAMETER Experiment Name: At_Guard_Cells_P Parameter: Tissue Value: Guard Cells vs. Leaves
aaaagaaaaatcgaaaaaaaaaaactctccgactcggaagaagagggagagagatgaagaagccggtcggagccgagaagaagagggttaaacgatcatcgggatctgcatctacttccgttagagattctggttctgattctcaacctaggaagcaagctgtgaagaaggatagttttcagttgtttgctgagaaagttagagaccacaagggattagaatccagatgggctgttatggagcaagcacgagttgaatactttagagggaaagattttgtgagctttatgaagaataaccctgactttaaagatattctggaagaagataaagaccttgacacagacgatattgccaatgttttgttgggaaagaaccttttggtccgctgtgatcgtgttactaaaactcttcgtcccgggaagaaaaagctctctacttggcctgctcatttggagattttccgtgacgatcaatctttctctgaaaatgatgccttttttgcatggacgttcgaaaaacggcatccgctatggcaaacgcttttgtccttcttctggcctgtattgactcttgcaatttgtttgtttcctgtgtatccacaccgttgcaaactaattgtactctactcatgtgcgggcattcttctgatgattctctccttacttttcgtgagagcagttgctttcggtgctatgtggattcttttgggaaagcgtgtctggttcttccccaacattctagctgaggaagccacattgaaggaactgttccgtttctggccaaagaaagacgaggaagaaccgcccaagtggacatctcgacttttctacacagtagtggctattgttgttgtcatgctgcttaggcgtcatgcccctgatgaagctgctcgggccaggtaccaaagaaggatgtccaacatcattgatgatgtccttgagtggtcaccaaagctagcactttctggtttgatggagaatcagcaacctgtaaacatcacagatgcggcaaacaactcctcagattcagcaggaggtcccgaccagactgaagaggtcgacctagatgaaactcaaggcgaggacctagacgaaacgcaaggcaaggaggaagctgaaggttggactgactctgatcttaaaacataaaaaaaccaaaatatagaaacgaaagttcattgtaacaataagtcaacttaagtgaccaagacgaggtgagttctttataagaaagtcttgaaagattttgtggtactccattactcctttacattttgacacaatctggaatttagctctcaatcacagttttgtattccaaacttcaattccagct

SEQ ID NO: 37610 - protein, 382 aa, Arabidopsis thaliana
  peptide (1)..(382): Ceres Seq. ID no. 13496333
  misc_feature (81)..(273): Pfam Name: Translocation protein Sec62 Pfam Description: Translocation protein Sec62
  misc_feature (84)..(364): Homolog of NCBI NO: 23509583 NR Description: translocation protein sec62, putative [Plasmodium
  misc_feature (18)..(382): Homolog of NCBI NO: 21593719 NR Description: unknown [Arabidopsis thaliana]
  misc_feature (18)..(382): Homolog of NCBI NO: 18402801 NR Description: expressed protein [Arabidopsis thaliana]
KKNRKKKTLRLGRRGREMKKPVGAEKKRVKRSSGSASTSVRDSGSDSQPRKQAVKKDSFQLFAEKVRDHKGLESRWAVMEQARVEYFRGKDFVSFMKNNPDFKDILEEDKDLDTDDIANVLLGKNLLVRCDRVTKTLRPGKKKLSTWPAHLEIFRDDQSFSENDAFFAWTFEKRHPLWQTLLSFFWPVLTLAICLFPVYPHRCKLIVLYSCAGILLMILSLLFVRAVAFGAMWILLGKRVWFFPNILAEEATLKELFRFWPKKDEEEPPKWTSRLFYTVVAIVVVMLLRRHAPDEAARARYQRRMSNIIDDVLEWSPKLALSGLMENQQPVNITDAANNSSDSAGGPDQTEEVDLDETQGEDLDETQGKEEAEGWTDSDLKT

SEQ ID NO: 37611 - protein, 365 aa, Arabidopsis thaliana
  peptide (1)..(365): Ceres Seq. ID no. 13496334
  misc_feature (64)..(256): Pfam Name: Translocation protein Sec62 Pfam Description: Translocation protein Sec62
  misc_feature (67)..(347): Homolog of NCBI NO: 23509583 NR Description: translocation protein sec62, putative [Plasmodium
  misc_feature (1)..(365): Homolog of NCBI NO: 21593719 NR Description: unknown [Arabidopsis thaliana]
  misc_feature (1)..(365): Homolog of NCBI NO: 18402801 NR Description: expressed protein [Arabidopsis thaliana]
MKKPVGAEKKRVKRSSGSASTSVRDSGSDSQPRKQAVKKDSFQLFAEKVRDHKGLESRWAVMEQARVEYFRGKDFVSFMKNNPDFKDILEEDKDLDTDDIANVLLGKNLLVRCDRVTKTLRPGKKKLSTWPAHLEIFRDDQSFSENDAFFAWTFEKRHPLWQTLLSFFWPVLTLAICLFPVYPHRCKLIVLYSCAGILLMILSLLFVRAVAFGAMWILLGKRVWFFPNILAEEATLKELFRFWPKKDEEEPPKWTSRLFYTVVAIVVVMLLRRHAPDEAARARYQRRMSNIIDDVLEWSPKLALSGLMENQQPVNITDAANNSSDSAGGPDQTEEVDLDETQGEDLDETQGKEEAEGWTDSDLKT

SEQ ID NO: 37612 - protein, 304 aa, Arabidopsis thaliana
  peptide (1)..(304): Ceres Seq. ID no. 13496335
  misc_feature (3)..(195): Pfam Name: Translocation protein Sec62 Pfam Description: Translocation protein Sec62
  misc_feature (6)..(286): Homolog of NCBI NO: 23509583 NR Description: translocation protein sec62, putative [Plasmodium
  misc_feature (1)..(304): Homolog of NCBI NO: 21593719 NR Description: unknown [Arabidopsis thaliana]
  misc_feature (1)..(304): Homolog of NCBI NO: 18402801 NR Description: expressed protein [Arabidopsis thaliana]
MEQARVEYFRGKDFVSFMKNNPDFKDILEEDKDLDTDDIANVLLGKNLLVRCDRVTKTLRPGKKKLSTWPAHLEIFRDDQSFSENDAFFAWTFEKRHPLWQTLLSFFWPVLTLAICLFPVYPHRCKLIVLYSCAGILLMILSLLFVRAVAFGAMWILLGKRVWFFPNILAEEATLKELFRFWPKKDEEEPPKWTSRLFYTVVAIVVVMLLRRHAPDEAARARYQRRMSNIIDDVLEWSPKLALSGLMENQQPVNITDAANNSSDSAGGPDQTEEVDLDETQGEDLDETQGKEEAEGWTDSDLKT

SEQ ID NO: 37613 - DNA, 968 bp, Arabidopsis thaliana
  misc_feature (1)..(968): Ceres Seq. ID no. 12331278
  misc_feature: MA Experiment ID: 108435 Result: Down-regulated in Transcription
  misc_feature: MA Experiment 108435 PARAMETER Experiment Name: At_stm_Mutants_cDNA_P Parameter: Plant Line Value: wt Landsburg vs stm
  misc_feature: MA Experiment 108435 PARAMETER Experiment Name: At_stm_Mutants_cDNA_P Parameter: Tissue Value: Shoot Apical Meristem Region
  misc_feature: MA Experiment ID: 108461 Result: Up-regulated in Transcription
  misc_feature: MA Experiment 108461 PARAMETER Experiment Name: At_Germinating_Seeds_cDNA_P Parameter: Age (day) Value: 1 vs. 0
  misc_feature: MA Experiment 108461 PARAMETER Experiment Name: At_Germinating_Seeds_cDNA_P Parameter: Tissue Value: Germinating Seeds
  misc_feature: MA Experiment ID: 108462 Result: Up-regulated in Transcription
  misc_feature: MA Experiment 108462 PARAMETER Experiment Name: At_Germinating_Seeds_cDNA_P Parameter: Age (day) Value: 2 vs. 0
  misc_feature: MA Experiment 108462 PARAMETER Experiment Name: At_Germinating_Seeds_cDNA_P Parameter: Tissue Value: Germinating Seeds
  misc_feature: MA Experiment ID: 108463 Result: Up-regulated in Transcription
  misc_feature: MA Experiment 108463 PARAMETER Experiment Name: At_Germinating_Seeds_cDNA_P Parameter: Age (day) Value: 3 vs. 0
  misc_feature: MA Experiment 108463 PARAMETER Experiment Name: At_Germinating_Seeds_cDNA_P Parameter: Tissue Value: Germinating Seeds
  misc_feature: MA Experiment ID: 108464 Result: Up-regulated in Transcription
  misc_feature: MA Experiment 108464 PARAMETER Experiment Name: At_Germinating_Seeds_cDNA_P Parameter: Age (day) Value: 4 vs. 0
  misc_feature: MA Experiment 108464 PARAMETER Experiment Name: At_Germinating_Seeds_cDNA_P Parameter: Tissue Value: Germinating Seeds
  misc_feature: MA Experiment ID: 108561 Result: Down-regulated in Transcription
  misc_feature: MA Experiment 108561 PARAMETER Experiment Name: At_100uM_ABA_cDNA_P Parameter: Timepoint (hr) Value: 6
  misc_feature: MA Experiment 108561 PARAMETER Experiment Name: At_100uM_ABA_cDNA_P Parameter: Tissue Value: Aerial
  misc_feature: MA Experiment 108561 PARAMETER Experiment Name: At_100uM_ABA_cDNA_P Parameter: Treatment Value: 100uM ABA vs. No Treatment
  misc_feature: MA Experiment ID: 108572 Result: Down-regulated in Transcription
  misc_feature: MA Experiment 108572 PARAMETER Experiment Name: At_Drought_cDNA_P Parameter: Timepoint (hr) Value: 1
  misc_feature: MA Experiment 108572 PARAMETER Experiment Name: At_Drought_cDNA_P Parameter: Tissue Value: Aerial
  misc_feature: MA Experiment 108572 PARAMETER Experiment Name: At_Drought_cDNA_P Parameter: Treatment Value: Drought vs. No Drought
  misc_feature: MA Experiment ID: 108573 Result: Down-regulated in Transcription
  misc_feature: MA Experiment 108573 PARAMETER Experiment Name: At_Drought_cDNA_P Parameter: Timepoint (hr) Value: 6
  misc_feature: MA Experiment 108573 PARAMETER Experiment Name: At_Drought_cDNA_P Parameter: Tissue Value: Aerial
  misc_feature: MA Experiment 108573 PARAMETER Experiment Name: At_Drought_cDNA_P Parameter: Treatment Value: Drought vs. No Drought
  misc_feature: MA Experiment ID: 108585 Result: Down-regulated in Transcription
  misc_feature: MA Experiment 108585 PARAMETER Experiment Name: At_5mM_NaNP_cDNA_P Parameter: Timepoint (hr) Value: 6
  misc_feature: MA Experiment 108585 PARAMETER Experiment Name: At_5mM_NaNP_cDNA_P Parameter: Tissue Value: Aerial
  misc_feature: MA Experiment 108585 PARAMETER Experiment Name: At_5mM_NaNP_cDNA_P Parameter: Treatment Value: null
  misc_feature: MA Experiment ID: 108595 Result: Down-regulated in Transcription
  misc_feature: MA Experiment 108595 PARAMETER Experiment Name: At_Ler-pi_Ovule_cDNA_P Parameter: Plant Line Value: null
  misc_feature: MA Experiment ID: 108607 Result: Down-regulated in Transcription
  misc_feature: MA Experiment 108607 PARAMETER Experiment Name: At_100uM_ABA_cDNA_P Parameter: Timepoint (hr) Value: 4
  misc_feature: MA Experiment 108607 PARAMETER Experiment Name: At_100uM_ABA_cDNA_P Parameter: Tissue Value: Aerial
  misc_feature: MA Experiment 108607 PARAMETER Experiment Name: At_100uM_ABA_cDNA_P Parameter: Treatment Value: 100uM ABA vs. No Treatment
  misc_feature: MA Experiment ID: 20000069 Result: Down-regulated in Transcription
  misc_feature: MA Experiment 20000069 PARAMETER Experiment Name: At_100uM_ABA_Mutants_cDNA_P Parameter: Plant Line Value: CS23
  misc_feature: MA Experiment 20000069 PARAMETER Experiment Name: At_100uM_ABA_Mutants_cDNA_P Parameter: Timepoint (hr) Value: 6
  misc_feature: MA Experiment 20000069 PARAMETER Experiment Name: At_100uM_ABA_Mutants_cDNA_P Parameter: Tissue Value: Aerial
  misc_feature: MA Experiment 20000069 PARAMETER Experiment Name: At_100uM_ABA_Mutants_cDNA_P Parameter: Treatment Value: 100uM ABA vs. No Treatment
  misc_feature: MA Experiment ID: 20000086 Result: Down-regulated in Transcription
  misc_feature: MA Experiment 20000086 PARAMETER Experiment Name: At_100uM_ABA_Mutants_cDNA_P Parameter: Plant Line Value: CS22
  misc_feature: MA Experiment 20000086 PARAMETER Experiment Name: At_100uM_ABA_Mutants_cDNA_P Parameter: Timepoint (hr) Value: 6
  misc_feature: MA Experiment 20000086 PARAMETER Experiment Name: At_100uM_ABA_Mutants_cDNA_P Parameter: Tissue Value: Aerial
  misc_feature: MA Experiment 20000086 PARAMETER Experiment Name: At_100uM_ABA_Mutants_cDNA_P Parameter: Treatment Value: 100uM ABA vs. No Treatment
  misc_feature: MA Experiment ID: 20000087 Result: Down-regulated in Transcription
  misc_feature: MA Experiment 20000087 PARAMETER Experiment Name: At_100uM_ABA_Mutants_cDNA_P Parameter: Plant Line Value: WS
  misc_feature: MA Experiment 20000087 PARAMETER Experiment Name: At_100uM_ABA_Mutants_cDNA_P Parameter: Timepoint (hr) Value: 6
  misc_feature: MA Experiment 20000087 PARAMETER Experiment Name: At_100uM_ABA_Mutants_cDNA_P Parameter: Tissue Value: Aerial
  misc_feature: MA Experiment 20000087 PARAMETER Experiment Name: At_100uM_ABA_Mutants_cDNA_P Parameter: Treatment Value: 100uM ABA vs. No Treatment
  misc_feature: MA Experiment ID: 20000088 Result: Down-regulated in Transcription
  misc_feature: MA Experiment 20000088 PARAMETER Experiment Name: At_100uM_ABA_Mutants_cDNA_P Parameter: Plant Line Value: Landsberg
  misc_feature: MA Experiment 20000088 PARAMETER Experiment Name: At_100uM_ABA_Mutants_cDNA_P Parameter: Timepoint (hr) Value: 6
  misc_feature: MA Experiment 20000088 PARAMETER Experiment Name: At_100uM_ABA_Mutants_cDNA_P Parameter: Tissue Value: Aerial
  misc_feature: MA Experiment 20000088 PARAMETER Experiment Name: At_100uM_ABA_Mutants_cDNA_P Parameter: Treatment Value: 100uM ABA vs. No Treatment
  misc_feature: MA Experiment ID: 20000117 Result: Down-regulated in Transcription
  misc_feature: MA Experiment 20000117 PARAMETER Experiment Name: At_100uM_ABA_Mutants_cDNA_P Parameter: Plant Line Value: Columbia
  misc_feature: MA Experiment 20000117 PARAMETER Experiment Name: At_100uM_ABA_Mutants_cDNA_P Parameter: Timepoint (hr) Value: 6
  misc_feature: MA Experiment 20000117 PARAMETER Experiment Name: At_100uM_ABA_Mutants_cDNA_P Parameter: Tissue Value: Aerial
  misc_feature: MA Experiment 20000117 PARAMETER Experiment Name: At_100uM_ABA_Mutants_cDNA_P Parameter: Treatment Value: 100uM ABA vs. No Treatment
  misc_feature: MA Experiment ID: 20000179 Result: Up-regulated in Transcription
  misc_feature: MA Experiment 20000179 PARAMETER Experiment Name: At_Germinating_Seeds_P Parameter: Age (hr) Value: 6 vs. 0
  misc_feature: MA Experiment 20000179 PARAMETER Experiment Name: At_Germinating_Seeds_P Parameter: Tissue Value: Germinating Seeds
  misc_feature: MA Experiment ID: 20000180 Result: Up-regulated in Transcription
  misc_feature: MA Experiment 20000180 PARAMETER Experiment Name: At_Germinating_Seeds_P Parameter: Age (hr) Value: 24 vs. 0
  misc_feature: MA Experiment 20000180 PARAMETER Experiment Name: At_Germinating_Seeds_P Parameter: Tissue Value: Germinating Seeds
  misc_feature: MA Experiment ID: 20000185 Result: Down-regulated in Transcription
  misc_feature: MA Experiment 20000185 PARAMETER Experiment Name: At_Roots__P Parameter: Age (day) Value: 7 vs. 21
  misc_feature: MA Experiment 20000185 PARAMETER Experiment Name: At_Roots__P Parameter: Organism Value: A. thaliana
  misc_feature: MA Experiment 20000185 PARAMETER Experiment Name: At_Roots__P Parameter: Tissue Value: Roots vs. Whole Plant
  misc_feature: MA Experiment ID: 20000234 Result: Up-regulated in Transcription
  misc_feature: MA Experiment 20000234 PARAMETER Experiment Name: At_Siliques_P Parameter: Age (day) Value: 21
  misc_feature: MA Experiment 20000234 PARAMETER Experiment Name: At_Siliques_P Parameter: Organism Value: A. thaliana
  misc_feature: MA Experiment 20000234 PARAMETER Experiment Name: At_Siliques_P Parameter: Plant Line Value: WS
  misc_feature: MA Experiment 20000234 PARAMETER Experiment Name: At_Siliques_P Parameter: Tissue Value: Less Than 5mm Siliques vs. Whole Plant
  misc_feature: MA Experiment ID: 20000235 Result: Up-regulated in Transcription
  misc_feature: MA Experiment 20000235 PARAMETER Experiment Name: At_Siliques_P Parameter: Age (day) Value: 21
  misc_feature: MA Experiment 20000235 PARAMETER Experiment Name: At_Siliques_P Parameter: Organism Value: A. thaliana
  misc_feature: MA Experiment 20000235 PARAMETER Experiment Name: At_Siliques_P Parameter: Plant Line Value: WS
  misc_feature: MA Experiment 20000235 PARAMETER Experiment Name: At_Siliques_P Parameter: Tissue Value: 5-10mm Siliques vs. Whole Plant
  misc_feature: MA Experiment ID: 20000436 Result: Down-regulated in Transcription
  misc_feature: MA Experiment 20000436 PARAMETER Experiment Name: At_Drought_P Parameter: Age (day) Value: 7
  misc_feature: MA Experiment 20000436 PARAMETER Experiment Name: At_Drought_P Parameter: Organism Value: A. thaliana
  misc_feature: MA Experiment 20000436 PARAMETER Experiment Name: At_Drought_P Parameter: Plant Line Value: WS
  misc_feature: MA Experiment 20000436 PARAMETER Experiment Name: At_Drought_P Parameter: Timepoint (hr) Value: 12
  misc_feature: MA Experiment 20000436 PARAMETER Experiment Name: At_Drought_P Parameter: Tissue Value: Whole Plant
  misc_feature: MA Experiment 20000436 PARAMETER Experiment Name: At_Drought_P Parameter: Treatment Value: Drought vs. No Drought
  misc_feature: MA Experiment ID: 20000437 Result: Down-regulated in Transcription
  misc_feature: MA Experiment 20000437 PARAMETER Experiment Name: At_Drought_P Parameter: Age (day) Value: 8
  misc_feature: MA Experiment 20000437 PARAMETER Experiment Name: At_Drought_P Parameter: Organism Value: A. thaliana
  misc_feature: MA Experiment 20000437 PARAMETER Experiment Name: At_Drought_P Parameter: Plant Line Value: WS
  misc_feature: MA Experiment 20000437 PARAMETER Experiment Name: At_Drought_P Parameter: Timepoint (hr) Value: 24
  misc_feature: MA Experiment 20000437 PARAMETER Experiment Name: At_Drought_P Parameter: Tissue Value: Whole Plant
  misc_feature: MA Experiment 20000437 PARAMETER Experiment Name: At_Drought_P Parameter: Treatment Value: Drought vs. No Drought
  misc_feature: MA Experiment ID: 20000438 Result: Up-regulated in Transcription
  misc_feature: MA Experiment 20000438 PARAMETER Experiment Name: At_Shoots__P Parameter: Age (day) Value: 14
  misc_feature: MA Experiment 20000438 PARAMETER Experiment Name: At_Shoots__P Parameter: Tissue Value: Shoots vs. Whole Plant
  misc_feature: MA Experiment ID: 20000439 Result: Down-regulated in Transcription
  misc_feature: MA Experiment 20000439 PARAMETER Experiment Name: At_Roots__P Parameter: Age (day) Value: 14 vs. 21
  misc_feature: MA Experiment 20000439 PARAMETER Experiment Name: At_Roots__P Parameter: Organism Value: A. thaliana
  misc_feature: MA Experiment 20000439 PARAMETER Experiment Name: At_Roots__P Parameter: Tissue Value: Roots vs. Whole Plant
  misc_feature: MA Experiment ID: 20001247 Result: Down-regulated in Transcription
  misc_feature: MA Experiment 20001247 PARAMETER Experiment Name: At_Far-red-induction_P Parameter: Age (day) Value: 7
  misc_feature: MA Experiment 20001247 PARAMETER Experiment Name: At_Far-red-induction_P Parameter: Light Value: Far-red vs. White
  misc_feature: MA Experiment 20001247 PARAMETER Experiment Name: At_Far-red-induction_P Parameter: Organism Value: A. thaliana
  misc_feature: MA Experiment 20001247 PARAMETER Experiment Name: At_Far-red-induction_P Parameter: Plant Line Value: Columbia
  misc_feature: MA Experiment 20001247 PARAMETER Experiment Name: At_Far-red-induction_P Parameter: Timepoint (hr) Value: 1
  misc_feature: MA Experiment 20001247 PARAMETER Experiment Name: At_Far-red-induction_P Parameter: Tissue Value: Whole Plant
  misc_feature: MA Experiment ID: 20001248 Result: Down-regulated in Transcription
  misc_feature: MA Experiment 20001248 PARAMETER Experiment Name: At_Far-red-induction_P Parameter: Age (day) Value: 7
  misc_feature: MA Experiment 20001248 PARAMETER Experiment Name: At_Far-red-induction_P Parameter: Light Value: Far-red vs. White
  misc_feature: MA Experiment 20001248 PARAMETER Experiment Name: At_Far-red-induction_P Parameter: Organism Value: A. thaliana
  misc_feature: MA Experiment 20001248 PARAMETER Experiment Name: At_Far-red-induction_P Parameter: Plant Line Value: Columbia
  misc_feature: MA Experiment 20001248 PARAMETER Experiment Name: At_Far-red-induction_P Parameter: Timepoint (hr) Value: 4
  misc_feature: MA Experiment 20001248 PARAMETER Experiment Name: At_Far-red-induction_P Parameter: Tissue Value: Whole Plant
  misc_feature: MA Experiment ID: 20001450 Result: Down-regulated in Transcription
  misc_feature: MA Experiment 20001450 PARAMETER Experiment Name: At_Far-red-induction_P Parameter: Age (day) Value: 7
  misc_feature: MA Experiment 20001450 PARAMETER Experiment Name: At_Far-red-induction_P Parameter: Light Value: Far-red vs. White
  misc_feature: MA Experiment 20001450 PARAMETER Experiment Name: At_Far-red-induction_P Parameter: Organism Value: A. thaliana
  misc_feature: MA Experiment 20001450 PARAMETER Experiment Name: At_Far-red-induction_P Parameter: Plant Line Value: Columbia
  misc_feature: MA Experiment 20001450 PARAMETER Experiment Name: At_Far-red-induction_P Parameter: Timepoint (hr) Value: 8
  misc_feature: MA Experiment 20001450 PARAMETER Experiment Name: At_Far-red-induction_P Parameter: Tissue Value: Whole Plant
  misc_feature: MA Experiment ID: 20001560 Result: Up-regulated in Transcription
  misc_feature: MA Experiment 20001560 PARAMETER Experiment Name: At_Drought_Soil_Dry_P Parameter: Age (day) Value: 28
  misc_feature: MA Experiment 20001560 PARAMETER Experiment Name: At_Drought_Soil_Dry_P Parameter: Organism Value: A. thaliana
  misc_feature: MA Experiment 20001560 PARAMETER Experiment Name: At_Drought_Soil_Dry_P Parameter: Plant Line Value: WS
  misc_feature: MA Experiment 20001560 PARAMETER Experiment Name: At_Drought_Soil_Dry_P Parameter: Post Timepoint (hr) Value: None
  misc_feature: MA Experiment 20001560 PARAMETER Experiment Name: At_Drought_Soil_Dry_P Parameter: Post-Treatment Value: None
  misc_feature: MA Experiment 20001560 PARAMETER Experiment Name: At_Drought_Soil_Dry_P Parameter: Timepoint (day) Value: 14
  misc_feature: MA Experiment 20001560 PARAMETER Experiment Name: At_Drought_Soil_Dry_P Parameter: Treatment Value: Drought vs. No Drought
  misc_feature: MA Experiment ID: 20001757 Result: Up-regulated in Transcription
  misc_feature: MA Experiment 20001757 PARAMETER Experiment Name: At_50mM_NH4NO3_L-to-H_P Parameter: Timepoint (hr) Value: 6
  misc_feature: MA Experiment 20001757 PARAMETER Experiment Name: At_50mM_NH4NO3_L-to-H_P Parameter: Tissue Value: Leaf
  misc_feature: MA Experiment 20001757 PARAMETER Experiment Name: At_50mM_NH4NO3_L-to-H_P Parameter: Treatment Value: 50mM NH4NO3 vs 100mM Mannitol
  misc_feature: MA Experiment ID: 20001905 Result: Down-regulated in Transcription
  misc_feature: MA Experiment 20001905 PARAMETER Experiment Name: At_Drought_Reproduction_P Parameter: Age (day) Value: 40
  misc_feature: MA Experiment 20001905 PARAMETER Experiment Name: At_Drought_Reproduction_P Parameter: Organism Value: A. thaliana
  misc_feature: MA Experiment 20001905 PARAMETER Experiment Name: At_Drought_Reproduction_P Parameter: Plant Line Value: WS
  misc_feature: MA Experiment 20001905 PARAMETER Experiment Name: At_Drought_Reproduction_P Parameter: Timepoint (day) Value: 10
  misc_feature: MA Experiment 20001905 PARAMETER Experiment Name: At_Drought_Reproduction_P Parameter: Tissue Value: Rosettes
  misc_feature: MA Experiment 20001905 PARAMETER Experiment Name: At_Drought_Reproduction_P Parameter: Treatment Value: Drought vs. No Drought
actcttttggccttatccgaaatctttttgtgggcagaaacgtttgtgtcttaggccaatctctgtgtctctctgtccagagagaaatggcagcatcatcagtactactctcgtgcttcaaatcccatcatcaaccaaaccttctccatggctgcaactactcatctaaccaaacactcctcagattcaacttttcaaccccaaaacctctcctgatctcctcacggagctgctcacgacgattcagagtcttgtcagagaccatcaccgtcaaattggaagaggaggagaaggatgatggtgcaagtgctgttcttgatcctcctgccgccgttaacactaagctctacttcggtaacttgccttacaatgttgacagtgcaactctggctcaaatcattcaagatttcgctaaccctgagctcgttgaggttctttacaacagagataccggacagagtcgtggattcgccttcgttaccatgagcaatgtcgaagattgcaacatcatcatcgataacctcgatggaactgagtatcttggtcgtgctttgaaagtgaactttgcagacaaaccaaagcctaacaaagaacctctgtatccagaaacagagcacaagctctttgttggtaacttatcatggactgttacttccgagtcattagctggagcgtttcgagaatgtggagatgtggttggggctagagttgtgtttgatggagatacaggaagatcacggggttatggctttgtatgttactcttccaaagcagaaatggaaaccgctcttgaatcgcttgacggatttgagctggagggtcgggcgattcgagtaaaccttgctcaagggaagaaattttgatatcatacaacaacattgtgtaatcattttgagttttatacattagagttatgtttatattgattgaactaattaactcaaaagatcaataaaactttttatgct

SEQ ID NO: 37614 - protein, 286 aa, Arabidopsis thaliana
  peptide (1)..(286): Ceres Seq. ID no. 12331279
  misc_feature (115)..(186): Pfam Name: RNA recognition motif. (a.k.a. RRM, RBD, or RNP domain) Pfam Description: RNA recognition motif. (a.k.a. RRM, RBD, or RNP
  misc_feature (67)..(284): Homolog of NCBI NO: 34913270 NR Description: putative ribonucleoprotein
  misc_feature (54)..(284): Homolog of NCBI NO: 12230584 NR Description: 29 kDa ribonucleoprotein A, chloroplast precursor
  misc_feature (205)..(284): Homolog of NCBI NO: 15228102 NR Description: chloroplast RNA-binding protein cp29, putative
  misc_feature (30)..(197): Homolog of NCBI NO: 15228102 NR Description: chloroplast RNA-binding protein cp29, putative
  misc_feature (205)..(284): Homolog of NCBI NO: 21617920 NR Description: putative RNA-binding protein [Arabidopsis
  misc_feature (30)..(197): Homolog of NCBI NO: 21617920 NR Description: putative RNA-binding protein [Arabidopsis
  misc_feature (29)..(94): Homolog of NCBI NO: 30696379 NR Description: 29 kDa ribonucleoprotein, chloroplast
  misc_feature (86)..(285): Homolog of NCBI NO: 7446361 NR Description: RNA-binding protein - fava bean (fragment)
  misc_feature (72)..(285): Homolog of NCBI NO: 1076509 NR Description: RNA-binding protein RNP1 precursor - kidney bean
  misc_feature (29)..(286): Homolog of NCBI NO: 15218972 NR Description: chloroplast RNA-binding protein, putative
SFGLIRNLFVGRNVCVLGQSLCLSVQREMAASSVLLSCFKSHHQPNLLHGCNYSSNQTLLRFNFSTPKPLLISSRSCSRRFRVLSETITVKLEEEEKDDGASAVLDPPAAVNTKLYFGNLPYNVDSATLAQIIQDFANPELVEVLYNRDTGQSRGFAFVTMSNVEDCNIIIDNLDGTEYLGRALKVNFADKPKPNKEPLYPETEHKLFVGNLSWTVTSESLAGAFRECGDVVGARVVFDGDTGRSRGYGFVCYSSKAEMETALESLDGFELEGRAIRVNLAQGKKF

SEQ ID NO: 37615 - protein, 258 aa, Arabidopsis thaliana
  peptide (1)..(258): Ceres Seq. ID no. 12331280
  misc_feature (87)..(158): Pfam Name: RNA recognition motif. (a.k.a. RRM, RBD, or RNP domain) Pfam Description: RNA recognition motif. (a.k.a. RRM, RBD, or RNP
  misc_feature (39)..(256): Homolog of NCBI NO: 34913270 NR Description: putative ribonucleoprotein
  misc_feature (26)..(256): Homolog of NCBI NO: 12230584 NR Description: 29 kDa ribonucleoprotein A, chloroplast precursor
  misc_feature (177)..(256): Homolog of NCBI NO: 15228102 NR Description: chloroplast RNA-binding protein cp29, putative
  misc_feature (2)..(169): Homolog of NCBI NO: 15228102 NR Description: chloroplast RNA-binding protein cp29, putative
  misc_feature (177)..(256): Homolog of NCBI NO: 21617920 NR Description: putative RNA-binding protein [Arabidopsis
  misc_feature (2)..(169): Homolog of NCBI NO: 21617920 NR Description: putative RNA-binding protein [Arabidopsis
  misc_feature (1)..(66): Homolog of NCBI NO: 30696379 NR Description: 29 kDa ribonucleoprotein, chloroplast
  misc_feature (58)..(257): Homolog of NCBI NO: 7446361 NR Description: RNA-binding protein - fava bean (fragment)
  misc_feature (44)..(257): Homolog of NCBI NO: 1076509 NR Description: RNA-binding protein RNP1 precursor - kidney bean
  misc_feature (1)..(258): Homolog of NCBI NO: 15218972 NR Description: chloroplast RNA-binding protein, putative
MAASSVLLSCFKSHHQPNLLHGCNYSSNQTLLRFNFSTPKPLLISSRSCSRRFRVLSETITVKLEEEEKDDGASAVLDPPAAVNTKLYFGNLPYNVDSATLAQIIQDFANPELVEVLYNRDTGQSRGFAFVTMSNVEDCNIIIDNLDGTEYLGRALKVNFADKPKPNKEPLYPETEHKLFVGNLSWTVTSESLAGAFRECGDVVGARVVFDGDTGRSRGYGFVCYSSKAEMETALESLDGFELEGRAIRVNLAQGKKF

SEQ ID NO: 37616 - DNA, 889 bp, Arabidopsis thaliana
  misc_feature (1)..(889): Ceres Seq. ID no. 13491579
  misc_feature: MA Experiment ID: 108435 Result: Down-regulated in Transcription
  misc_feature: MA Experiment 108435 PARAMETER Experiment Name: At_stm_Mutants_cDNA_P Parameter: Plant Line Value: wt Landsburg vs stm
  misc_feature: MA Experiment 108435 PARAMETER Experiment Name: At_stm_Mutants_cDNA_P Parameter: Tissue Value: Shoot Apical Meristem Region
  misc_feature: MA Experiment ID: 108462 Result: Up-regulated in Transcription
  misc_feature: MA Experiment 108462 PARAMETER Experiment Name: At_Germinating_Seeds_cDNA_P Parameter: Age (day) Value: 2 vs. 0
  misc_feature: MA Experiment 108462 PARAMETER Experiment Name: At_Germinating_Seeds_cDNA_P Parameter: Tissue Value: Germinating Seeds
  misc_feature: MA Experiment ID: 108595 Result: Down-regulated in Transcription
  misc_feature: MA Experiment 108595 PARAMETER Experiment Name: At_Ler-pi_Ovule_cDNA_P Parameter: Plant Line Value: null
  misc_feature: MA Experiment ID: 20000090 Result: Down-regulated in Transcription
  misc_feature: MA Experiment ID: 20000113 Result: Down-regulated in Transcription
  misc_feature: MA Experiment 20000113 PARAMETER Experiment Name: At_42deg_Heat_cDNA_P Parameter: Temperature (deg C) Value: 42 vs. 22
  misc_feature: MA Experiment 20000113 PARAMETER Experiment Name: At_42deg_Heat_cDNA_P Parameter: Timepoint (hr) Value: 8
  misc_feature: MA Experiment 20000113 PARAMETER Experiment Name: At_42deg_Heat_cDNA_P Parameter: Tissue Value: Aerial
  misc_feature: MA Experiment ID: 20000185 Result: Down-regulated in Transcription
  misc_feature: MA Experiment 20000185 PARAMETER Experiment Name: At_Roots__P Parameter: Age (day) Value: 7 vs. 21
  misc_feature: MA Experiment 20000185 PARAMETER Experiment Name: At_Roots__P Parameter: Organism Value: A. thaliana
  misc_feature: MA Experiment 20000185 PARAMETER Experiment Name: At_Roots__P Parameter: Tissue Value: Roots vs. Whole Plant
  misc_feature: MA Experiment ID: 20000438 Result: Up-regulated in Transcription
  misc_feature: MA Experiment 20000438 PARAMETER Experiment Name: At_Shoots__P Parameter: Age (day) Value: 14
  misc_feature: MA Experiment 20000438 PARAMETER Experiment Name: At_Shoots__P Parameter: Tissue Value: Shoots vs. Whole Plant
  misc_feature: MA Experiment ID: 20000439 Result: Down-regulated in Transcription
  misc_feature: MA Experiment 20000439 PARAMETER Experiment Name: At_Roots__P Parameter: Age (day) Value: 14 vs. 21
  misc_feature: MA Experiment 20000439 PARAMETER Experiment Name: At_Roots__P Parameter: Organism Value: A. thaliana
  misc_feature: MA Experiment 20000439 PARAMETER Experiment Name: At_Roots__P Parameter: Tissue Value: Roots vs. Whole Plant
  misc_feature: MA Experiment ID: 20000495 Result: Down-regulated in Transcription
  misc_feature: MA Experiment 20000495 PARAMETER Experiment Name: At_Guard_Cells_P Parameter: Harvest Date Value: 8/2/2002
  misc_feature: MA Experiment 20000495 PARAMETER Experiment Name: At_Guard_Cells_P Parameter: Organism Value: A. thaliana
  misc_feature: MA Experiment 20000495 PARAMETER Experiment Name: At_Guard_Cells_P Parameter: Tissue Value: Guard Cells vs. Leaves
  misc_feature: MA Experiment ID: 20001248 Result: Down-regulated in Transcription
  misc_feature: MA Experiment 20001248 PARAMETER Experiment Name: At_Far-red-induction_P Parameter: Age (day) Value: 7
  misc_feature: MA Experiment 20001248 PARAMETER Experiment Name: At_Far-red-induction_P Parameter: Light Value: Far-red vs. White
  misc_feature: MA Experiment 20001248 PARAMETER Experiment Name: At_Far-red-induction_P Parameter: Organism Value: A. thaliana
  misc_feature: MA Experiment 20001248 PARAMETER Experiment Name: At_Far-red-induction_P Parameter: Plant Line Value: Columbia
  misc_feature: MA Experiment 20001248 PARAMETER Experiment Name: At_Far-red-induction_P Parameter: Timepoint (hr) Value: 4
  misc_feature: MA Experiment 20001248 PARAMETER Experiment Name: At_Far-red-induction_P Parameter: Tissue Value: Whole Plant
aagcaaaaaaaaaaaaaaacagagcaaaatggccgtagttttacgtggaggcatcaccggaggatttcttcaccatcgtcgtgacgcttcatccgtcatcacaagaagaatctcatccgtcaaagccgcaggaggaggcatcaacccaacggtggctgttgaacgtgccacgtggctacctggactaaaccctcctccttatcttgatggaaatttagctggagattacgggtttgacccactcgggttaggagaggatccggaaagcttgaagtggtatgttcaagcagagcttgttcactctcgtttcgctatgctcggtgttgcaggaatactcttcactgatctccttcggaccacagggattcgtaatttaccggtttggtatgaagctggagctgtgaaatttgattttgctagtacaaaaactctcatagttgtacagtttctacttatggggtttgctgagactaaaaggtatatggattttgtctctccgggatcacaagccaaagaaggatcgtttttctttggacttgaagcagcactcgaggggctcgagcctggatatcccggaggaccgcttttaaacccattaggccttgctaaggatgttcaaaatgctcatgactggaagcttaaggagatcaagaacggtcgtctagcgatgatggcgatgctcgggttctttgttcaagcctctgtgactcacactggccctattgataaccttgttgagcatctctctaatccatggcataagaccatcattcaaaccctcttcacctctacatcttaggtacattcttttgtaatgaaaaattcgattattcgacaagtgtatcaatacctttatttcatttaagagtacaacaaatctgttctaatc

SEQ ID NO: 37617 - protein, 265 aa, Arabidopsis thaliana
  peptide (1)..(265): Ceres Seq. ID no. 13491580
  misc_feature (63)..(234): Pfam Name: Chlorophyll A-B binding protein Pfam Description: Chlorophyll A-B binding protein
  misc_feature (29)..(260): Homolog of NCBI NO: 100196 NR Description: chlorophyll a/b-binding protein (cab-11) - tomato
  misc_feature (46)..(260): Homolog of NCBI NO: 322393 NR Description: chlorophyll a/b-binding protein type 4,
  misc_feature (46)..(260): Homolog of NCBI NO: 322392 NR Description: chlorophyll a/b-binding protein type 4,
  misc_feature (53)..(253): Homolog of NCBI NO: 5902596 NR Description: light harvesting complex a protein [Volvox
  misc_feature (30)..(253): Homolog of NCBI NO: 40714521 NR Description: light-harvesting chlorophyll-a/b protein of
  misc_feature (33)..(253): Homolog of NCBI NO: 40714515 NR Description: light-harvesting chlorophyll-a/b protein of
  misc_feature (30)..(253): Homolog of NCBI NO: 27542569 NR Description: light-harvesting complex I protein [Chlamydomonas
  misc_feature (10)..(265): Homolog of NCBI NO: 21593722 NR Description: light-harvesting complex protein [Arabidopsis
  misc_feature (10)..(265): Homolog of NCBI NO: 25299023 NR Description: chlorophyll a/b-binding protein Lhca5,
  misc_feature (10)..(265): Homolog of NCBI NO: 15220077 NR Description: light-harvesting chlorophyll a/b binding protein
SKKKKKQSKMAVVLRGGITGGFLHHRRDASSVITRRISSVKAAGGGINPTVAVERATWLPGLNPPPYLDGNLAGDYGFDPLGLGEDPESLKWYVQAELVHSRFAMLGVAGILFTDLLRTTGIRNLPVWYEAGAVKFDFASTKTLIVVQFLLMGFAETKRYMDFVSPGSQAKEGSFFFGLEAALEGLEPGYPGGPLLNPLGLAKDVQNAHDWKLKEIKNGRLAMMAMLGFFVQASVTHTGPIDNLVEHLSNPWHKTIIQTLFTSTS

SEQ ID NO: 37618 - protein, 256 aa, Arabidopsis thaliana
  peptide (1)..(256): Ceres Seq. ID no. 13491581
  misc_feature (54)..(225): Pfam Name: Chlorophyll A-B binding protein Pfam Description: Chlorophyll A-B binding protein
  misc_feature (20)..(251): Homolog of NCBI NO: 100196 NR Description: chlorophyll a/b-binding protein (cab-11) - tomato
  misc_feature (37)..(251): Homolog of NCBI NO: 322393 NR Description: chlorophyll a/b-binding protein type 4,
  misc_feature (37)..(251): Homolog of NCBI NO: 322392 NR Description: chlorophyll a/b-binding protein type 4,
  misc_feature (44)..(244): Homolog of NCBI NO: 5902596 NR Description: light harvesting complex a protein [Volvox
  misc_feature (21)..(244): Homolog of NCBI NO: 40714521 NR Description: light-harvesting chlorophyll-a/b protein of
  misc_feature (24)..(244): Homolog of NCBI NO: 40714515 NR Description: light-harvesting chlorophyll-a/b protein of
  misc_feature (21)..(244): Homolog of NCBI NO: 27542569 NR Description: light-harvesting complex I protein [Chlamydomonas
  misc_feature (1)..(256): Homolog of NCBI NO: 21593722 NR Description: light-harvesting complex protein [Arabidopsis
  misc_feature (1)..(256): Homolog of NCBI NO: 25299023 NR Description: chlorophyll a/b-binding protein Lhca5,
  misc_feature (1)..(256): Homolog of NCBI NO: 15220077 NR Description: light-harvesting chlorophyll a/b binding protein
MAVVLRGGITGGFLHHRRDASSVITRRISSVKAAGGGINPTVAVERATWLPGLNPPPYLDGNLAGDYGFDPLGLGEDPESLKWYVQAELVHSRFAMLGVAGILFTDLLRTTGIRNLPVWYEAGAVKFDFASTKTLIVVQFLLMGFAETKRYMDFVSPGSQAKEGSFFFGLEAALEGLEPGYPGGPLLNPLGLAKDVQNAHDWKLKEIKNGRLAMMAMLGFFVQASVTHTGPIDNLVEHLSNPWHKTIIQTLFTSTS

SEQ ID NO: 37619 - protein, 161 aa, Arabidopsis thaliana
  peptide (1)..(161): Ceres Seq. ID no. 13491582
  misc_feature (1)..(130): Pfam Name: Chlorophyll A-B binding protein Pfam Description: Chlorophyll A-B binding protein
  misc_feature (1)..(156): Homolog of NCBI NO: 100196 NR Description: chlorophyll a/b-binding protein (cab-11) - tomato
  misc_feature (1)..(156): Homolog of NCBI NO: 322393 NR Description: chlorophyll a/b-binding protein type 4,
  misc_feature (1)..(156): Homolog of NCBI NO: 322392 NR Description: chlorophyll a/b-binding protein type 4,
  misc_feature (1)..(149): Homolog of NCBI NO: 5902596 NR Description: light harvesting complex a protein [Volvox
  misc_feature (1)..(149): Homolog of NCBI NO: 40714521 NR Description: light-harvesting chlorophyll-a/b protein of
  misc_feature (1)..(149): Homolog of NCBI NO: 40714515 NR Description: light-harvesting chlorophyll-a/b protein of
  misc_feature (1)..(149): Homolog of NCBI NO: 27542569 NR Description: light-harvesting complex I protein [Chlamydomonas
  misc_feature (1)..(161): Homolog of NCBI NO: 21593722 NR Description: light-harvesting complex protein [Arabidopsis
  misc_feature (1)..(161): Homolog of NCBI NO: 25299023 NR Description: chlorophyll a/b-binding protein Lhca5,
  misc_feature (1)..(161): Homolog of NCBI NO: 15220077 NR Description: light-harvesting chlorophyll a/b binding protein
MLGVAGILFTDLLRTTGIRNLPVWYEAGAVKFDFASTKTLIVVQFLLMGFAETKRYMDFVSPGSQAKEGSFFFGLEAALEGLEPGYPGGPLLNPLGLAKDVQNAHDWKLKEIKNGRLAMMAMLGFFVQASVTHTGPIDNLVEHLSNPWHKTIIQTLFTSTS

SEQ ID NO: 37620 - DNA, 1189 bp, Arabidopsis thaliana
  misc_feature (1)..(1189): Ceres Seq. ID no. 12599958
  misc_feature: MA Experiment ID: 20000184 Result: Down-regulated in Transcription
  misc_feature: MA Experiment 20000184 PARAMETER Experiment Name: At_Shoots__P Parameter: Age (day) Value: 7
  misc_feature: MA Experiment 20000184 PARAMETER Experiment Name: At_Shoots__P Parameter: Tissue Value: Shoots vs. Whole Plant
  misc_feature: MA Experiment ID: 20000265 Result: Up-regulated in Transcription
  misc_feature: MA Experiment 20000265 PARAMETER Experiment Name: At_Open_Flower_P Parameter: Age (day) Value: 21
  misc_feature: MA Experiment 20000265 PARAMETER Experiment Name: At_Open_Flower_P Parameter: Plant Line Value: WS
  misc_feature: MA Experiment 20000265 PARAMETER Experiment Name: At_Open_Flower_P Parameter: Tissue Value: Closed Flower vs. Whole Plant
  misc_feature: MA Experiment ID: 20000286 Result: Up-regulated in Transcription
  misc_feature: MA Experiment 20000286 PARAMETER Experiment Name: At_Open_Flower_P Parameter: Age (day) Value: 21
  misc_feature: MA Experiment 20000286 PARAMETER Experiment Name: At_Open_Flower_P Parameter: Plant Line Value: WS
  misc_feature: MA Experiment 20000286 PARAMETER Experiment Name: At_Open_Flower_P Parameter: Tissue Value: Half Open vs. Whole Plant
  misc_feature: MA Experiment ID: 20001771 Result: Up-regulated in Transcription
  misc_feature: MA Experiment 20001771 PARAMETER Experiment Name: At_Far-red-enriched-adult_P Parameter: Age (day) Value: 28
  misc_feature: MA Experiment 20001771 PARAMETER Experiment Name: At_Far-red-enriched-adult_P Parameter: Light Value: Far-red enriched vs. White
  misc_feature: MA Experiment 20001771 PARAMETER Experiment Name: At_Far-red-enriched-adult_P Parameter: Organism Value: A. thaliana
  misc_feature: MA Experiment 20001771 PARAMETER Experiment Name: At_Far-red-enriched-adult_P Parameter: Plant Line Value: Columbia
  misc_feature: MA Experiment 20001771 PARAMETER Experiment Name: At_Far-red-enriched-adult_P Parameter: Timepoint (hr) Value: 16
  misc_feature: MA Experiment 20001771 PARAMETER Experiment Name: At_Far-red-enriched-adult_P Parameter: Tissue Value: Aerial
cagaaaaattttggacttattttcgatatgtttaggggaaaaatatttgtgttatcattattttctatttacgtcctctcatcagcggctgaaaaaaatacatcattttctgcgctttttgcttttggtgattcagtcttagatacgggaaacaataattttcttcttactcttctcaaaggaaattattggccatatggtttgagttttgactataaatttccgacgggaagattcggaaatggaagagttttcaccgatatagttgccgaagtttacagatcaaaagacttgtaccagcttatagcaagattcgtcgcatcagttctgaagaccttaagactggcgtttgttttgcatcaggtggttcaggaattgacgatcttacatcccgaacactgagagttttatcggcaggtgaccaagtaaaagactttaaagactatttgaagaaactaagaagagtagtgaaacgtaagaaaaaagtaaaagaaatagtttcaaaacccnggggcccccnttttngggtgtttcttatttctgaaggaaataatgatcttggatactttgtcgctcccgctcttcttcgattacagtccacaacaacatacaccagtaaaatggttgtttggaccagaaagtttctaaaagatttatatgatcttggagcgagaaaatttgcggtgatgggagtgatgcctgtgggatgtttgcctatccatcgagcctcattcggtggggtattcggatggtgtaacttcctcttgaatagagttacggaggacttcaacatgaaattgcagaaaggtcttacaagttacgcagtagaatatgatttcaaagatgcaaagtttgtttacgtcgacatatacggtactcttatggatcttgtcaaaaatcctatggcctatgggtttacagaagcgaaaaaagcttgttgttgtatgccgaatgcaataataccatgcttccatccagataaatacgtcttctatgactttgctcacccttcccagaaagcctacgaagtaatatctaaacctattgtctatcagatagcgaaaggccttgcctagctaattccttatttcctacaatgttttattataatctttgaaaattatcaccatatcgataaatatatgtaaatgtataagattcatgacaatctattcgtttttcttattgg

SEQ ID NO: 37621 - protein, 151 aa, Arabidopsis thaliana
  peptide (1)..(151): Ceres Seq. ID no. 12599959
  misc_feature (1)..(142): Pfam Name: GDSL-like Lipase/Acylhydrolase Pfam Description: GDSL-like Lipase/Acylhydrolase
  misc_feature (1)..(151): Homolog of NCBI NO: 15242657 NR Description: lipase/acylhydrolase-like protein; protein id:
  misc_feature (1)..(151): Homolog of NCBI NO: 15219505 NR Description: putative lipase/acylhydrolase; protein id:
  misc_feature (1)..(151): Homolog of NCBI NO: 15220775 NR Description: hypothetical protein; protein id: At1g23500.1
  misc_feature (1)..(151): Homolog of NCBI NO: 25404994 NR Description: protein T4O12.13 [imported] - Arabidopsis
  misc_feature (1)..(151): Homolog of NCBI NO: 15054388 NR Description: family II lipase EXL4 [Arabidopsis thaliana]
  misc_feature (1)..(151): Homolog of NCBI NO: 15222902 NR Description: family II extracellular lipase 4 (EXL4)
  misc_feature (1)..(151): Homolog of NCBI NO: 18410967 NR Description: family II extracellular lipase 5 (EXL5)
  misc_feature (1)..(151): Homolog of NCBI NO: 8778809 NR Description: T4O12.14 [Arabidopsis thaliana]
  misc_feature (1)..(151): Homolog of NCBI NO: 25404995 NR Description: protein T4O12.15 [imported] - Arabidopsis
  misc_feature (1)..(151): Homolog of NCBI NO: 15222904 NR Description: family II extracellular lipase 6 (EXL6)
MVVWTRKFLKDLYDLGARKFAVMGVMPVGCLPIHRASFGGVFGWCNFLLNRVTEDFNMKLQKGLTSYAVEYDFKDAKFVYVDIYGTLMDLVKNPMAYGFTEAKKACCCMPNAIIPCFHPDKYVFYDFAHPSQKAYEVISKPIVYQIAKGLA

SEQ ID NO: 37622 - protein, 133 aa, Arabidopsis thaliana
  peptide (1)..(133): Ceres Seq. ID no. 12599960
  misc_feature (39)..(112): Pfam Name: GDSL-like Lipase/Acylhydrolase Pfam Description: GDSL-like Lipase/Acylhydrolase
  misc_feature (15)..(116): Homolog of NCBI NO: 25511649 NR Description: T20H2.9 protein - Arabidopsis thaliana
  misc_feature (23)..(91): Homolog of NCBI NO: 15242657 NR Description: lipase/acylhydrolase-like protein; protein id:
  misc_feature (10)..(98): Homolog of NCBI NO: 15219505 NR Description: putative lipase/acylhydrolase; protein id:
  misc_feature (3)..(98): Homolog of NCBI NO: 15220775 NR Description: hypothetical protein; protein id: At1g23500.1
  misc_feature (38)..(91): Homolog of NCBI NO: 25404994 NR Description: protein T4O12.13 [imported] - Arabidopsis
  misc_feature (33)..(91): Homolog of NCBI NO: 25404994 NR Description: protein T4O12.13 [imported] - Arabidopsis
  misc_feature (17)..(91): Homolog of NCBI NO: 15054388 NR Description: family II lipase EXL4 [Arabidopsis thaliana]
  misc_feature (17)..(91): Homolog of NCBI NO: 15222902 NR Description: family II extracellular lipase 4 (EXL4)
  misc_feature (15)..(95): Homolog of NCBI NO: 18410967 NR Description: family II extracellular lipase 5 (EXL5)
  misc_feature (10)..(95): Homolog of NCBI NO: 8778809 NR Description: T4O12.14 [Arabidopsis thaliana]
QKNFGLIFDMFRGKIFVLSLFSIYVLSSAAEKNTSFSALFAFGDSVLDTGNNNFLLTLLKGNYWPYGLSFDYKFPTGRFGNGRVFTDIVAEVYRSKDLYQLIARFVASVLKTLRLAFVLHQVVQELTILHPEH

SEQ ID NO: 37623 - protein, 129 aa, Arabidopsis thaliana
  peptide (1)..(129): Ceres Seq. ID no. 12599961
  misc_feature (1)..(120): Pfam Name: GDSL-like Lipase/Acylhydrolase Pfam Description: GDSL-like Lipase/Acylhydrolase
  misc_feature (1)..(129): Homolog of NCBI NO: 15242657 NR Description: lipase/acylhydrolase-like protein; protein id:
  misc_feature (1)..(129): Homolog of NCBI NO: 15219505 NR Description: putative lipase/acylhydrolase; protein id:
  misc_feature (1)..(129): Homolog of NCBI NO: 15220775 NR Description: hypothetical protein; protein id: At1g23500.1
  misc_feature (1)..(129): Homolog of NCBI NO: 25404994 NR Description: protein T4O12.13 [imported] - Arabidopsis
  misc_feature (1)..(129): Homolog of NCBI NO: 15054388 NR Description: family II lipase EXL4 [Arabidopsis thaliana]
  misc_feature (1)..(129): Homolog of NCBI NO: 15222902 NR Description: family II extracellular lipase 4 (EXL4)
  misc_feature (1)..(129): Homolog of NCBI NO: 18410967 NR Description: family II extracellular lipase 5 (EXL5)
  misc_feature (1)..(129): Homolog of NCBI NO: 8778809 NR Description: T4O12.14 [Arabidopsis thaliana]
  misc_feature (1)..(129): Homolog of NCBI NO: 25404995 NR Description: protein T4O12.15 [imported] - Arabidopsis
  misc_feature (1)..(129): Homolog of NCBI NO: 15222904 NR Description: family II extracellular lipase 6 (EXL6)
MGVMPVGCLPIHRASFGGVFGWCNFLLNRVTEDFNMKLQKGLTSYAVEYDFKDAKFVYVDIYGTLMDLVKNPMAYGFTEAKKACCCMPNAIIPCFHPDKYVFYDFAHPSQKAYEVISKPIVYQIAKGLA

SEQ ID NO: 37624 - DNA, 1225 bp, Arabidopsis thaliana
  misc_feature (1)..(1225): Ceres Seq. ID no. 12384468
  misc_feature: MA Experiment ID: 20000180 Result: Up-regulated in Transcription
  misc_feature: MA Experiment 20000180 PARAMETER Experiment Name: At_Germinating_Seeds_P Parameter: Age (hr) Value: 24 vs. 0
  misc_feature: MA Experiment 20000180 PARAMETER Experiment Name: At_Germinating_Seeds_P Parameter: Tissue Value: Germinating Seeds
  misc_feature: MA Experiment ID: 20000234 Result: Up-regulated in Transcription
  misc_feature: MA Experiment 20000234 PARAMETER Experiment Name: At_Siliques_P Parameter: Age (day) Value: 21
  misc_feature: MA Experiment 20000234 PARAMETER Experiment Name: At_Siliques_P Parameter: Organism Value: A. thaliana
  misc_feature: MA Experiment 20000234 PARAMETER Experiment Name: At_Siliques_P Parameter: Plant Line Value: WS
  misc_feature: MA Experiment 20000234 PARAMETER Experiment Name: At_Siliques_P Parameter: Tissue Value: Less Than 5mm Siliques vs. Whole Plant
  misc_feature: MA Experiment ID: 20000235 Result: Up-regulated in Transcription
  misc_feature: MA Experiment 20000235 PARAMETER Experiment Name: At_Siliques_P Parameter: Age (day) Value: 21
  misc_feature: MA Experiment 20000235 PARAMETER Experiment Name: At_Siliques_P Parameter: Organism Value: A. thaliana
  misc_feature: MA Experiment 20000235 PARAMETER Experiment Name: At_Siliques_P Parameter: Plant Line Value: WS
  misc_feature: MA Experiment 20000235 PARAMETER Experiment Name: At_Siliques_P Parameter: Tissue Value: 5-10mm Siliques vs. Whole Plant
  misc_feature: MA Experiment ID: 20000264 Result: Up-regulated in Transcription
  misc_feature: MA Experiment 20000264 PARAMETER Experiment Name: At_Open_Flower_P Parameter: Age (day) Value: 21
  misc_feature: MA Experiment 20000264 PARAMETER Experiment Name: At_Open_Flower_P Parameter: Plant Line Value: WS
  misc_feature: MA Experiment 20000264 PARAMETER Experiment Name: At_Open_Flower_P Parameter: Tissue Value: Open Flower vs. Whole Plant
  misc_feature: MA Experiment ID: 20000265 Result: Up-regulated in Transcription
  misc_feature: MA Experiment 20000265 PARAMETER Experiment Name: At_Open_Flower_P Parameter: Age (day) Value: 21
  misc_feature: MA Experiment 20000265 PARAMETER Experiment Name: At_Open_Flower_P Parameter: Plant Line Value: WS
  misc_feature: MA Experiment 20000265 PARAMETER Experiment Name: At_Open_Flower_P Parameter: Tissue Value: Closed Flower vs. Whole Plant
  misc_feature: MA Experiment ID: 20000286 Result: Up-regulated in Transcription
  misc_feature: MA Experiment 20000286 PARAMETER Experiment Name: At_Open_Flower_P Parameter: Age (day) Value: 21
  misc_feature: MA Experiment 20000286 PARAMETER Experiment Name: At_Open_Flower_P Parameter: Plant Line Value: WS
  misc_feature: MA Experiment 20000286 PARAMETER Experiment Name: At_Open_Flower_P Parameter: Tissue Value: Half Open vs. Whole Plant
  misc_feature: MA Experiment ID: 20000438 Result: Up-regulated in Transcription
  misc_feature: MA Experiment 20000438 PARAMETER Experiment Name: At_Shoots__P Parameter: Age (day) Value: 14
  misc_feature: MA Experiment 20000438 PARAMETER Experiment Name: At_Shoots__P Parameter: Tissue Value: Shoots vs. Whole Plant
aacccaagatctctccttcttgtttccccagatctgaaatttcaaaagctacccaattttaactcaagactctgaacaacacatctagatccatttccatggcgagcgcctggaaaaaagacaagaaccaaaaacttttatcaccaaagacactaatctcacttcttgtcctttccattatcttcctctcttctctcttcttcttcttctctaactcctctctccaatactccaatccaaatctctccatcaattccccatacccaatccctccttttgattgcttcaaatgtccacaatcaaaacccataatcgcaaacgtcgtcgagaatctcaagtacccttttgtttactctctcgctgatctcggtaatctcccggagaaaccacataagaacattgttaggctacttaaaggtaagccctttaggaaaccagatatctccgcaacgattcaggaggtattggatagtatgagagctagtggtaaaaatgggattgttgttgatgttggagctaatgttggtatggctagctttgctgctgcggttatggggtttaaagttcttgcctttgagcctgtttttgagaatttacagaggatttgtgatgggatttggtttaatagagtttcttctttggttactgtgtttgaagctgctgcttctgacagaacaggggatattaccttccataagttggtaggacggcttgacaatagcgcggtttcggaggtgggagcaaggcttgcattcaagtccaacaaagagatagcagtgcaagtcaaatccatacctcttgataaactaattccaccttctcaacctgttcttcttatcaagatcgacgttcaaggttgggaataccacgttttaaagggtgcgaagaagttgctttcaaggaaaccagcagaagctccttatctaatctatgaggaagatgagagattgctcacggcaagcaatagtagctcgaaagagatacgtgattttcttaaaagcgttggatatagtaagtgtagccagcatgggacagatgcacattgcaccaaggagtgaaagacattggacttaccgacaaatggtaataagatgccatacaagttgaggaatataaggaagatgagcaataggtatttgcagagaaaaacatttagtttataagttgccaaatttggtcagtcatgtttgtttctccttgtaatatgtactcaattttttttggt

SEQ ID NO: 37625 - protein, 319 aa, Arabidopsis thaliana
  peptide (1)..(319): Ceres Seq. ID no. 12384469
  misc_feature (2)..(318): Homolog of NCBI NO: 34896590 NR Description: hypothetical protein [Oryza sativa]
  misc_feature (1)..(319): Homolog of NCBI NO: 18401209 NR Description: expressed protein
  misc_feature (1)..(319): Homolog of NCBI NO: 21593723 NR Description: unknown [Arabidopsis thaliana]
MASAWKKDKNQKLLSPKTLISLLVLSIIFLSSLFFFFSNSSLQYSNPNLSINSPYPIPPFDCFKCPQSKPIIANVVENLKYPFVYSLADLGNLPEKPHKNIVRLLKGKPFRKPDISATIQEVLDSMRASGKNGIVVDVGANVGMASFAAAVMGFKVLAFEPVFENLQRICDGIWFNRVSSLVTVFEAAASDRTGDITFHKLVGRLDNSAVSEVGARLAFKSNKEIAVQVKSIPLDKLIPPSQPVLLIKIDVQGWEYHVLKGAKKLLSRKPAEAPYLIYEEDERLLTASNSSSKEIRDFLKSVGYSKCSQHGTDAHCTKE

SEQ ID NO: 37626 - protein, 194 aa, Arabidopsis thaliana
  peptide (1)..(194): Ceres Seq. ID no. 12384470
  misc_feature (1)..(193): Homolog of NCBI NO: 34896590 NR Description: hypothetical protein [Oryza sativa]
  misc_feature (1)..(194): Homolog of NCBI NO: 18401209 NR Description: expressed protein
  misc_feature (1)..(194): Homolog of NCBI NO: 21593723 NR Description: unknown [Arabidopsis thaliana]
MRASGKNGIVVDVGANVGMASFAAAVMGFKVLAFEPVFENLQRICDGIWFNRVSSLVTVFEAAASDRTGDITFHKLVGRLDNSAVSEVGARLAFKSNKEIAVQVKSIPLDKLIPPSQPVLLIKIDVQGWEYHVLKGAKKLLSRKPAEAPYLIYEEDERLLTASNSSSKEIRDFLKSVGYSKCSQHGTDAHCTKE

SEQ ID NO: 37627 - protein, 176 aa, Arabidopsis thaliana
  peptide (1)..(176): Ceres Seq. ID no. 12384471
  misc_feature (1)..(175): Homolog of NCBI NO: 34896590 NR Description: hypothetical protein [Oryza sativa]
  misc_feature (1)..(176): Homolog of NCBI NO: 18401209 NR Description: expressed protein
  misc_feature (1)..(176): Homolog of NCBI NO: 21593723 NR Description: unknown [Arabidopsis thaliana]
MASFAAAVMGFKVLAFEPVFENLQRICDGIWFNRVSSLVTVFEAAASDRTGDITFHKLVGRLDNSAVSEVGARLAFKSNKEIAVQVKSIPLDKLIPPSQPVLLIKIDVQGWEYHVLKGAKKLLSRKPAEAPYLIYEEDERLLTASNSSSKEIRDFLKSVGYSKCSQHGTDAHCTKE

SEQ ID NO: 37628 - DNA, 1251 bp, Arabidopsis thaliana
  misc_feature (1)..(1251): Ceres Seq. ID no. 12577599
  misc_feature: MA Experiment ID: 108574 Result: Down-regulated in Transcription
  misc_feature: MA Experiment 108574 PARAMETER Experiment Name: At_Wounding__cDNA_P Parameter: Timepoint (hr) Value: 1
  misc_feature: MA Experiment 108574 PARAMETER Experiment Name: At_Wounding__cDNA_P Parameter: Tissue Value: Aerial
  misc_feature: MA Experiment 108574 PARAMETER Experiment Name: At_Wounding__cDNA_P Parameter: Treatment Value: Wounding vs. No Wounding
  misc_feature: MA Experiment ID: 108585 Result: Up-regulated in Transcription
  misc_feature: MA Experiment 108585 PARAMETER Experiment Name: At_5mM_NaNP_cDNA_P Parameter: Timepoint (hr) Value: 6
  misc_feature: MA Experiment 108585 PARAMETER Experiment Name: At_5mM_NaNP_cDNA_P Parameter: Tissue Value: Aerial
  misc_feature: MA Experiment 108585 PARAMETER Experiment Name: At_5mM_NaNP_cDNA_P Parameter: Treatment Value: null
  misc_feature: MA Experiment ID: 108594 Result: Down-regulated in Transcription
  misc_feature: MA Experiment 108594 PARAMETER Experiment Name: At_Ler-rhl_Root_cDNA_P Parameter: Plant Line Value: null
  misc_feature: MA Experiment ID: 108595 Result: Up-regulated in Transcription
  misc_feature: MA Experiment 108595 PARAMETER Experiment Name: At_Ler-pi_Ovule_cDNA_P Parameter: Plant Line Value: null
  misc_feature: MA Experiment ID: 108668 Result: Up-regulated in Transcription
  misc_feature: MA Experiment 108668 PARAMETER Experiment Name: At_2mM_SA_cDNA_P Parameter: Plant Line Value: WS
  misc_feature: MA Experiment 108668 PARAMETER Experiment Name: At_2mM_SA_cDNA_P Parameter: Timepoint (hr) Value: 6
  misc_feature: MA Experiment 108668 PARAMETER Experiment Name: At_2mM_SA_cDNA_P Parameter: Treatment Value: 2mM SA vs. No Treatment
  misc_feature: MA Experiment ID: 20000173 Result: Down-regulated in Transcription
  misc_feature: MA Experiment 20000173 PARAMETER Experiment Name: At_42deg_Heat_P Parameter: Age (day) Value: 14
  misc_feature: MA Experiment 20000173 PARAMETER Experiment Name: At_42deg_Heat_P Parameter: Organism Value: A. thaliana
  misc_feature: MA Experiment 20000173 PARAMETER Experiment Name: At_42deg_Heat_P Parameter: Plant Line Value: WS
  misc_feature: MA Experiment 20000173 PARAMETER Experiment Name: At_42deg_Heat_P Parameter: Temperature (deg C) Value: 42 vs. 22
  misc_feature: MA Experiment 20000173 PARAMETER Experiment Name: At_42deg_Heat_P Parameter: Timepoint (hr) Value: 6
  misc_feature: MA Experiment 20000173 PARAMETER Experiment Name: At_42deg_Heat_P Parameter: Tissue Value: Aerial
  misc_feature: MA Experiment ID: 20000182 Result: Up-regulated in Transcription
  misc_feature: MA Experiment 20000182 PARAMETER Experiment Name: At_2mM_SA_P Parameter: Age (day) Value: 14
  misc_feature: MA Experiment 20000182 PARAMETER Experiment Name: At_2mM_SA_P Parameter: Organism Value: A. thaliana
  misc_feature: MA Experiment 20000182 PARAMETER Experiment Name: At_2mM_SA_P Parameter: Plant Line Value: WS
  misc_feature: MA Experiment 20000182 PARAMETER Experiment Name: At_2mM_SA_P Parameter: Timepoint (hr) Value: 6
  misc_feature: MA Experiment 20000182 PARAMETER Experiment Name: At_2mM_SA_P Parameter: Tissue Value: Aerial
  misc_feature: MA Experiment 20000182 PARAMETER Experiment Name: At_2mM_SA_P Parameter: Treatment Value: 2mM SA vs. No Treatment
  misc_feature: MA Experiment ID: 20000184 Result: Down-regulated in Transcription
  misc_feature: MA Experiment 20000184 PARAMETER Experiment Name: At_Shoots__P Parameter: Age (day) Value: 7
  misc_feature: MA Experiment 20000184 PARAMETER Experiment Name: At_Shoots__P Parameter: Tissue Value: Shoots vs. Whole Plant
  misc_feature: MA Experiment ID: 20000185 Result: Up-regulated in Transcription
  misc_feature: MA Experiment 20000185 PARAMETER Experiment Name: At_Roots__P Parameter: Age (day) Value: 7 vs. 21
  misc_feature: MA Experiment 20000185 PARAMETER Experiment Name: At_Roots__P Parameter: Organism Value: A. thaliana
  misc_feature: MA Experiment 20000185 PARAMETER Experiment Name: At_Roots__P Parameter: Tissue Value: Roots vs. Whole Plant
  misc_feature: MA Experiment ID: 20000227 Result: Down-regulated in Transcription
  misc_feature: MA Experiment 20000227 PARAMETER Experiment Name: At_Root-Tips-vs-Tops_P Parameter: Tissue Value: Root Tips vs. Root Tops
  misc_feature: MA Experiment ID: 20000234 Result: Down-regulated in Transcription
  misc_feature: MA Experiment 20000234 PARAMETER Experiment Name: At_Siliques_P Parameter: Age (day) Value: 21
  misc_feature: MA Experiment 20000234 PARAMETER Experiment Name: At_Siliques_P Parameter: Organism Value: A. thaliana
  misc_feature: MA Experiment 20000234 PARAMETER Experiment Name: At_Siliques_P Parameter: Plant Line Value: WS
  misc_feature: MA Experiment 20000234 PARAMETER Experiment Name: At_Siliques_P Parameter: Tissue Value: Less Than 5mm Siliques vs. Whole Plant
  misc_feature: MA Experiment ID: 20000235 Result: Down-regulated in Transcription
  misc_feature: MA Experiment 20000235 PARAMETER Experiment Name: At_Siliques_P Parameter: Age (day) Value: 21
  misc_feature: MA Experiment 20000235 PARAMETER Experiment Name: At_Siliques_P Parameter: Organism Value: A. thaliana
  misc_feature: MA Experiment 20000235 PARAMETER Experiment Name: At_Siliques_P Parameter: Plant Line Value: WS
  misc_feature: MA Experiment 20000235 PARAMETER Experiment Name: At_Siliques_P Parameter: Tissue Value: 5-10mm Siliques vs. Whole Plant
  misc_feature: MA Experiment ID: 20000264 Result: Down-regulated in Transcription
  misc_feature: MA Experiment 20000264 PARAMETER Experiment Name: At_Open_Flower_P Parameter: Age (day) Value: 21
  misc_feature: MA Experiment 20000264 PARAMETER Experiment Name: At_Open_Flower_P Parameter: Plant Line Value: WS
  misc_feature: MA Experiment 20000264 PARAMETER Experiment Name: At_Open_Flower_P Parameter: Tissue Value: Open Flower vs. Whole Plant
  misc_feature: MA Experiment ID: 20000269 Result: Down-regulated in Transcription
  misc_feature: MA Experiment 20000269 PARAMETER Experiment Name: At_1mM_KNO3_L-vs-H_Roots_P Parameter: Age (day) Value: 7,10,12
  misc_feature: MA Experiment 20000269 PARAMETER Experiment Name: At_1mM_KNO3_L-vs-H_Roots_P Parameter: Organism Value: A. thaliana
  misc_feature: MA Experiment 20000269 PARAMETER Experiment Name: At_1mM_KNO3_L-vs-H_Roots_P Parameter: Plant Line Value: WS
  misc_feature: MA Experiment 20000269 PARAMETER Experiment Name: At_1mM_KNO3_L-vs-H_Roots_P Parameter: Timepoint (day) Value: 7,10,12
  misc_feature: MA Experiment 20000269 PARAMETER Experiment Name: At_1mM_KNO3_L-vs-H_Roots_P Parameter: Tissue Value: Roots
  misc_feature: MA Experiment 20000269 PARAMETER Experiment Name: At_1mM_KNO3_L-vs-H_Roots_P Parameter: Treatment Value: 1mM KNO3 vs. 50mM KNO3
  misc_feature: MA Experiment ID: 20000286 Result: Down-regulated in Transcription
  misc_feature: MA Experiment 20000286 PARAMETER Experiment Name: At_Open_Flower_P Parameter: Age (day) Value: 21
  misc_feature: MA Experiment 20000286 PARAMETER Experiment Name: At_Open_Flower_P Parameter: Plant Line Value: WS
  misc_feature: MA Experiment 20000286 PARAMETER Experiment Name: At_Open_Flower_P Parameter: Tissue Value: Half Open vs. Whole Plant
  misc_feature: MA Experiment ID: 20000308 Result: Up-regulated in Transcription
  misc_feature: MA Experiment 20000308 PARAMETER Experiment Name: At_100mM_NaCl__P Parameter: Age (day) Value: 17
  misc_feature: MA Experiment 20000308 PARAMETER Experiment Name: At_100mM_NaCl__P Parameter: Organism Value: A. thaliana
  misc_feature: MA Experiment 20000308 PARAMETER Experiment Name: At_100mM_NaCl__P Parameter: Plant Line Value: WS
  misc_feature: MA Experiment 20000308 PARAMETER Experiment Name: At_100mM_NaCl__P Parameter: Timepoint (hr) Value: 72
  misc_feature: MA Experiment 20000308 PARAMETER Experiment Name: At_100mM_NaCl__P Parameter: Tissue Value: Whole Plant
  misc_feature: MA Experiment 20000308 PARAMETER Experiment Name: At_100mM_NaCl__P Parameter: Treatment Value: 100mM NaCl vs. No Treatment
  misc_feature: MA Experiment ID: 20000438 Result: Down-regulated in Transcription
  misc_feature: MA Experiment 20000438 PARAMETER Experiment Name: At_Shoots__P Parameter: Age (day) Value: 14
  misc_feature: MA Experiment 20000438 PARAMETER Experiment Name: At_Shoots__P Parameter: Tissue Value: Shoots vs. Whole Plant
  misc_feature: MA Experiment ID: 20000439 Result: Up-regulated in Transcription
  misc_feature: MA Experiment 20000439 PARAMETER Experiment Name: At_Roots__P Parameter: Age (day) Value: 14 vs. 21
  misc_feature: MA Experiment 20000439 PARAMETER Experiment Name: At_Roots__P Parameter: Organism Value: A. thaliana
  misc_feature: MA Experiment 20000439 PARAMETER Experiment Name: At_Roots__P Parameter: Tissue Value: Roots vs. Whole Plant
  misc_feature: MA Experiment ID: 20000453 Result: Up-regulated in Transcription
  misc_feature: MA Experiment 20000453 PARAMETER Experiment Name: At_100uM_ABA_P Parameter: Age (day) Value: 15
  misc_feature: MA Experiment 20000453 PARAMETER Experiment Name: At_100uM_ABA_P Parameter: Organism Value: A. thaliana
  misc_feature: MA Experiment 20000453 PARAMETER Experiment Name: At_100uM_ABA_P Parameter: Plant Line Value: WS
  misc_feature: MA Experiment 20000453 PARAMETER Experiment Name: At_100uM_ABA_P Parameter: Timepoint (hr) Value: 24
  misc_feature: MA Experiment 20000453 PARAMETER Experiment Name: At_100uM_ABA_P Parameter: Tissue Value: Aerial
  misc_feature: MA Experiment 20000453 PARAMETER Experiment Name: At_100uM_ABA_P Parameter: Treatment Value: 100uM ABA vs. No Treatment
  misc_feature: MA Experiment ID: 20000456 Result: Down-regulated in Transcription
  misc_feature: MA Experiment 20000456 PARAMETER Experiment Name: At_100uM_BA_P Parameter: Age (day) Value: 14
  misc_feature: MA Experiment 20000456 PARAMETER Experiment Name: At_100uM_BA_P Parameter: Organism Value: A. thaliana
  misc_feature: MA Experiment 20000456 PARAMETER Experiment Name: At_100uM_BA_P Parameter: Plant Line Value: WS
  misc_feature: MA Experiment 20000456 PARAMETER Experiment Name: At_100uM_BA_P Parameter: Timepoint (hr) Value: 6
  misc_feature: MA Experiment 20000456 PARAMETER Experiment Name: At_100uM_BA_P Parameter: Tissue Value: Aerial
  misc_feature: MA Experiment 20000456 PARAMETER Experiment Name: At_100uM_BA_P Parameter: Treatment Value: 100uM BA vs. No Treatment
  misc_feature: MA Experiment ID: 20000527 Result: Down-regulated in Transcription
  misc_feature: MA Experiment 20000527 PARAMETER Experiment Name: At_10percent_PEG_P Parameter: Age (day) Value: 20
  misc_feature: MA Experiment 20000527 PARAMETER Experiment Name: At_10percent_PEG_P Parameter: Organism Value: A. thaliana
  misc_feature: MA Experiment 20000527 PARAMETER Experiment Name: At_10percent_PEG_P Parameter: Plant Line Value: WS
  misc_feature: MA Experiment 20000527 PARAMETER Experiment Name: At_10percent_PEG_P Parameter: Timepoint (day) Value: 20
  misc_feature: MA Experiment 20000527 PARAMETER Experiment Name: At_10percent_PEG_P Parameter: Tissue Value: Whole Plant
  misc_feature: MA Experiment 20000527 PARAMETER Experiment Name: At_10percent_PEG_P Parameter: Treatment Value: 10percent PEG vs. No Treatment
  misc_feature: MA Experiment ID: 20000794 Result: Down-regulated in Transcription
  misc_feature: MA Experiment 20000794 PARAMETER Experiment Name: At_Petals_P Parameter: Age (day) Value: 23-25 days
  misc_feature: MA Experiment 20000794 PARAMETER Experiment Name: At_Petals_P Parameter: Plant Line Value: WS
  misc_feature: MA Experiment 20000794 PARAMETER Experiment Name: At_Petals_P Parameter: Tissue Value: Petals vs. Whole plant
  misc_feature: MA Experiment ID: 20001450 Result: Down-regulated in Transcription
  misc_feature: MA Experiment 20001450 PARAMETER Experiment Name: At_Far-red-induction_P Parameter: Age (day) Value: 7
  misc_feature: MA Experiment 20001450 PARAMETER Experiment Name: At_Far-red-induction_P Parameter: Light Value: Far-red vs. White
  misc_feature: MA Experiment 20001450 PARAMETER Experiment Name: At_Far-red-induction_P Parameter: Organism Value: A. thaliana
  misc_feature: MA Experiment 20001450 PARAMETER Experiment Name: At_Far-red-induction_P Parameter: Plant Line Value: Columbia
  misc_feature: MA Experiment 20001450 PARAMETER Experiment Name: At_Far-red-induction_P Parameter: Timepoint (hr) Value: 8
  misc_feature: MA Experiment 20001450 PARAMETER Experiment Name: At_Far-red-induction_P Parameter: Tissue Value: Whole Plant
  misc_feature: MA Experiment ID: 20001451 Result: Up-regulated in Transcription
  misc_feature: MA Experiment 20001451 PARAMETER Experiment Name: At_Far-red-induction_P Parameter: Age (day) Value: 7
  misc_feature: MA Experiment 20001451 PARAMETER Experiment Name: At_Far-red-induction_P Parameter: Light Value: Far-red vs. White
  misc_feature: MA Experiment 20001451 PARAMETER Experiment Name: At_Far-red-induction_P Parameter: Organism Value: A. thaliana
  misc_feature: MA Experiment 20001451 PARAMETER Experiment Name: At_Far-red-induction_P Parameter: Plant Line Value: Columbia
  misc_feature: MA Experiment 20001451 PARAMETER Experiment Name: At_Far-red-induction_P Parameter: Timepoint (hr) Value: 24
  misc_feature: MA Experiment 20001451 PARAMETER Experiment Name: At_Far-red-induction_P Parameter: Tissue Value: Whole Plant
  misc_feature: MA Experiment ID: 20001554 Result: Down-regulated in Transcription
  misc_feature: MA Experiment 20001554 PARAMETER Experiment Name: At_Drought_Soil_Dry_P Parameter: Age (day) Value: 21
  misc_feature: MA Experiment 20001554 PARAMETER Experiment Name: At_Drought_Soil_Dry_P Parameter: Organism Value: A. thaliana
  misc_feature: MA Experiment 20001554 PARAMETER Experiment Name: At_Drought_Soil_Dry_P Parameter: Plant Line Value: WS
  misc_feature: MA Experiment 20001554 PARAMETER Experiment Name: At_Drought_Soil_Dry_P Parameter: Post Timepoint (hr) Value: None
  misc_feature: MA Experiment 20001554 PARAMETER Experiment Name: At_Drought_Soil_Dry_P Parameter: Post-Treatment Value: None
  misc_feature: MA Experiment 20001554 PARAMETER Experiment Name: At_Drought_Soil_Dry_P Parameter: Timepoint (day) Value: 7
  misc_feature: MA Experiment 20001554 PARAMETER Experiment Name: At_Drought_Soil_Dry_P Parameter: Treatment Value: Drought vs. No Drought
  misc_feature: MA Experiment ID: 20001555 Result: Down-regulated in Transcription
  misc_feature: MA Experiment 20001555 PARAMETER Experiment Name: At_Drought_Soil_Dry_P Parameter: Age (day) Value: 24
  misc_feature: MA Experiment 20001555 PARAMETER Experiment Name: At_Drought_Soil_Dry_P Parameter: Organism Value: A. thaliana
  misc_feature: MA Experiment 20001555 PARAMETER Experiment Name: At_Drought_Soil_Dry_P Parameter: Plant Line Value: WS
  misc_feature: MA Experiment 20001555 PARAMETER Experiment Name: At_Drought_Soil_Dry_P Parameter: Post Timepoint (hr) Value: None
  misc_feature: MA Experiment 20001555 PARAMETER Experiment Name: At_Drought_Soil_Dry_P Parameter: Post-Treatment Value: None
  misc_feature: MA Experiment 20001555 PARAMETER Experiment Name: At_Drought_Soil_Dry_P Parameter: Timepoint (day) Value: 10
  misc_feature: MA Experiment 20001555 PARAMETER Experiment Name: At_Drought_Soil_Dry_P Parameter: Treatment Value: Drought vs. No Drought
  misc_feature: MA Experiment ID: 20001556 Result: Down-regulated in Transcription
  misc_feature: MA Experiment 20001556 PARAMETER Experiment Name: At_Drought_Soil_Dry_P Parameter: Age (day) Value: 26
  misc_feature: MA Experiment 20001556 PARAMETER Experiment Name: At_Drought_Soil_Dry_P Parameter: Organism Value: A. thaliana
  misc_feature: MA Experiment 20001556 PARAMETER Experiment Name: At_Drought_Soil_Dry_P Parameter: Plant Line Value: WS
  misc_feature: MA Experiment 20001556 PARAMETER Experiment Name: At_Drought_Soil_Dry_P Parameter: Post Timepoint (hr) Value: None
  misc_feature: MA Experiment 20001556 PARAMETER Experiment Name: At_Drought_Soil_Dry_P Parameter: Post-Treatment Value: None
  misc_feature: MA Experiment 20001556 PARAMETER Experiment Name: At_Drought_Soil_Dry_P Parameter: Timepoint (day) Value: 12
  misc_feature: MA Experiment 20001556 PARAMETER Experiment Name: At_Drought_Soil_Dry_P Parameter: Treatment Value: Drought vs. No Drought
  misc_feature: MA Experiment ID: 20001557 Result: Down-regulated in Transcription
  misc_feature: MA Experiment 20001557 PARAMETER Experiment Name: At_Drought_Soil_Dry_P Parameter: Age (day) Value: 27
  misc_feature: MA Experiment 20001557 PARAMETER Experiment Name: At_Drought_Soil_Dry_P Parameter: Organism Value: A. thaliana
  misc_feature: MA Experiment 20001557 PARAMETER Experiment Name: At_Drought_Soil_Dry_P Parameter: Plant Line Value: WS
  misc_feature: MA Experiment 20001557 PARAMETER Experiment Name: At_Drought_Soil_Dry_P Parameter: Post Timepoint (hr) Value: 3
  misc_feature: MA Experiment 20001557 PARAMETER Experiment Name: At_Drought_Soil_Dry_P Parameter: Post-Treatment Value: Re-Water vs. No Drought
  misc_feature: MA Experiment 20001557 PARAMETER Experiment Name: At_Drought_Soil_Dry_P Parameter: Timepoint (day) Value: 13
  misc_feature: MA Experiment 20001557 PARAMETER Experiment Name: At_Drought_Soil_Dry_P Parameter: Treatment Value: Drought vs. No Drought
  misc_feature: MA Experiment ID: 20001558 Result: Down-regulated in Transcription
  misc_feature: MA Experiment 20001558 PARAMETER Experiment Name: At_Drought_Soil_Dry_P Parameter: Age (day) Value: 27
  misc_feature: MA Experiment 20001558 PARAMETER Experiment Name: At_Drought_Soil_Dry_P Parameter: Organism Value: A. thaliana
  misc_feature: MA Experiment 20001558 PARAMETER Experiment Name: At_Drought_Soil_Dry_P Parameter: Plant Line Value: WS
  misc_feature: MA Experiment 20001558 PARAMETER Experiment Name: At_Drought_Soil_Dry_P Parameter: Post Timepoint (hr) Value: 6
  misc_feature: MA Experiment 20001558 PARAMETER Experiment Name: At_Drought_Soil_Dry_P Parameter: Post-Treatment Value: Re-Water vs. No Drought
  misc_feature: MA Experiment 20001558 PARAMETER Experiment Name: At_Drought_Soil_Dry_P Parameter: Timepoint (day) Value: 13
  misc_feature: MA Experiment 20001558 PARAMETER Experiment Name: At_Drought_Soil_Dry_P Parameter: Treatment Value: Drought vs. No Drought
  misc_feature: MA Experiment ID: 20001559 Result: Down-regulated in Transcription
  misc_feature: MA Experiment 20001559 PARAMETER Experiment Name: At_Drought_Soil_Dry_P Parameter: Age (day) Value: 28
  misc_feature: MA Experiment 20001559 PARAMETER Experiment Name: At_Drought_Soil_Dry_P Parameter: Organism Value: A. thaliana
  misc_feature: MA Experiment 20001559 PARAMETER Experiment Name: At_Drought_Soil_Dry_P Parameter: Plant Line Value: WS
  misc_feature: MA Experiment 20001559 PARAMETER Experiment Name: At_Drought_Soil_Dry_P Parameter: Post Timepoint (hr) Value: 29
  misc_feature: MA Experiment 20001559 PARAMETER Experiment Name: At_Drought_Soil_Dry_P Parameter: Post-Treatment Value: Re-Water vs. No Drought
  misc_feature: MA Experiment 20001559 PARAMETER Experiment Name: At_Drought_Soil_Dry_P Parameter: Timepoint (day) Value: 14
  misc_feature: MA Experiment 20001559 PARAMETER Experiment Name: At_Drought_Soil_Dry_P Parameter: Treatment Value: Drought vs. No Drought
  misc_feature: MA Experiment ID: 20001560 Result: Down-regulated in Transcription
  misc_feature: MA Experiment 20001560 PARAMETER Experiment Name: At_Drought_Soil_Dry_P Parameter: Age (day) Value: 28
  misc_feature: MA Experiment 20001560 PARAMETER Experiment Name: At_Drought_Soil_Dry_P Parameter: Organism Value: A. thaliana
  misc_feature: MA Experiment 20001560 PARAMETER Experiment Name: At_Drought_Soil_Dry_P Parameter: Plant Line Value: WS
  misc_feature: MA Experiment 20001560 PARAMETER Experiment Name: At_Drought_Soil_Dry_P Parameter: Post Timepoint (hr) Value: None
  misc_feature: MA Experiment 20001560 PARAMETER Experiment Name: At_Drought_Soil_Dry_P Parameter: Post-Treatment Value: None
  misc_feature: MA Experiment 20001560 PARAMETER Experiment Name: At_Drought_Soil_Dry_P Parameter: Timepoint (day) Value: 14
  misc_feature: MA Experiment 20001560 PARAMETER Experiment Name: At_Drought_Soil_Dry_P Parameter: Treatment Value: Drought vs. No Drought
atacatatcaatgttaatttgtatataaggagctaagaacaaacccaattaggcaactagcaattgctaaaacacgtaagatctcaaatatgaccacgttattcctccttattgctctattcatcacaaccatcctcaacccaacaagtggagaatcagtaggtgtatgctatggaatgatggggaacaaccttccttctcaatcagacacaatcgctctctttagacaaaacaacatccgacgtgttagactctacgatccaaaccaagccgctttaaacgctcttagaaacacgggtatcgaagtcatcatcggcgttccaaacaccgatcttcgttcactcactaacccttcttccgctagatcatggctccaaaacaacgtcctcaactattaccccgccgttagcttcaagtacatcgccgtaggtaacgaagtatctccgtcgaacggcggtgatgttgtgctccctgccatgcgtaacgtttacgatgctctaagaggtgcaaatcttcaagatcgtattaaagtttctaccgccattgatatgactttgattggaaactctttccctccttcctccggagagtttcgtggtgacgttagatggtatatcgatcccgtcatcgggtttcttacgagtacgaactcagcgttactagccaacatctatccttacttcagctacgttgacaatccacgtgacatatctctctcttacgctctcttcacttctccttccgtcgtcgtatgggacggctctcgtggctaccaaaacctctttgacgctttacttgacgttgtttactctgccgttgaacgctcaggcggtggatctctcccagtggttgtttccgagagcggatggccttctaacggtggaaacgccgcgagtttcgataacgcgcgagctttttacacgaatcttgcgtcgcgtgtgagagagaacagaggaacaccgaagagacctggaagaggagtggaaacgtatttgttcgctatgtttgatgagaatcaaaagagtcctgagatcgagaagaattttggtttgttttttcctaataaacaaccaaaatttccgatcacattctctgccgcgagagacggtacggcggttgagtgatgattttatatgctgagatttatgtgaataattgggagattatcccataaaaggttccaaataaagacaaatttcaaataaaacctgttagtccaagttaaattaaatactcggctttgttttggtc

SEQ ID NO: 37629 - protein, 344 aa, Arabidopsis thaliana; identical to SEQ ID NO: 26618
  peptide (1)..(344): Ceres Seq. ID no. 12577600
  misc_feature (24)..(295): Pfam Name: Glycosyl hydrolases family 17 Pfam Description: Glycosyl hydrolases family 17
  misc_feature (1)..(338): Homolog of NCBI NO: 4883425 NR Description: glucan-endo-1,3-beta-glucosidase [Cicer arietinum]
  misc_feature (1)..(340): Homolog of NCBI NO: 7447979 NR Description: 1,3-beta-glucanase (EC 3.2.1.-), acidic - alfalfa
  misc_feature (1)..(344): Homolog of NCBI NO: 1169445 NR Description: GLUCAN ENDO-1,3-BETA-GLUCOSIDASE PRECURSOR ((1-
  misc_feature (24)..(334): Homolog of NCBI NO: 10946499 NR Description: beta-1,3-glucanase [Hevea brasiliensis]
  misc_feature (1)..(334): Homolog of NCBI NO: 4469175 NR Description: beta-1,3-glucanase [Hevea brasiliensis]
  misc_feature (1)..(338): Homolog of NCBI NO: 22550395 NR Description: beta-1,3-glucanase [Vitis vinifera]
  misc_feature (2)..(339): Homolog of NCBI NO: 1706547 NR Description: Glucan endo-1,3-beta-glucosidase, basic vacuolar
  misc_feature (1)..(339): Homolog of NCBI NO: 32765543 NR Description: beta-1,3-glucanase [Hevea brasiliensis]
  misc_feature (1)..(302): Homolog of NCBI NO: 15234880 NR Description: glycosyl hydrolase family 17
  misc_feature (1)..(344): Homolog of NCBI NO: 17381238 NR Description: AT4g16260/dl4170c [Arabidopsis thaliana]

SEQ ID NO: 37630 - protein, 315 aa, Arabidopsis thaliana; identical to SEQ ID NO: 26619
  peptide (1)..(315): Ceres Seq. ID no. 12577601
  misc_feature (1)..(266): Pfam Name: Glycosyl hydrolases family 17 Pfam Description: Glycosyl hydrolases family 17
  misc_feature (1)..(309): Homolog of NCBI NO: 4883425 NR Description: glucan-endo-1,3-beta-glucosidase [Cicer arietinum]
  misc_feature (1)..(311): Homolog of NCBI NO: 7447979 NR Description: 1,3-beta-glucanase (EC 3.2.1.-), acidic - alfalfa
  misc_feature (1)..(315): Homolog of NCBI NO: 1169445 NR Description: GLUCAN ENDO-1,3-BETA-GLUCOSIDASE PRECURSOR ((1-
  misc_feature (1)..(305): Homolog of NCBI NO: 10946499 NR Description: beta-1,3-glucanase [Hevea brasiliensis]
  misc_feature (1)..(305): Homolog of NCBI NO: 4469175 NR Description: beta-1,3-glucanase [Hevea brasiliensis]
  misc_feature (1)..(309): Homolog of NCBI NO: 22550395 NR Description: beta-1,3-glucanase [Vitis vinifera]
  misc_feature (1)..(310): Homolog of NCBI NO: 1706547 NR Description: Glucan endo-1,3-beta-glucosidase, basic vacuolar
  misc_feature (1)..(310): Homolog of NCBI NO: 32765543 NR Description: beta-1,3-glucanase [Hevea brasiliensis]
  misc_feature (1)..(273): Homolog of NCBI NO: 15234880 NR Description: glycosyl hydrolase family 17
  misc_feature (1)..(315): Homolog of NCBI NO: 17381238 NR Description: AT4g16260/dl4170c [Arabidopsis thaliana]

SEQ ID NO: 37631 - protein, 314 aa, Arabidopsis thaliana; identical to SEQ ID NO: 26620
  peptide (1)..(314): Ceres Seq. ID no. 12577602
  misc_feature (1)..(265): Pfam Name: Glycosyl hydrolases family 17 Pfam Description: Glycosyl hydrolases family 17
  misc_feature (1)..(308): Homolog of NCBI NO: 4883425 NR Description: glucan-endo-1,3-beta-glucosidase [Cicer arietinum]
  misc_feature (1)..(310): Homolog of NCBI NO: 7447979 NR Description: 1,3-beta-glucanase (EC 3.2.1.-), acidic - alfalfa
  misc_feature (1)..(314): Homolog of NCBI NO: 1169445 NR Description: GLUCAN ENDO-1,3-BETA-GLUCOSIDASE PRECURSOR ((1-
  misc_feature (1)..(304): Homolog of NCBI NO: 10946499 NR Description: beta-1,3-glucanase [Hevea brasiliensis]
  misc_feature (1)..(304): Homolog of NCBI NO: 4469175 NR Description: beta-1,3-glucanase [Hevea brasiliensis]
  misc_feature (1)..(308): Homolog of NCBI NO: 22550395 NR Description: beta-1,3-glucanase [Vitis vinifera]
  misc_feature (1)..(309): Homolog of NCBI NO: 1706547 NR Description: Glucan endo-1,3-beta-glucosidase, basic vacuolar
  misc_feature (1)..(309): Homolog of NCBI NO: 32765543 NR Description: beta-1,3-glucanase [Hevea brasiliensis]
  misc_feature (1)..(272): Homolog of NCBI NO: 15234880 NR Description: glycosyl hydrolase family 17
  misc_feature (1)..(314): Homolog of NCBI NO: 17381238 NR Description: AT4g16260/dl4170c [Arabidopsis thaliana]

SEQ ID NO: 37632 - DNA, 584 bp, Arabidopsis thaliana
  misc_feature (1)..(584): Ceres Seq. ID no. 12326973
  misc_feature: MA Experiment ID: 108569 Result: Down-regulated in Transcription
  misc_feature: MA Experiment 108569 PARAMETER Experiment Name: At_0.001%_MeJA__cDNA_P Parameter: Timepoint (hr) Value: 6
  misc_feature: MA Experiment 108569 PARAMETER Experiment Name: At_0.001%_MeJA__cDNA_P Parameter: Tissue Value: Aerial
  misc_feature: MA Experiment 108569 PARAMETER Experiment Name: At_0.001%_MeJA__cDNA_P Parameter: Treatment Value: 0.001% MeJA vs. No Treatment
  misc_feature: MA Experiment ID: 108577 Result: Up-regulated in Transcription
  misc_feature: MA Experiment 108577 PARAMETER Experiment Name: At_42deg_Heat_cDNA_P Parameter: Temperature (deg C) Value: 42 vs. 22
  misc_feature: MA Experiment 108577 PARAMETER Experiment Name: At_42deg_Heat_cDNA_P Parameter: Timepoint (hr) Value: 6
  misc_feature: MA Experiment 108577 PARAMETER Experiment Name: At_42deg_Heat_cDNA_P Parameter: Tissue Value: Aerial
  misc_feature: MA Experiment ID: 20000227 Result: Down-regulated in Transcription
  misc_feature: MA Experiment 20000227 PARAMETER Experiment Name: At_Root-Tips-vs-Tops_P Parameter: Tissue Value: Root Tips vs. Root Tops
  misc_feature: MA Experiment ID: 20000234 Result: Down-regulated in Transcription
  misc_feature: MA Experiment 20000234 PARAMETER Experiment Name: At_Siliques_P Parameter: Age (day) Value: 21
  misc_feature: MA Experiment 20000234 PARAMETER Experiment Name: At_Siliques_P Parameter: Organism Value: A. thaliana
  misc_feature: MA Experiment 20000234 PARAMETER Experiment Name: At_Siliques_P Parameter: Plant Line Value: WS
  misc_feature: MA Experiment 20000234 PARAMETER Experiment Name: At_Siliques_P Parameter: Tissue Value: Less Than 5mm Siliques vs. Whole Plant
  misc_feature: MA Experiment ID: 20000438 Result: Down-regulated in Transcription
  misc_feature: MA Experiment 20000438 PARAMETER Experiment Name: At_Shoots__P Parameter: Age (day) Value: 14
  misc_feature: MA Experiment 20000438 PARAMETER Experiment Name: At_Shoots__P Parameter: Tissue Value: Shoots vs. Whole Plant
  misc_feature: MA Experiment ID: 20000495 Result: Down-regulated in Transcription
  misc_feature: MA Experiment 20000495 PARAMETER Experiment Name: At_Guard_Cells_P Parameter: Harvest Date Value: 8/2/2002
  misc_feature: MA Experiment 20000495 PARAMETER Experiment Name: At_Guard_Cells_P Parameter: Organism Value: A. thaliana
  misc_feature: MA Experiment 20000495 PARAMETER Experiment Name: At_Guard_Cells_P Parameter: Tissue Value: Guard Cells vs. Leaves
  misc_feature: MA Experiment ID: 20000794 Result: Up-regulated in Transcription
  misc_feature: MA Experiment 20000794 PARAMETER Experiment Name: At_Petals_P Parameter: Age (day) Value: 23-25 days
  misc_feature: MA Experiment 20000794 PARAMETER Experiment Name: At_Petals_P Parameter: Plant Line Value: WS
  misc_feature: MA Experiment 20000794 PARAMETER Experiment Name: At_Petals_P Parameter: Tissue Value: Petals vs. Whole plant
  misc_feature: MA Experiment ID: 20001451 Result: Down-regulated in Transcription
  misc_feature: MA Experiment 20001451 PARAMETER Experiment Name: At_Far-red-induction_P Parameter: Age (day) Value: 7
  misc_feature: MA Experiment 20001451 PARAMETER Experiment Name: At_Far-red-induction_P Parameter: Light Value: Far-red vs. White
  misc_feature: MA Experiment 20001451 PARAMETER Experiment Name: At_Far-red-induction_P Parameter: Organism Value: A. thaliana
  misc_feature: MA Experiment 20001451 PARAMETER Experiment Name: At_Far-red-induction_P Parameter: Plant Line Value: Columbia
  misc_feature: MA Experiment 20001451 PARAMETER Experiment Name: At_Far-red-induction_P Parameter: Timepoint (hr) Value: 24
  misc_feature: MA Experiment 20001451 PARAMETER Experiment Name: At_Far-red-induction_P Parameter: Tissue Value: Whole Plant
  misc_feature: MA Experiment ID: 20001560 Result: Down-regulated in Transcription
  misc_feature: MA Experiment 20001560 PARAMETER Experiment Name: At_Drought_Soil_Dry_P Parameter: Age (day) Value: 28
  misc_feature: MA Experiment 20001560 PARAMETER Experiment Name: At_Drought_Soil_Dry_P Parameter: Organism Value: A. thaliana
  misc_feature: MA Experiment 20001560 PARAMETER Experiment Name: At_Drought_Soil_Dry_P Parameter: Plant Line Value: WS
  misc_feature: MA Experiment 20001560 PARAMETER Experiment Name: At_Drought_Soil_Dry_P Parameter: Post Timepoint (hr) Value: None
  misc_feature: MA Experiment 20001560 PARAMETER Experiment Name: At_Drought_Soil_Dry_P Parameter: Post-Treatment Value: None
  misc_feature: MA Experiment 20001560 PARAMETER Experiment Name: At_Drought_Soil_Dry_P Parameter: Timepoint (day) Value: 14
  misc_feature: MA Experiment 20001560 PARAMETER Experiment Name: At_Drought_Soil_Dry_P Parameter: Treatment Value: Drought vs. No Drought
tcaattaacataaccttcgccgtcgatgaagctttcccttcaattcccactaccttcagcgtcgcaacgaaacaacactacgacgtaaaaccaatccaccatgaagtttatgacggagaaaggaagatatacgacatcagccaccagtacacgccggagttgccggtttgggagtcttcagaaggactagggaactttcttagacttgccgtgagtatgaagaatggatccgatgctaatatctcgaagatggaactatctgttcactctggaactcatgttgatgcaccaggccatttccatgaccattattatgagtctggttttgatactgattcacttgatcttcaaatccttaatggtaaacatttttggaactcttttttttttttttttttaagtagctagtgatcgtttttgaaattggtttctgtgaatttaatttataggtcctgctttattggttgatgttccaagagataagaacatttcaggtttgttgagagttttctaacattgaaatttttacaaaatcttcattaaatgtttgttacaaaatttttgtgtaatgatttggttgttgt

SEQ ID NO: 37633 - protein, 135 aa, Arabidopsis thaliana
  peptide (1)..(135): Ceres Seq. ID no. 12326974
  misc_feature (43)..(121): Pfam Name: Putative cyclase Pfam Description: Putative cyclase
  misc_feature (11)..(121): Homolog of NCBI NO: 35215089 NR Description: hypothetical protein [Oryza sativa (japonica
  misc_feature (1)..(121): Homolog of NCBI NO: 18418598 NR Description: putative protein
  misc_feature (1)..(121): Homolog of NCBI NO: 7486023 NR Description: hypothetical protein F23E12.220 - Arabidopsis
  misc_feature (28)..(121): Homolog of NCBI NO: 18418393 NR Description: putative protein
  misc_feature (28)..(121): Homolog of NCBI NO: 7486287 NR Description: hypothetical protein F28A23.60 - Arabidopsis
  misc_feature (1)..(121): Homolog of NCBI NO: 15219416 NR Description: hypothetical protein; protein id: At1g44542.1
SINITFAVDEAFPSIPTTFSVATKQHYDVKPIHHEVYDGERKIYDISHQYTPELPVWESSEGLGNFLRLAVSMKNGSDANISKMELSVHSGTHVDAPGHFHDHYYESGFDTDSLDLQILNGKHFWNSFFFFFLSS

SEQ ID NO: 37634 - DNA, 1688 bp, Arabidopsis thaliana
  misc_feature (1)..(1688): Ceres Seq. ID no. 12327466
  misc_feature: MA Experiment ID: 108576 Result: Down-regulated in Transcription
  misc_feature: MA Experiment 108576 PARAMETER Experiment Name: At_42deg_Heat_cDNA_P Parameter: Temperature (deg C) Value: 42 vs. 22
  misc_feature: MA Experiment 108576 PARAMETER Experiment Name: At_42deg_Heat_cDNA_P Parameter: Timepoint (hr) Value: 1
  misc_feature: MA Experiment 108576 PARAMETER Experiment Name: At_42deg_Heat_cDNA_P Parameter: Tissue Value: Aerial
  misc_feature: MA Experiment ID: 108668 Result: Down-regulated in Transcription
  misc_feature: MA Experiment 108668 PARAMETER Experiment Name: At_2mM_SA_cDNA_P Parameter: Plant Line Value: WS
  misc_feature: MA Experiment 108668 PARAMETER Experiment Name: At_2mM_SA_cDNA_P Parameter: Timepoint (hr) Value: 6
  misc_feature: MA Experiment 108668 PARAMETER Experiment Name: At_2mM_SA_cDNA_P Parameter: Treatment Value: 2mM SA vs. No Treatment
  misc_feature: MA Experiment ID: 20000179 Result: Up-regulated in Transcription
  misc_feature: MA Experiment 20000179 PARAMETER Experiment Name: At_Germinating_Seeds_P Parameter: Age (hr) Value: 6 vs. 0
  misc_feature: MA Experiment 20000179 PARAMETER Experiment Name: At_Germinating_Seeds_P Parameter: Tissue Value: Germinating Seeds
  misc_feature: MA Experiment ID: 20000182 Result: Down-regulated in Transcription
  misc_feature: MA Experiment 20000182 PARAMETER Experiment Name: At_2mM_SA_P Parameter: Age (day) Value: 14
  misc_feature: MA Experiment 20000182 PARAMETER Experiment Name: At_2mM_SA_P Parameter: Organism Value: A. thaliana
  misc_feature: MA Experiment 20000182 PARAMETER Experiment Name: At_2mM_SA_P Parameter: Plant Line Value: WS
  misc_feature: MA Experiment 20000182 PARAMETER Experiment Name: At_2mM_SA_P Parameter: Timepoint (hr) Value: 6
  misc_feature: MA Experiment 20000182 PARAMETER Experiment Name: At_2mM_SA_P Parameter: Tissue Value: Aerial
  misc_feature: MA Experiment 20000182 PARAMETER Experiment Name: At_2mM_SA_P Parameter: Treatment Value: 2mM SA vs. No Treatment
  misc_feature: MA Experiment ID: 20000185 Result: Down-regulated in Transcription
  misc_feature: MA Experiment 20000185 PARAMETER Experiment Name: At_Roots__P Parameter: Age (day) Value: 7 vs. 21
  misc_feature: MA Experiment 20000185 PARAMETER Experiment Name: At_Roots__P Parameter: Organism Value: A. thaliana
  misc_feature: MA Experiment 20000185 PARAMETER Experiment Name: At_Roots__P Parameter: Tissue Value: Roots vs. Whole Plant
  misc_feature: MA Experiment ID: 20000227 Result: Up-regulated in Transcription
  misc_feature: MA Experiment 20000227 PARAMETER Experiment Name: At_Root-Tips-vs-Tops_P Parameter: Tissue Value: Root Tips vs. Root Tops
  misc_feature: MA Experiment ID: 20000234 Result: Up-regulated in Transcription
  misc_feature: MA Experiment 20000234 PARAMETER Experiment Name: At_Siliques_P Parameter: Age (day) Value: 21
  misc_feature: MA Experiment 20000234 PARAMETER Experiment Name: At_Siliques_P Parameter: Organism Value: A. thaliana
  misc_feature: MA Experiment 20000234 PARAMETER Experiment Name: At_Siliques_P Parameter: Plant Line Value: WS
  misc_feature: MA Experiment 20000234 PARAMETER Experiment Name: At_Siliques_P Parameter: Tissue Value: Less Than 5mm Siliques vs. Whole Plant
  misc_feature: MA Experiment ID: 20000265 Result: Up-regulated in Transcription
  misc_feature: MA Experiment 20000265 PARAMETER Experiment Name: At_Open_Flower_P Parameter: Age (day) Value: 21
  misc_feature: MA Experiment 20000265 PARAMETER Experiment Name: At_Open_Flower_P Parameter: Plant Line Value: WS
  misc_feature: MA Experiment 20000265 PARAMETER Experiment Name: At_Open_Flower_P Parameter: Tissue Value: Closed Flower vs. Whole Plant
  misc_feature: MA Experiment ID: 20000496 Result: Up-regulated in Transcription
  misc_feature: MA Experiment 20000496 PARAMETER Experiment Name: At_Guard_Cells_P Parameter: Harvest Date Value: 7/19/2002
  misc_feature: MA Experiment 20000496 PARAMETER Experiment Name: At_Guard_Cells_P Parameter: Organism Value: Canola
  misc_feature: MA Experiment 20000496 PARAMETER Experiment Name: At_Guard_Cells_P Parameter: Tissue Value: Guard Cells vs. Leaves
  misc_feature: MA Experiment ID: 20000794 Result: Down-regulated in Transcription
  misc_feature: MA Experiment 20000794 PARAMETER Experiment Name: At_Petals_P Parameter: Age (day) Value: 23-25 days
  misc_feature: MA Experiment 20000794 PARAMETER Experiment Name: At_Petals_P Parameter: Plant Line Value: WS
  misc_feature: MA Experiment 20000794 PARAMETER Experiment Name: At_Petals_P Parameter: Tissue Value: Petals vs. Whole plant
  misc_feature: MA Experiment ID: 20001558 Result: Up-regulated in Transcription
  misc_feature: MA Experiment 20001558 PARAMETER Experiment Name: At_Drought_Soil_Dry_P Parameter: Age (day) Value: 27
  misc_feature: MA Experiment 20001558 PARAMETER Experiment Name: At_Drought_Soil_Dry_P Parameter: Organism Value: A. thaliana
  misc_feature: MA Experiment 20001558 PARAMETER Experiment Name: At_Drought_Soil_Dry_P Parameter: Plant Line Value: WS
  misc_feature: MA Experiment 20001558 PARAMETER Experiment Name: At_Drought_Soil_Dry_P Parameter: Post Timepoint (hr) Value: 6
  misc_feature: MA Experiment 20001558 PARAMETER Experiment Name: At_Drought_Soil_Dry_P Parameter: Post-Treatment Value: Re-Water vs. No Drought
  misc_feature: MA Experiment 20001558 PARAMETER Experiment Name: At_Drought_Soil_Dry_P Parameter: Timepoint (day) Value: 13
  misc_feature: MA Experiment 20001558 PARAMETER Experiment Name: At_Drought_Soil_Dry_P Parameter: Treatment Value: Drought vs. No Drought
  misc_feature: MA Experiment ID: 20001560 Result: Up-regulated in Transcription
  misc_feature: MA Experiment 20001560 PARAMETER Experiment Name: At_Drought_Soil_Dry_P Parameter: Age (day) Value: 28
  misc_feature: MA Experiment 20001560 PARAMETER Experiment Name: At_Drought_Soil_Dry_P Parameter: Organism Value: A. thaliana
  misc_feature: MA Experiment 20001560 PARAMETER Experiment Name: At_Drought_Soil_Dry_P Parameter: Plant Line Value: WS
  misc_feature: MA Experiment 20001560 PARAMETER Experiment Name: At_Drought_Soil_Dry_P Parameter: Post Timepoint (hr) Value: None
  misc_feature: MA Experiment 20001560 PARAMETER Experiment Name: At_Drought_Soil_Dry_P Parameter: Post-Treatment Value: None
  misc_feature: MA Experiment 20001560 PARAMETER Experiment Name: At_Drought_Soil_Dry_P Parameter: Timepoint (day) Value: 14
  misc_feature: MA Experiment 20001560 PARAMETER Experiment Name: At_Drought_Soil_Dry_P Parameter: Treatment Value: Drought vs. No Drought
  misc_feature: MA Experiment ID: 20001904 Result: Down-regulated in Transcription
  misc_feature: MA Experiment 20001904 PARAMETER Experiment Name: At_Drought_Reproduction_P Parameter: Age (day) Value: 37
  misc_feature: MA Experiment 20001904 PARAMETER Experiment Name: At_Drought_Reproduction_P Parameter: Organism Value: A. thaliana
  misc_feature: MA Experiment 20001904 PARAMETER Experiment Name: At_Drought_Reproduction_P Parameter: Plant Line Value: WS
  misc_feature: MA Experiment 20001904 PARAMETER Experiment Name: At_Drought_Reproduction_P Parameter: Timepoint (day) Value: 7
  misc_feature: MA Experiment 20001904 PARAMETER Experiment Name: At_Drought_Reproduction_P Parameter: Tissue Value: Rosettes
  misc_feature: MA Experiment 20001904 PARAMETER Experiment Name: At_Drought_Reproduction_P Parameter: Treatment Value: Drought vs. No Drought
  misc_feature: MA Experiment ID: 20001911 Result: Down-regulated in Transcription
  misc_feature: MA Experiment 20001911 PARAMETER Experiment Name: At_Drought_Reproduction_P Parameter: Age (day) Value: 40
  misc_feature: MA Experiment 20001911 PARAMETER Experiment Name: At_Drought_Reproduction_P Parameter: Organism Value: A. thaliana
  misc_feature: MA Experiment 20001911 PARAMETER Experiment Name: At_Drought_Reproduction_P Parameter: Plant Line Value: WS
  misc_feature: MA Experiment 20001911 PARAMETER Experiment Name: At_Drought_Reproduction_P Parameter: Timepoint (day) Value: 10
  misc_feature: MA Experiment 20001911 PARAMETER Experiment Name: At_Drought_Reproduction_P Parameter: Tissue Value: Flowers
  misc_feature: MA Experiment 20001911 PARAMETER Experiment Name: At_Drought_Reproduction_P Parameter: Treatment Value: Drought vs. No Drought
aacaccactctctctttctctgtgtctccttcaaatcttcatctctctctccatctctcttctccacaagaagctgagtatggatctcctcacaccactcatcttcctcctcctcctcctctcaccattttcactctcagatgctggttccatcggagtaaactacggccgaatctccgacgaactcccctccgcattcaaagtagtccaactactaaaatcccaaggaatcacgcgagtcaaaatcttcgacgcagacccatcagttctcaaagcattatccggatctggaatcaaagtcaccgtagatctccccaacgagttactcttctccgccgccaaaagaacttccttcgccgtctcatgggtcaaacgcaacgtagcagcttatcatccttcaacacagatcgaatcaatagctgttggtaacgaagtcttcgttgatacacacaacactacaagcttcttgatccctgcaatgagaaacattcacaaagctcttatgagtttcaatctccactccgacattaaaatctcttctcctcttgctttaagcgctcttcaaaactcttacccttcttcctccggttctttccgaccagaacttgtcgactctgttatcaaaccaatgcttgacttcttacgtgaaactggttcaagacttatgatcaatgtctatcctttctttgcttatgaaggaaactctgacgtcattcctttagattatgctttgcttagagagaatccaggaatggttgattctggtaatggtttgagatactttaatctcttcgacgctcaaatcgacgccgttttcgcagcaatgtcggctttaaagtacgatgatatcgaaatcattgtcacggaaactggttggccctcgaaaggagatgagaatgaagtcggagctactctagctaacgcagcttcttacaacggaaacttaatccgtcggatcttgacacgtggaggtacaccgttacgtcctaaagcagatctaacggtctatcttttcgctctgttcaacgagaacaagaagttaggtccaacgtcggagagaaactatggtctcttcttccctgatgagaagaaagtctacgacattcctttcacaacagaggggttgaaacattaccgtgacggtggtcatactccggtcaccggaggagatcaggttacaaagcctccgatgagtggaggcgtgtcgaagagtttgaatggttatacttggtgtgtagctaatggtgatgctggtgaagaaaggttacaaggtggtttagattatgcttgtggtgaaggtggtgctgattgtcgcccgattcaacctggtgctaactgttatagtcctgatacacttgaggctcacgcttcgtttgctttcaatagttattaccagaagaagggtcgtgccggtgggagttgttacttcggcggcgccgcttacgtcgttagccaaccaccgaagtatggaagatgcgagtttccgacaggatattaaggaagaagaaggtttgagtttagattaatttctgctatataatatattcgtattttgatgtattttgtttggtgggaagttttagttaatttttgtaacaatgactttttaatgttgtgttgttaataccaacttagacgatgttattgatatttgatatttaggtaatgaaattaaatatgtttgtttc

SEQ ID NO: 37635 - protein, 498 aa, Arabidopsis thaliana
  peptide (1)..(498): Ceres Seq. ID no. 12327467
  misc_feature (51)..(370): Pfam Name: Glycosyl hydrolases family 17 Pfam Description: Glycosyl hydrolases family 17
  misc_feature (23)..(374): Homolog of NCBI NO: 11279331 NR Description: beta-1,3-glucanase (EC 3.2.1.-) precursor
  misc_feature (33)..(377): Homolog of NCBI NO: 27529826 NR Description: beta-1,3-glucanase-like protein [Nicotiana
  misc_feature (38)..(488): Homolog of NCBI NO: 15236882 NR Description: glycosyl hydrolase family 17; protein id:
  misc_feature (25)..(489): Homolog of NCBI NO: 9758115 NR Description: beta-1,3-glucanase-like protein [Arabidopsis
  misc_feature (36)..(498): Homolog of NCBI NO: 11071974 NR Description: elicitor inducible beta-1,3-glucanase Nt-SubE76
  misc_feature (25)..(498): Homolog of NCBI NO: 21594590 NR Description: beta-1,3-glucanase-like protein [Arabidopsis
  misc_feature (25)..(498): Homolog of NCBI NO: 18700155 NR Description: AT5g55180/MCO15_13 [Arabidopsis thaliana]
  misc_feature (25)..(498): Homolog of NCBI NO: 18423719 NR Description: glycosyl hydrolase family 17
  misc_feature (27)..(489): Homolog of NCBI NO: 25316444 NR Description: probable beta-1,3-glucanase [imported] -
  misc_feature (27)..(498): Homolog of NCBI NO: 30678225 NR Description: glycosyl hydrolase family 17 [Arabidopsis
TPLSLSLCLLQIFISLSISLLHKKLSMDLLTPLIFLLLLLSPFSLSDAGSIGVNYGRISDELPSAFKVVQLLKSQGITRVKIFDADPSVLKALSGSGIKVTVDLPNELLFSAAKRTSFAVSWVKRNVAAYHPSTQIESIAVGNEVFVDTHNTTSFLIPAMRNIHKALMSFNLHSDIKISSPLALSALQNSYPSSSGSFRPELVDSVIKPMLDFLRETGSRLMINVYPFFAYEGNSDVIPLDYALLRENPGMVDSGNGLRYFNLFDAQIDAVFAAMSALKYDDIEIIVTETGWPSKGDENEVGATLANAASYNGNLIRRILTRGGTPLRPKADLTVYLFALFNENKKLGPTSERNYGLFFPDEKKVYDIPFTTEGLKHYRDGGHTPVTGGDQVTKPPMSGGVSKSLNGYTWCVANGDAGEERLQGGLDYACGEGGADCRPIQPGANCYSPDTLEAHASFAFNSYYQKKGRAGGSCYFGGAAYVVSQPPKYGRCEFPTGY

SEQ ID NO: 37636 - protein, 472 aa, Arabidopsis thaliana
  peptide (1)..(472): Ceres Seq. ID no. 12327468
  misc_feature (25)..(344): Pfam Name: Glycosyl hydrolases family 17 Pfam Description: Glycosyl hydrolases family 17
  misc_feature (1)..(348): Homolog of NCBI NO: 11279331 NR Description: beta-1,3-glucanase (EC 3.2.1.-) precursor
  misc_feature (7)..(351): Homolog of NCBI NO: 27529826 NR Description: beta-1,3-glucanase-like protein [Nicotiana
  misc_feature (12)..(462): Homolog of NCBI NO: 15236882 NR Description: glycosyl hydrolase family 17; protein id:
  misc_feature (1)..(463): Homolog of NCBI NO: 9758115 NR Description: beta-1,3-glucanase-like protein [Arabidopsis
  misc_feature (10)..(472): Homolog of NCBI NO: 11071974 NR Description: elicitor inducible beta-1,3-glucanase Nt-SubE76
  misc_feature (1)..(472): Homolog of NCBI NO: 21594590 NR Description: beta-1,3-glucanase-like protein [Arabidopsis
  misc_feature (1)..(472): Homolog of NCBI NO: 18700155 NR Description: AT5g55180/MCO15_13 [Arabidopsis thaliana]
  misc_feature (1)..(472): Homolog of NCBI NO: 18423719 NR Description: glycosyl hydrolase family 17
  misc_feature (1)..(463): Homolog of NCBI NO: 25316444 NR Description: probable beta-1,3-glucanase [imported] -
  misc_feature (1)..(472): Homolog of NCBI NO: 30678225 NR Description: glycosyl hydrolase family 17 [Arabidopsis
MDLLTPLIFLLLLLSPFSLSDAGSIGVNYGRISDELPSAFKVVQLLKSQGITRVKIFDADPSVLKALSGSGIKVTVDLPNELLFSAAKRTSFAVSWVKRNVAAYHPSTQIESIAVGNEVFVDTHNTTSFLIPAMRNIHKALMSFNLHSDIKISSPLALSALQNSYPSSSGSFRPELVDSVIKPMLDFLRETGSRLMINVYPFFAYEGNSDVIPLDYALLRENPGMVDSGNGLRYFNLFDAQIDAVFAAMSALKYDDIEIIVTETGWPSKGDENEVGATLANAASYNGNLIRRILTRGGTPLRPKADLTVYLFALFNENKKLGPTSERNYGLFFPDEKKVYDIPFTTEGLKHYRDGGHTPVTGGDQVTKPPMSGGVSKSLNGYTWCVANGDAGEERLQGGLDYACGEGGADCRPIQPGANCYSPDTLEAHASFAFNSYYQKKGRAGGSCYFGGAAYVVSQPPKYGRCEFPTGY

SEQ ID NO: 37637 - protein, 339 aa, Arabidopsis thaliana
  peptide (1)..(339): Ceres Seq. ID no. 12327469
  misc_feature (1)..(211): Pfam Name: Glycosyl hydrolases family 17 Pfam Description: Glycosyl hydrolases family 17
  misc_feature (1)..(215): Homolog of NCBI NO: 11279331 NR Description: beta-1,3-glucanase (EC 3.2.1.-) precursor
  misc_feature (1)..(218): Homolog of NCBI NO: 27529826 NR Description: beta-1,3-glucanase-like protein [Nicotiana
  misc_feature (1)..(329): Homolog of NCBI NO: 15236882 NR Description: glycosyl hydrolase family 17; protein id:
  misc_feature (1)..(330): Homolog of NCBI NO: 9758115 NR Description: beta-1,3-glucanase-like protein [Arabidopsis
  misc_feature (1)..(339): Homolog of NCBI NO: 11071974 NR Description: elicitor inducible beta-1,3-glucanase Nt-SubE76
  misc_feature (1)..(339): Homolog of NCBI NO: 21594590 NR Description: beta-1,3-glucanase-like protein [Arabidopsis
  misc_feature (1)..(339): Homolog of NCBI NO: 18700155 NR Description: AT5g55180/MCO15_13 [Arabidopsis thaliana]
  misc_feature (1)..(339): Homolog of NCBI NO: 18423719 NR Description: glycosyl hydrolase family 17
  misc_feature (1)..(330): Homolog of NCBI NO: 25316444 NR Description: probable beta-1,3-glucanase [imported] -
  misc_feature (1)..(339): Homolog of NCBI NO: 30678225 NR Description: glycosyl hydrolase family 17 [Arabidopsis
MRNIHKALMSFNLHSDIKISSPLALSALQNSYPSSSGSFRPELVDSVIKPMLDFLRETGSRLMINVYPFFAYEGNSDVIPLDYALLRENPGMVDSGNGLRYFNLFDAQIDAVFAAMSALKYDDIEIIVTETGWPSKGDENEVGATLANAASYNGNLIRRILTRGGTPLRPKADLTVYLFALFNENKKLGPTSERNYGLFFPDEKKVYDIPFTTEGLKHYRDGGHTPVTGGDQVTKPPMSGGVSKSLNGYTWCVANGDAGEERLQGGLDYACGEGGADCRPIQPGANCYSPDTLEAHASFAFNSYYQKKGRAGGSCYFGGAAYVVSQPPKYGRCEFPTGY

SEQ ID NO: 37638 - DNA, 1161 bp, Arabidopsis thaliana
  misc_feature (1)..(1161): Ceres Seq. ID no. 12369896
  misc_feature: MA Experiment ID: 108433 Result: Down-regulated in Transcription
  misc_feature: MA Experiment 108433 PARAMETER Experiment Name: At_rhl_Mutant2_cDNA_P Parameter: Age (day) Value: 7
  misc_feature: MA Experiment 108433 PARAMETER Experiment Name: At_rhl_Mutant2_cDNA_P Parameter: Organism Value: A. thaliana
  misc_feature: MA Experiment 108433 PARAMETER Experiment Name: At_rhl_Mutant2_cDNA_P Parameter: Plant Line Value: rhl Mutant vs. wt landsburg
  misc_feature: MA Experiment 108433 PARAMETER Experiment Name: At_rhl_Mutant2_cDNA_P Parameter: Tissue Value: Roots
  misc_feature: MA Experiment ID: 108434 Result: Up-regulated in Transcription
  misc_feature: MA Experiment 108434 PARAMETER Experiment Name: At_Root_Tips_cDNA_P Parameter: Tissue Value: Root Tips
  misc_feature: MA Experiment ID: 108461 Result: Down-regulated in Transcription
  misc_feature: MA Experiment 108461 PARAMETER Experiment Name: At_Germinating_Seeds_cDNA_P Parameter: Age (day) Value: 1 vs. 0
  misc_feature: MA Experiment 108461 PARAMETER Experiment Name: At_Germinating_Seeds_cDNA_P Parameter: Tissue Value: Germinating Seeds
  misc_feature: MA Experiment ID: 108462 Result: Down-regulated in Transcription
  misc_feature: MA Experiment 108462 PARAMETER Experiment Name: At_Germinating_Seeds_cDNA_P Parameter: Age (day) Value: 2 vs. 0
  misc_feature: MA Experiment 108462 PARAMETER Experiment Name: At_Germinating_Seeds_cDNA_P Parameter: Tissue Value: Germinating Seeds
  misc_feature: MA Experiment ID: 108463 Result: Down-regulated in Transcription
  misc_feature: MA Experiment 108463 PARAMETER Experiment Name: At_Germinating_Seeds_cDNA_P Parameter: Age (day) Value: 3 vs. 0
  misc_feature: MA Experiment 108463 PARAMETER Experiment Name: At_Germinating_Seeds_cDNA_P Parameter: Tissue Value: Germinating Seeds
  misc_feature: MA Experiment ID: 108464 Result: Down-regulated in Transcription
  misc_feature: MA Experiment 108464 PARAMETER Experiment Name: At_Germinating_Seeds_cDNA_P Parameter: Age (day) Value: 4 vs. 0
  misc_feature: MA Experiment 108464 PARAMETER Experiment Name: At_Germinating_Seeds_cDNA_P Parameter: Tissue Value: Germinating Seeds
  misc_feature: MA Experiment ID: 20000180 Result: Down-regulated in Transcription
  misc_feature: MA Experiment 20000180 PARAMETER Experiment Name: At_Germinating_Seeds_P Parameter: Age (hr) Value: 24 vs. 0
  misc_feature: MA Experiment 20000180 PARAMETER Experiment Name: At_Germinating_Seeds_P Parameter: Tissue Value: Germinating Seeds
gttttcgaaacgttcacatcactgcgtctcgtttgataaaccctaagcccttttcttcttcgattctccattttcttcctctctgttccggcgacgcttctcctcgccgttccaatcctctccggcatagaaactcggtgtctccttcatcttcctttcccttctgttcgacttcttccttttcttctttctacattcctatggcgggaggagatggtcaggtgtctcattcgcttgagaagcagttcgagagtttccgtgttcaattggaagaatctgcagctttgagagagcagattcgtgctgtggttatggagattgagtctgctactaggcttattcaagctaatcttcttctcgttcatcaatcgcgtcctattcctgaggttatcgagaaagctaaggaaaaaatcgttgatttgaagcagtattatggtcggcttgctgaaattcttgaggagtgtcctggacaatactataggtaccatggagactggagaagtgaaacacaggcagtggtctcccagcttgcttttatgcactggctagaaactggaactcttctcgtgcataccgaagctgaagaaaaacttgggttgaacagtttggagtttggattggagacagaagattatctcactggaatttgtttcatgtcaaacgatttgcctaggtacgtggttaatcgagtgacagcaggagactatgactgcccaagaaaggtgatgaatttcctgacagatcttcatgcagcctttcgcatgctcaatctcaggaacgatttcctgcgcaagaaattcgacagtatgaagtacgacctaagaagagtggaagaagtttactatgatgtcaagatccgaggtttgatttccggcggagatcctcctggcgtccaagcagtccaaggccaatcctaaatgtcctcggctctttttaagtttttatgtataactttgtttagctagcatgaaaacgtcaaggagtgttcttctctaaaccaaaaacggcaaggaaaatagagagactgtagtttttaggtgtagtttgcaattactgaaaacggcaagtattccttttgtgggccttgaaagcccacattttagtcacaactttactgttatccgaagtcagcagcttaatagtataacagtagatgttcat

SEQ ID NO: 37639 - protein, 304 aa, Arabidopsis thaliana
  peptide (1)..(304): Ceres Seq. ID no. 12369897
  misc_feature (93)..(288): Pfam Name: Translin family Pfam Description: Translin family
  misc_feature (77)..(287): Homolog of NCBI NO: 4759270 NR Description: translin
  misc_feature (77)..(287): Homolog of NCBI NO: 21730459 NR Description: Chain A, Crystal Structure Of Mouse TestisBRAIN
  misc_feature (77)..(287): Homolog of NCBI NO: 6755899 NR Description: translin; testis/brain-RNA-binding protein [Mus
  misc_feature (77)..(288): Homolog of NCBI NO: 7648677 NR Description: translin [Xenopus laevis]
  misc_feature (75)..(287): Homolog of NCBI NO: 40889058 NR Description: Chain A, Crystal Structure Of Human Translin
  misc_feature (82)..(290): Homolog of NCBI NO: 20129859 NR Description: CG11761-PA [Drosophila melanogaster]
  misc_feature (69)..(291): Homolog of NCBI NO: 37534782 NR Description: translin-like protein [Oryza sativa (japonica
  misc_feature (206)..(304): Homolog of NCBI NO: 25408524 NR Description: translin-like protein [imported] - Arabidopsis
  misc_feature (67)..(214): Homolog of NCBI NO: 25408524 NR Description: translin-like protein [imported] - Arabidopsis
  misc_feature (67)..(304): Homolog of NCBI NO: 18404301 NR Description: translin-like protein
FRNVHITASRLINPKPFSSSILHFLPLCSGDASPRRSNPLRHRNSVSPSSSFPFCSTSSFSSFYIPMAGGDGQVSHSLEKQFESFRVQLEESAALREQIRAVVMEIESATRLIQANLLLVHQSRPIPEVIEKAKEKIVDLKQYYGRLAEILEECPGQYYRYHGDWRSETQAVVSQLAFMHWLETGTLLVHTEAEEKLGLNSLEFGLETEDYLTGICFMSNDLPRYVVNRVTAGDYDCPRKVMNFLTDLHAAFRMLNLRNDFLRKKFDSMKYDLRRVEEVYYDVKIRGLISGGDPPGVQAVQGQS

SEQ ID NO: 37640 - protein, 238 aa, Arabidopsis thaliana
  peptide (1)..(238): Ceres Seq. ID no. 12369898
  misc_feature (27)..(222): Pfam Name: Translin family Pfam Description: Translin family
  misc_feature (11)..(221): Homolog of NCBI NO: 4759270 NR Description: translin
  misc_feature (11)..(221): Homolog of NCBI NO: 21730459 NR Description: Chain A, Crystal Structure Of Mouse TestisBRAIN
  misc_feature (11)..(221): Homolog of NCBI NO: 6755899 NR Description: translin; testis/brain-RNA-binding protein [Mus
  misc_feature (11)..(222): Homolog of NCBI NO: 7648677 NR Description: translin [Xenopus laevis]
  misc_feature (9)..(221): Homolog of NCBI NO: 40889058 NR Description: Chain A, Crystal Structure Of Human Translin
  misc_feature (16)..(224): Homolog of NCBI NO: 20129859 NR Description: CG11761-PA [Drosophila melanogaster]
  misc_feature (3)..(225): Homolog of NCBI NO: 37534782 NR Description: translin-like protein [Oryza sativa (japonica
  misc_feature (140)..(238): Homolog of NCBI NO: 25408524 NR Description: translin-like protein [imported] - Arabidopsis
  misc_feature (1)..(148): Homolog of NCBI NO: 25408524 NR Description: translin-like protein [imported] - Arabidopsis
  misc_feature (1)..(238): Homolog of NCBI NO: 18404301 NR Description: translin-like protein
MAGGDGQVSHSLEKQFESFRVQLEESAALREQIRAVVMEIESATRLIQANLLLVHQSRPIPEVIEKAKEKIVDLKQYYGRLAEILEECPGQYYRYHGDWRSETQAVVSQLAFMHWLETGTLLVHTEAEEKLGLNSLEFGLETEDYLTGICFMSNDLPRYVVNRVTAGDYDCPRKVMNFLTDLHAAFRMLNLRNDFLRKKFDSMKYDLRRVEEVYYDVKIRGLISGGDPPGVQAVQGQS

SEQ ID NO: 37641 - protein, 201 aa, Arabidopsis thaliana
  peptide (1)..(201): Ceres Seq. ID no. 12369899
  misc_feature (1)..(185): Pfam Name: Translin family Pfam Description: Translin family
  misc_feature (1)..(184): Homolog of NCBI NO: 4759270 NR Description: translin
  misc_feature (1)..(184): Homolog of NCBI NO: 21730459 NR Description: Chain A, Crystal Structure Of Mouse TestisBRAIN
  misc_feature (1)..(184): Homolog of NCBI NO: 6755899 NR Description: translin; testis/brain-RNA-binding protein [Mus
  misc_feature (1)..(185): Homolog of NCBI NO: 7648677 NR Description: translin [Xenopus laevis]
  misc_feature (1)..(184): Homolog of NCBI NO: 40889058 NR Description: Chain A, Crystal Structure Of Human Translin
  misc_feature (1)..(187): Homolog of NCBI NO: 20129859 NR Description: CG11761-PA [Drosophila melanogaster]
  misc_feature (1)..(188): Homolog of NCBI NO: 37534782 NR Description: translin-like protein [Oryza sativa (japonica
  misc_feature (103)..(201): Homolog of NCBI NO: 25408524 NR Description: translin-like protein [imported] - Arabidopsis
  misc_feature (1)..(111): Homolog of NCBI NO: 25408524 NR Description: translin-like protein [imported] - Arabidopsis
  misc_feature (1)..(201): Homolog of NCBI NO: 18404301 NR Description: translin-like protein
MEIESATRLIQANLLLVHQSRPIPEVIEKAKEKIVDLKQYYGRLAEILEECPGQYYRYHGDWRSETQAVVSQLAFMHWLETGTLLVHTEAEEKLGLNSLEFGLETEDYLTGICFMSNDLPRYVVNRVTAGDYDCPRKVMNFLTDLHAAFRMLNLRNDFLRKKFDSMKYDLRRVEEVYYDVKIRGLISGGDPPGVQAVQGQS

SEQ ID NO: 37642 - DNA, 1007 bp, Arabidopsis thaliana
  misc_feature (1)..(1007): Ceres Seq. ID no. 12331289
  misc_feature: MA Experiment ID: 108434 Result: Up-regulated in Transcription
  misc_feature: MA Experiment 108434 PARAMETER Experiment Name: At_Root_Tips_cDNA_P Parameter: Tissue Value: Root Tips
  misc_feature: MA Experiment ID: 108461 Result: Down-regulated in Transcription
  misc_feature: MA Experiment 108461 PARAMETER Experiment Name: At_Germinating_Seeds_cDNA_P Parameter: Age (day) Value: 1 vs. 0
  misc_feature: MA Experiment 108461 PARAMETER Experiment Name: At_Germinating_Seeds_cDNA_P Parameter: Tissue Value: Germinating Seeds
  misc_feature: MA Experiment ID: 108462 Result: Down-regulated in Transcription
  misc_feature: MA Experiment 108462 PARAMETER Experiment Name: At_Germinating_Seeds_cDNA_P Parameter: Age (day) Value: 2 vs. 0
  misc_feature: MA Experiment 108462 PARAMETER Experiment Name: At_Germinating_Seeds_cDNA_P Parameter: Tissue Value: Germinating Seeds
  misc_feature: MA Experiment ID: 108463 Result: Down-regulated in Transcription
  misc_feature: MA Experiment 108463 PARAMETER Experiment Name: At_Germinating_Seeds_cDNA_P Parameter: Age (day) Value: 3 vs. 0
  misc_feature: MA Experiment 108463 PARAMETER Experiment Name: At_Germinating_Seeds_cDNA_P Parameter: Tissue Value: Germinating Seeds
  misc_feature: MA Experiment ID: 108464 Result: Down-regulated in Transcription
  misc_feature: MA Experiment 108464 PARAMETER Experiment Name: At_Germinating_Seeds_cDNA_P Parameter: Age (day) Value: 4 vs. 0
  misc_feature: MA Experiment 108464 PARAMETER Experiment Name: At_Germinating_Seeds_cDNA_P Parameter: Tissue Value: Germinating Seeds
  misc_feature: MA Experiment ID: 20000495 Result: Up-regulated in Transcription
  misc_feature: MA Experiment 20000495 PARAMETER Experiment Name: At_Guard_Cells_P Parameter: Harvest Date Value: 8/2/2002
  misc_feature: MA Experiment 20000495 PARAMETER Experiment Name: At_Guard_Cells_P Parameter: Organism Value: A. thaliana
  misc_feature: MA Experiment 20000495 PARAMETER Experiment Name: At_Guard_Cells_P Parameter: Tissue Value: Guard Cells vs. Leaves
ccaaatttctccatggatcgttctttgaatctcctcgatttagccttagggttcgatgagcagctagctattccatcgccactaaatggaaaagtaatactaatagaagactgtgtagagacgagtggttcctttgtacttcaccagctaatgaaacgtgttctctcctctaactcctccgacgcacttatctttctcgcttttgctcgccctttctctcattatgatcgaatcttgcgtaaactgggatgtaatttagctacccataagtcgaataatcgattggtgttctttgacatgctcatggttaagtgttcagatggggatcaaatggaagacaatgtgagtgcagttgcgaaactatttcgggagatacaagaaaccgttcgaaagctacagagtgtaacaagtggtaacataactgttatggtggatgacatgtctctgctggaaattgctactaccggcagcaactcagatcacgtattggacttcttgcattattgccacacattaagttctgaaagcaattgttcattggtcatcctcaatcatgaagatatatacgcgagcatggagagacctgcatttttgctacagatggtatgccttgcagatgttgtgataaaggcagagcctttagcctctggtttagcaaatgatgtacatggccaattgactgttctgaacaaagggataagcaactcaggtagaggaagctcgaggaacaagttgcagaattttcaattcaggatcaaggaaaatggtatcgactatttctatcctggttgcagaagctgaggattagacaccgttctgagcattagcatggtagtgagatgcatctagacagttttgttatttgcgtttaggttaaacagagacactctgttcaacatttttactttagtgtctcttctggttgtaacttgatgacttagctaaagttgaatgcttgagacacagaaacttgtagacatggaaaattagtaacattctatatcttt

SEQ ID NO: 37643 - protein, 266 aa, Arabidopsis thaliana
  peptide (1)..(266): Ceres Seq. ID no. 12331290
  misc_feature (31)..(265): Homolog of NCBI NO: 24796809 NR Description: unknown protein [Oryza sativa (japonica
  misc_feature (5)..(106): Homolog of NCBI NO: 7486308 NR Description: hypothetical protein F28M11.10 - Arabidopsis
  misc_feature (75)..(227): Homolog of NCBI NO: 7486308 NR Description: hypothetical protein F28M11.10 - Arabidopsis
  misc_feature (5)..(266): Homolog of NCBI NO: 18413296 NR Description: expressed protein
PNFSMDRSLNLLDLALGFDEQLAIPSPLNGKVILIEDCVETSGSFVLHQLMKRVLSSNSSDALIFLAFARPFSHYDRILRKLGCNLATHKSNNRLVFFDMLMVKCSDGDQMEDNVSAVAKLFREIQETVRKLQSVTSGNITVMVDDMSLLEIATTGSNSDHVLDFLHYCHTLSSESNCSLVILNHEDIYASMERPAFLLQMVCLADVVIKAEPLASGLANDVHGQLTVLNKGISNSGRGSSRNKLQNFQFRIKENGIDYFYPGCRS

SEQ ID NO: 37644 - protein, 262 aa, Arabidopsis thaliana
  peptide (1)..(262): Ceres Seq. ID no. 12331291
  misc_feature (27)..(261): Homolog of NCBI NO: 24796809 NR Description: unknown protein [Oryza sativa (japonica
  misc_feature (1)..(102): Homolog of NCBI NO: 7486308 NR Description: hypothetical protein F28M11.10 - Arabidopsis
  misc_feature (71)..(223): Homolog of NCBI NO: 7486308 NR Description: hypothetical protein F28M11.10 - Arabidopsis
  misc_feature (1)..(262): Homolog of NCBI NO: 18413296 NR Description: expressed protein
MDRSLNLLDLALGFDEQLAIPSPLNGKVILIEDCVETSGSFVLHQLMKRVLSSNSSDALIFLAFARPFSHYDRILRKLGCNLATHKSNNRLVFFDMLMVKCSDGDQMEDNVSAVAKLFREIQETVRKLQSVTSGNITVMVDDMSLLEIATTGSNSDHVLDFLHYCHTLSSESNCSLVILNHEDIYASMERPAFLLQMVCLADVVIKAEPLASGLANDVHGQLTVLNKGISNSGRGSSRNKLQNFQFRIKENGIDYFYPGCRS

SEQ ID NO: 37645 - protein, 216 aa, Arabidopsis thaliana
  peptide (1)..(216): Ceres Seq. ID no. 12331292
  misc_feature (1)..(215): Homolog of NCBI NO: 24796809 NR Description: unknown protein [Oryza sativa (japonica
  misc_feature (1)..(56): Homolog of NCBI NO: 7486308 NR Description: hypothetical protein F28M11.10 - Arabidopsis
  misc_feature (25)..(177): Homolog of NCBI NO: 7486308 NR Description: hypothetical protein F28M11.10 - Arabidopsis
  misc_feature (1)..(216): Homolog of NCBI NO: 18413296 NR Description: expressed protein
MKRVLSSNSSDALIFLAFARPFSHYDRILRKLGCNLATHKSNNRLVFFDMLMVKCSDGDQMEDNVSAVAKLFREIQETVRKLQSVTSGNITVMVDDMSLLEIATTGSNSDHVLDFLHYCHTLSSESNCSLVILNHEDIYASMERPAFLLQMVCLADVVIKAEPLASGLANDVHGQLTVLNKGISNSGRGSSRNKLQNFQFRIKENGIDYFYPGCRS

SEQ ID NO: 37646 - DNA, 1347 bp, Arabidopsis thaliana; identical to SEQ ID NO: 20832
  misc_feature (1)..(1347): Ceres Seq. ID no. 13486853
  misc_feature: MA Experiment ID: 108434 Result: Up-regulated in Transcription
  misc_feature: MA Experiment 108434 PARAMETER Experiment Name: At_Root_Tips_cDNA_P Parameter: Tissue Value: Root Tips
  misc_feature: MA Experiment ID: 108435 Result: Up-regulated in Transcription
  misc_feature: MA Experiment 108435 PARAMETER Experiment Name: At_stm_Mutants_cDNA_P Parameter: Plant Line Value: wt Landsburg vs stm
  misc_feature: MA Experiment 108435 PARAMETER Experiment Name: At_stm_Mutants_cDNA_P Parameter: Tissue Value: Shoot Apical Meristem Region
  misc_feature: MA Experiment ID: 108461 Result: Down-regulated in Transcription
  misc_feature: MA Experiment 108461 PARAMETER Experiment Name: At_Germinating_Seeds_cDNA_P Parameter: Age (day) Value: 1 vs. 0
  misc_feature: MA Experiment 108461 PARAMETER Experiment Name: At_Germinating_Seeds_cDNA_P Parameter: Tissue Value: Germinating Seeds
  misc_feature: MA Experiment ID: 108462 Result: Down-regulated in Transcription
  misc_feature: MA Experiment 108462 PARAMETER Experiment Name: At_Germinating_Seeds_cDNA_P Parameter: Age (day) Value: 2 vs. 0
  misc_feature: MA Experiment 108462 PARAMETER Experiment Name: At_Germinating_Seeds_cDNA_P Parameter: Tissue Value: Germinating Seeds
  misc_feature: MA Experiment ID: 108463 Result: Down-regulated in Transcription
  misc_feature: MA Experiment 108463 PARAMETER Experiment Name: At_Germinating_Seeds_cDNA_P Parameter: Age (day) Value: 3 vs. 0
  misc_feature: MA Experiment 108463 PARAMETER Experiment Name: At_Germinating_Seeds_cDNA_P Parameter: Tissue Value: Germinating Seeds
  misc_feature: MA Experiment ID: 108464 Result: Down-regulated in Transcription
  misc_feature: MA Experiment 108464 PARAMETER Experiment Name: At_Germinating_Seeds_cDNA_P Parameter: Age (day) Value: 4 vs. 0
  misc_feature: MA Experiment 108464 PARAMETER Experiment Name: At_Germinating_Seeds_cDNA_P Parameter: Tissue Value: Germinating Seeds
  misc_feature: MA Experiment ID: 108489 Result: Up-regulated in Transcription
  misc_feature: MA Experiment ID: 108576 Result: Down-regulated in Transcription
  misc_feature: MA Experiment 108576 PARAMETER Experiment Name: At_42deg_Heat_cDNA_P Parameter: Temperature (deg C) Value: 42 vs. 22
  misc_feature: MA Experiment 108576 PARAMETER Experiment Name: At_42deg_Heat_cDNA_P Parameter: Timepoint (hr) Value: 1
  misc_feature: MA Experiment 108576 PARAMETER Experiment Name: At_42deg_Heat_cDNA_P Parameter: Tissue Value: Aerial
  misc_feature: MA Experiment ID: 20000144 Result: Down-regulated in Transcription
  misc_feature: MA Experiment 20000144 PARAMETER Experiment Name: At_42deg_Heat_cDNA_P Parameter: Temperature (deg C) Value: 42 vs. 22
  misc_feature: MA Experiment 20000144 PARAMETER Experiment Name: At_42deg_Heat_cDNA_P Parameter: Timepoint (hr) Value: 1
  misc_feature: MA Experiment 20000144 PARAMETER Experiment Name: At_42deg_Heat_cDNA_P Parameter: Tissue Value: Aerial
  misc_feature: MA Experiment ID: 20000179 Result: Down-regulated in Transcription
  misc_feature: MA Experiment 20000179 PARAMETER Experiment Name: At_Germinating_Seeds_P Parameter: Age (hr) Value: 6 vs. 0
  misc_feature: MA Experiment 20000179 PARAMETER Experiment Name: At_Germinating_Seeds_P Parameter: Tissue Value: Germinating Seeds
  misc_feature: MA Experiment ID: 20000180 Result: Down-regulated in Transcription
  misc_feature: MA Experiment 20000180 PARAMETER Experiment Name: At_Germinating_Seeds_P Parameter: Age (hr) Value: 24 vs. 0
  misc_feature: MA Experiment 20000180 PARAMETER Experiment Name: At_Germinating_Seeds_P Parameter: Tissue Value: Germinating Seeds
  misc_feature: MA Experiment ID: 20000184 Result: Up-regulated in Transcription
  misc_feature: MA Experiment 20000184 PARAMETER Experiment Name: At_Shoots__P Parameter: Age (day) Value: 7
  misc_feature: MA Experiment 20000184 PARAMETER Experiment Name: At_Shoots__P Parameter: Tissue Value: Shoots vs. Whole Plant
  misc_feature: MA Experiment ID: 20000573 Result: Down-regulated in Transcription
  misc_feature: MA Experiment 20000573 PARAMETER Experiment Name: At_100uM_ABA_Mutants__P Parameter: Organism Value: A. thaliana
  misc_feature: MA Experiment 20000573 PARAMETER Experiment Name: At_100uM_ABA_Mutants__P Parameter: Plant Line Value: CS22 vs. Ler wt
  misc_feature: MA Experiment 20000573 PARAMETER Experiment Name: At_100uM_ABA_Mutants__P Parameter: Timepoint (hr) Value: N/A
  misc_feature: MA Experiment 20000573 PARAMETER Experiment Name: At_100uM_ABA_Mutants__P Parameter: Tissue Value: Whole Plant
  misc_feature: MA Experiment 20000573 PARAMETER Experiment Name: At_100uM_ABA_Mutants__P Parameter: Treatment Value: None
  misc_feature: MA Experiment ID: 20000574 Result: Down-regulated in Transcription
  misc_feature: MA Experiment 20000574 PARAMETER Experiment Name: At_100uM_ABA_Mutants__P Parameter: Organism Value: A. thaliana
  misc_feature: MA Experiment 20000574 PARAMETER Experiment Name: At_100uM_ABA_Mutants__P Parameter: Plant Line Value: CS23 vs. Ler wt
  misc_feature: MA Experiment 20000574 PARAMETER Experiment Name: At_100uM_ABA_Mutants__P Parameter: Timepoint (hr) Value: N/A
  misc_feature: MA Experiment 20000574 PARAMETER Experiment Name: At_100uM_ABA_Mutants__P Parameter: Tissue Value: Whole Plant
  misc_feature: MA Experiment 20000574 PARAMETER Experiment Name: At_100uM_ABA_Mutants__P Parameter: Treatment Value: None
  misc_feature: MA Experiment ID: 20000794 Result: Down-regulated in Transcription
  misc_feature: MA Experiment 20000794 PARAMETER Experiment Name: At_Petals_P Parameter: Age (day) Value: 23-25 days
  misc_feature: MA Experiment 20000794 PARAMETER Experiment Name: At_Petals_P Parameter: Plant Line Value: WS
  misc_feature: MA Experiment 20000794 PARAMETER Experiment Name: At_Petals_P Parameter: Tissue Value: Petals vs. Whole plant
  misc_feature: MA Experiment ID: 20001450 Result: Up-regulated in Transcription
  misc_feature: MA Experiment 20001450 PARAMETER Experiment Name: At_Far-red-induction_P Parameter: Age (day) Value: 7
  misc_feature: MA Experiment 20001450 PARAMETER Experiment Name: At_Far-red-induction_P Parameter: Light Value: Far-red vs. White
  misc_feature: MA Experiment 20001450 PARAMETER Experiment Name: At_Far-red-induction_P Parameter: Organism Value: A. thaliana
  misc_feature: MA Experiment 20001450 PARAMETER Experiment Name: At_Far-red-induction_P Parameter: Plant Line Value: Columbia
  misc_feature: MA Experiment 20001450 PARAMETER Experiment Name: At_Far-red-induction_P Parameter: Timepoint (hr) Value: 8
  misc_feature: MA Experiment 20001450 PARAMETER Experiment Name: At_Far-red-induction_P Parameter: Tissue Value: Whole Plant
  misc_feature: MA Experiment ID: 20001557 Result: Up-regulated in Transcription
  misc_feature: MA Experiment 20001557 PARAMETER Experiment Name: At_Drought_Soil_Dry_P Parameter: Age (day) Value: 27
  misc_feature: MA Experiment 20001557 PARAMETER Experiment Name: At_Drought_Soil_Dry_P Parameter: Organism Value: A. thaliana
  misc_feature: MA Experiment 20001557 PARAMETER Experiment Name: At_Drought_Soil_Dry_P Parameter: Plant Line Value: WS
  misc_feature: MA Experiment 20001557 PARAMETER Experiment Name: At_Drought_Soil_Dry_P Parameter: Post Timepoint (hr) Value: 3
  misc_feature: MA Experiment 20001557 PARAMETER Experiment Name: At_Drought_Soil_Dry_P Parameter: Post-Treatment Value: Re-Water vs. No Drought
  misc_feature: MA Experiment 20001557 PARAMETER Experiment Name: At_Drought_Soil_Dry_P Parameter: Timepoint (day) Value: 13
  misc_feature: MA Experiment 20001557 PARAMETER Experiment Name: At_Drought_Soil_Dry_P Parameter: Treatment Value: Drought vs. No Drought
  misc_feature: MA Experiment ID: 20001558 Result: Up-regulated in Transcription
  misc_feature: MA Experiment 20001558 PARAMETER Experiment Name: At_Drought_Soil_Dry_P Parameter: Age (day) Value: 27
  misc_feature: MA Experiment 20001558 PARAMETER Experiment Name: At_Drought_Soil_Dry_P Parameter: Organism Value: A. thaliana
  misc_feature: MA Experiment 20001558 PARAMETER Experiment Name: At_Drought_Soil_Dry_P Parameter: Plant Line Value: WS
  misc_feature: MA Experiment 20001558 PARAMETER Experiment Name: At_Drought_Soil_Dry_P Parameter: Post Timepoint (hr) Value: 6
  misc_feature: MA Experiment 20001558 PARAMETER Experiment Name: At_Drought_Soil_Dry_P Parameter: Post-Treatment Value: Re-Water vs. No Drought
  misc_feature: MA Experiment 20001558 PARAMETER Experiment Name: At_Drought_Soil_Dry_P Parameter: Timepoint (day) Value: 13
  misc_feature: MA Experiment 20001558 PARAMETER Experiment Name: At_Drought_Soil_Dry_P Parameter: Treatment Value: Drought vs. No Drought
  misc_feature: MA Experiment ID: 20001757 Result: Up-regulated in Transcription
  misc_feature: MA Experiment 20001757 PARAMETER Experiment Name: At_50mM_NH4NO3_L-to-H_P Parameter: Timepoint (hr) Value: 6
  misc_feature: MA Experiment 20001757 PARAMETER Experiment Name: At_50mM_NH4NO3_L-to-H_P Parameter: Tissue Value: Leaf
  misc_feature: MA Experiment 20001757 PARAMETER Experiment Name: At_50mM_NH4NO3_L-to-H_P Parameter: Treatment Value: 50mM NH4NO3 vs 100mM Mannitol
  misc_feature: MA Experiment ID: 20001905 Result: Down-regulated in Transcription
  misc_feature: MA Experiment 20001905 PARAMETER Experiment Name: At_Drought_Reproduction_P Parameter: Age (day) Value: 40
  misc_feature: MA Experiment 20001905 PARAMETER Experiment Name: At_Drought_Reproduction_P Parameter: Organism Value: A. thaliana
  misc_feature: MA Experiment 20001905 PARAMETER Experiment Name: At_Drought_Reproduction_P Parameter: Plant Line Value: WS
  misc_feature: MA Experiment 20001905 PARAMETER Experiment Name: At_Drought_Reproduction_P Parameter: Timepoint (day) Value: 10
  misc_feature: MA Experiment 20001905 PARAMETER Experiment Name: At_Drought_Reproduction_P Parameter: Tissue Value: Rosettes
  misc_feature: MA Experiment 20001905 PARAMETER Experiment Name: At_Drought_Reproduction_P Parameter: Treatment Value: Drought vs. No Drought
  misc_feature: MA Experiment ID: 20001906 Result: Down-regulated in Transcription
  misc_feature: MA Experiment 20001906 PARAMETER Experiment Name: At_Drought_Reproduction_P Parameter: Age (day) Value: 35
  misc_feature: MA Experiment 20001906 PARAMETER Experiment Name: At_Drought_Reproduction_P Parameter: Organism Value: A. thaliana
  misc_feature: MA Experiment 20001906 PARAMETER Experiment Name: At_Drought_Reproduction_P Parameter: Plant Line Value: WS
  misc_feature: MA Experiment 20001906 PARAMETER Experiment Name: At_Drought_Reproduction_P Parameter: Timepoint (day) Value: 5
  misc_feature: MA Experiment 20001906 PARAMETER Experiment Name: At_Drought_Reproduction_P Parameter: Tissue Value: Siliques
  misc_feature: MA Experiment 20001906 PARAMETER Experiment Name: At_Drought_Reproduction_P Parameter: Treatment Value: Drought vs. No Drought

SEQ ID NO: 37647 - protein, 401 aa, Arabidopsis thaliana; identical to SEQ ID NO: 20833
  peptide (1)..(401): Ceres Seq. ID no. 13486854
  misc_feature (79)..(401): Pfam Name: Protein of unknown function, DUF642 Pfam Description: Protein of unknown function, DUF642
  misc_feature (79)..(401): Pfam Name: Protein of unknown function, DUF642 Pfam Description: Protein of unknown function, DUF642
  misc_feature (61)..(395): Homolog of NCBI NO: 15239049 NR Description: expressed protein [Arabidopsis thaliana]
  misc_feature (44)..(395): Homolog of NCBI NO: 21537379 NR Description: unknown [Arabidopsis thaliana]
  misc_feature (44)..(395): Homolog of NCBI NO: 15809822 NR Description: AT5g25460/F18G18_200 [Arabidopsis thaliana]
  misc_feature (44)..(395): Homolog of NCBI NO: 15239438 NR Description: expressed protein [Arabidopsis thaliana]
  misc_feature (43)..(395): Homolog of NCBI NO: 7488898 NR Description: hypothetical protein - castor bean
  misc_feature (61)..(395): Homolog of NCBI NO: 15239049 NR Description: expressed protein [Arabidopsis thaliana]
  misc_feature (44)..(395): Homolog of NCBI NO: 15809822 NR Description: AT5g25460/F18G18_200 [Arabidopsis thaliana]
  misc_feature (43)..(395): Homolog of NCBI NO: 7488898 NR Description: hypothetical protein - castor bean
  misc_feature (37)..(401): Homolog of NCBI NO: 18398135 NR Description: expressed protein [Arabidopsis thaliana]
  misc_feature (79)..(401): Homolog of NCBI NO: 12321555 NR Description: unknown protein, 5' partial [Arabidopsis thaliana]
  misc_feature (37)..(398): Homolog of NCBI NO: 15227437 NR Description: expressed protein [Arabidopsis thaliana]
  misc_feature (36)..(397): Homolog of NCBI NO: 30102997 NR Description: unknown protein [Oryza sativa (japonica
  misc_feature (59)..(397): Homolog of NCBI NO: 15227439 NR Description: expressed protein [Arabidopsis thaliana]
  misc_feature (44)..(395): Homolog of NCBI NO: 15239438 NR Description: expressed protein [Arabidopsis thaliana]
  misc_feature (44)..(395): Homolog of NCBI NO: 21537379 NR Description: unknown [Arabidopsis thaliana]
  misc_feature (59)..(397): Homolog of NCBI NO: 15227439 NR Description: expressed protein [Arabidopsis thaliana]
  misc_feature (36)..(397): Homolog of NCBI NO: 30102997 NR Description: unknown protein [Oryza sativa (japonica
  misc_feature (37)..(398): Homolog of NCBI NO: 15227437 NR Description: expressed protein [Arabidopsis thaliana]
  misc_feature (79)..(401): Homolog of NCBI NO: 12321555 NR Description: unknown protein, 5' partial [Arabidopsis thaliana]
  misc_feature (37)..(401): Homolog of NCBI NO: 18398135 NR Description: expressed protein [Arabidopsis thaliana]

SEQ ID NO: 37648 - protein, 365 aa, Arabidopsis thaliana; identical to SEQ ID NO: 20834
  peptide (1)..(365): Ceres Seq. ID no. 13486855
  misc_feature (43)..(365): Pfam Name: Protein of unknown function, DUF642 Pfam Description: Protein of unknown function, DUF642
  misc_feature (43)..(365): Pfam Name: Protein of unknown function, DUF642 Pfam Description: Protein of unknown function, DUF642
  misc_feature (25)..(359): Homolog of NCBI NO: 15239049 NR Description: expressed protein [Arabidopsis thaliana]
  misc_feature (8)..(359): Homolog of NCBI NO: 21537379 NR Description: unknown [Arabidopsis thaliana]
  misc_feature (8)..(359): Homolog of NCBI NO: 15809822 NR Description: AT5g25460/F18G18_200 [Arabidopsis thaliana]
  misc_feature (8)..(359): Homolog of NCBI NO: 15239438 NR Description: expressed protein [Arabidopsis thaliana]
  misc_feature (7)..(359): Homolog of NCBI NO: 7488898 NR Description: hypothetical protein - castor bean
  misc_feature (25)..(359): Homolog of NCBI NO: 15239049 NR Description: expressed protein [Arabidopsis thaliana]
  misc_feature (8)..(359): Homolog of NCBI NO: 15809822 NR Description: AT5g25460/F18G18_200 [Arabidopsis thaliana]
  misc_feature (7)..(359): Homolog of NCBI NO: 7488898 NR Description: hypothetical protein - castor bean
  misc_feature (1)..(365): Homolog of NCBI NO: 18398135 NR Description: expressed protein [Arabidopsis thaliana]
  misc_feature (43)..(365): Homolog of NCBI NO: 12321555 NR Description: unknown protein, 5' partial [Arabidopsis thaliana]
  misc_feature (1)..(362): Homolog of NCBI NO: 15227437 NR Description: expressed protein [Arabidopsis thaliana]
  misc_feature (1)..(361): Homolog of NCBI NO: 30102997 NR Description: unknown protein [Oryza sativa (japonica
  misc_feature (23)..(361): Homolog of NCBI NO: 15227439 NR Description: expressed protein [Arabidopsis thaliana]
  misc_feature (8)..(359): Homolog of NCBI NO: 15239438 NR Description: expressed protein [Arabidopsis thaliana]
  misc_feature (8)..(359): Homolog of NCBI NO: 21537379 NR Description: unknown [Arabidopsis thaliana]
  misc_feature (23)..(361): Homolog of NCBI NO: 15227439 NR Description: expressed protein [Arabidopsis thaliana]
  misc_feature (1)..(361): Homolog of NCBI NO: 30102997 NR Description: unknown protein [Oryza sativa (japonica
  misc_feature (1)..(362): Homolog of NCBI NO: 15227437 NR Description: expressed protein [Arabidopsis thaliana]
  misc_feature (43)..(365): Homolog of NCBI NO: 12321555 NR Description: unknown protein, 5' partial [Arabidopsis thaliana]
  misc_feature (1)..(365): Homolog of NCBI NO: 18398135 NR Description: expressed protein [Arabidopsis thaliana]

SEQ ID NO: 37649 - protein, 323 aa, Arabidopsis thaliana; identical to SEQ ID NO: 20835
  peptide (1)..(323): Ceres Seq. ID no. 13486856
  misc_feature (1)..(323): Pfam Name: Protein of unknown function, DUF642 Pfam Description: Protein of unknown function, DUF642
  misc_feature (1)..(323): Pfam Name: Protein of unknown function, DUF642 Pfam Description: Protein of unknown function, DUF642
  misc_feature (1)..(317): Homolog of NCBI NO: 15239049 NR Description: expressed protein [Arabidopsis thaliana]
  misc_feature (1)..(317): Homolog of NCBI NO: 21537379 NR Description: unknown [Arabidopsis thaliana]
  misc_feature (1)..(317): Homolog of NCBI NO: 15809822 NR Description: AT5g25460/F18G18_200 [Arabidopsis thaliana]
  misc_feature (1)..(317): Homolog of NCBI NO: 15239438 NR Description: expressed protein [Arabidopsis thaliana]
  misc_feature (1)..(317): Homolog of NCBI NO: 7488898 NR Description: hypothetical protein - castor bean
  misc_feature (1)..(317): Homolog of NCBI NO: 15239049 NR Description: expressed protein [Arabidopsis thaliana]
  misc_feature (1)..(317): Homolog of NCBI NO: 15809822 NR Description: AT5g25460/F18G18_200 [Arabidopsis thaliana]
  misc_feature (1)..(317): Homolog of NCBI NO: 7488898 NR Description: hypothetical protein - castor bean
  misc_feature (1)..(323): Homolog of NCBI NO: 18398135 NR Description: expressed protein [Arabidopsis thaliana]
  misc_feature (1)..(323): Homolog of NCBI NO: 12321555 NR Description: unknown protein, 5' partial [Arabidopsis thaliana]
  misc_feature (1)..(320): Homolog of NCBI NO: 15227437 NR Description: expressed protein [Arabidopsis thaliana]
  misc_feature (1)..(319): Homolog of NCBI NO: 30102997 NR Description: unknown protein [Oryza sativa (japonica
  misc_feature (1)..(319): Homolog of NCBI NO: 15227439 NR Description: expressed protein [Arabidopsis thaliana]
  misc_feature (1)..(317): Homolog of NCBI NO: 15239438 NR Description: expressed protein [Arabidopsis thaliana]
  misc_feature (1)..(317): Homolog of NCBI NO: 21537379 NR Description: unknown [Arabidopsis thaliana]
  misc_feature (1)..(319): Homolog of NCBI NO: 15227439 NR Description: expressed protein [Arabidopsis thaliana]
  misc_feature (1)..(319): Homolog of NCBI NO: 30102997 NR Description: unknown protein [Oryza sativa (japonica
  misc_feature (1)..(320): Homolog of NCBI NO: 15227437 NR Description: expressed protein [Arabidopsis thaliana]
  misc_feature (1)..(323): Homolog of NCBI NO: 12321555 NR Description: unknown protein, 5' partial [Arabidopsis thaliana]
  misc_feature (1)..(323): Homolog of NCBI NO: 18398135 NR Description: expressed protein [Arabidopsis thaliana]

SEQ ID NO: 37650 - DNA, 1411 bp, Arabidopsis thaliana
  misc_feature (1)..(1411): Ceres Seq. ID no. 13491583
  misc_feature: MA Experiment ID: 108573 Result: Up-regulated in Transcription
  misc_feature: MA Experiment 108573 PARAMETER Experiment Name: At_Drought_cDNA_P Parameter: Timepoint (hr) Value: 6
  misc_feature: MA Experiment 108573 PARAMETER Experiment Name: At_Drought_cDNA_P Parameter: Tissue Value: Aerial
  misc_feature: MA Experiment 108573 PARAMETER Experiment Name: At_Drought_cDNA_P Parameter: Treatment Value: Drought vs. No Drought
  misc_feature: MA Experiment ID: 108576 Result: Up-regulated in Transcription
  misc_feature: MA Experiment 108576 PARAMETER Experiment Name: At_42deg_Heat_cDNA_P Parameter: Temperature (deg C) Value: 42 vs. 22
  misc_feature: MA Experiment 108576 PARAMETER Experiment Name: At_42deg_Heat_cDNA_P Parameter: Timepoint (hr) Value: 1
  misc_feature: MA Experiment 108576 PARAMETER Experiment Name: At_42deg_Heat_cDNA_P Parameter: Tissue Value: Aerial
  misc_feature: MA Experiment ID: 108577 Result: Up-regulated in Transcription
  misc_feature: MA Experiment 108577 PARAMETER Experiment Name: At_42deg_Heat_cDNA_P Parameter: Temperature (deg C) Value: 42 vs. 22
  misc_feature: MA Experiment 108577 PARAMETER Experiment Name: At_42deg_Heat_cDNA_P Parameter: Timepoint (hr) Value: 6
  misc_feature: MA Experiment 108577 PARAMETER Experiment Name: At_42deg_Heat_cDNA_P Parameter: Tissue Value: Aerial
  misc_feature: MA Experiment ID: 20000093 Result: Up-regulated in Transcription
  misc_feature: MA Experiment 20000093 PARAMETER Experiment Name: At_42deg_Heat_cDNA_P Parameter: Temperature (deg C) Value: 42 vs. 22
  misc_feature: MA Experiment 20000093 PARAMETER Experiment Name: At_42deg_Heat_cDNA_P Parameter: Timepoint (hr) Value: 0.5
  misc_feature: MA Experiment 20000093 PARAMETER Experiment Name: At_42deg_Heat_cDNA_P Parameter: Tissue Value: Aerial
  misc_feature: MA Experiment ID: 20000111 Result: Up-regulated in Transcription
  misc_feature: MA Experiment 20000111 PARAMETER Experiment Name: At_42deg_Heat_cDNA_P Parameter: Temperature (deg C) Value: 42 vs. 22
  misc_feature: MA Experiment 20000111 PARAMETER Experiment Name: At_42deg_Heat_cDNA_P Parameter: Timepoint (hr) Value: 6
  misc_feature: MA Experiment 20000111 PARAMETER Experiment Name: At_42deg_Heat_cDNA_P Parameter: Tissue Value: Aerial
  misc_feature: MA Experiment ID: 20000112 Result: Up-regulated in Transcription
  misc_feature: MA Experiment 20000112 PARAMETER Experiment Name: At_42deg_Heat_cDNA_P Parameter: Temperature (deg C) Value: 42 vs. 22
  misc_feature: MA Experiment 20000112 PARAMETER Experiment Name: At_42deg_Heat_cDNA_P Parameter: Timepoint (hr) Value: 2
  misc_feature: MA Experiment 20000112 PARAMETER Experiment Name: At_42deg_Heat_cDNA_P Parameter: Tissue Value: Aerial
  misc_feature: MA Experiment ID: 20000113 Result: Up-regulated in Transcription
  misc_feature: MA Experiment 20000113 PARAMETER Experiment Name: At_42deg_Heat_cDNA_P Parameter: Temperature (deg C) Value: 42 vs. 22
  misc_feature: MA Experiment 20000113 PARAMETER Experiment Name: At_42deg_Heat_cDNA_P Parameter: Timepoint (hr) Value: 8
  misc_feature: MA Experiment 20000113 PARAMETER Experiment Name: At_42deg_Heat_cDNA_P Parameter: Tissue Value: Aerial
  misc_feature: MA Experiment ID: 20000144 Result: Up-regulated in Transcription
  misc_feature: MA Experiment 20000144 PARAMETER Experiment Name: At_42deg_Heat_cDNA_P Parameter: Temperature (deg C) Value: 42 vs. 22
  misc_feature: MA Experiment 20000144 PARAMETER Experiment Name: At_42deg_Heat_cDNA_P Parameter: Timepoint (hr) Value: 1
  misc_feature: MA Experiment 20000144 PARAMETER Experiment Name: At_42deg_Heat_cDNA_P Parameter: Tissue Value: Aerial
  misc_feature: MA Experiment ID: 20000171 Result: Up-regulated in Transcription
  misc_feature: MA Experiment 20000171 PARAMETER Experiment Name: At_42deg_Heat_P Parameter: Age (day) Value: 14
  misc_feature: MA Experiment 20000171 PARAMETER Experiment Name: At_42deg_Heat_P Parameter: Organism Value: A. thaliana
  misc_feature: MA Experiment 20000171 PARAMETER Experiment Name: At_42deg_Heat_P Parameter: Plant Line Value: WS
  misc_feature: MA Experiment 20000171 PARAMETER Experiment Name: At_42deg_Heat_P Parameter: Temperature (deg C) Value: 42 vs. 22
  misc_feature: MA Experiment 20000171 PARAMETER Experiment Name: At_42deg_Heat_P Parameter: Timepoint (hr) Value: 1
  misc_feature: MA Experiment 20000171 PARAMETER Experiment Name: At_42deg_Heat_P Parameter: Tissue Value: Aerial
  misc_feature: MA Experiment ID: 20000173 Result: Up-regulated in Transcription
  misc_feature: MA Experiment 20000173 PARAMETER Experiment Name: At_42deg_Heat_P Parameter: Age (day) Value: 14
  misc_feature: MA Experiment 20000173 PARAMETER Experiment Name: At_42deg_Heat_P Parameter: Organism Value: A. thaliana
  misc_feature: MA Experiment 20000173 PARAMETER Experiment Name: At_42deg_Heat_P Parameter: Plant Line Value: WS
  misc_feature: MA Experiment 20000173 PARAMETER Experiment Name: At_42deg_Heat_P Parameter: Temperature (deg C) Value: 42 vs. 22
  misc_feature: MA Experiment 20000173 PARAMETER Experiment Name: At_42deg_Heat_P Parameter: Timepoint (hr) Value: 6
  misc_feature: MA Experiment 20000173 PARAMETER Experiment Name: At_42deg_Heat_P Parameter: Tissue Value: Aerial
  misc_feature: MA Experiment ID: 20000185 Result: Down-regulated in Transcription
  misc_feature: MA Experiment 20000185 PARAMETER Experiment Name: At_Roots__P Parameter: Age (day) Value: 7 vs. 21
  misc_feature: MA Experiment 20000185 PARAMETER Experiment Name: At_Roots__P Parameter: Organism Value: A. thaliana
  misc_feature: MA Experiment 20000185 PARAMETER Experiment Name: At_Roots__P Parameter: Tissue Value: Roots vs. Whole Plant
  misc_feature: MA Experiment ID: 20000227 Result: Down-regulated in Transcription
  misc_feature: MA Experiment 20000227 PARAMETER Experiment Name: At_Root-Tips-vs-Tops_P Parameter: Tissue Value: Root Tips vs. Root Tops
  misc_feature: MA Experiment ID: 20000234 Result: Down-regulated in Transcription
  misc_feature: MA Experiment 20000234 PARAMETER Experiment Name: At_Siliques_P Parameter: Age (day) Value: 21
  misc_feature: MA Experiment 20000234 PARAMETER Experiment Name: At_Siliques_P Parameter: Organism Value: A. thaliana
  misc_feature: MA Experiment 20000234 PARAMETER Experiment Name: At_Siliques_P Parameter: Plant Line Value: WS
  misc_feature: MA Experiment 20000234 PARAMETER Experiment Name: At_Siliques_P Parameter: Tissue Value: Less Than 5mm Siliques vs. Whole Plant
  misc_feature: MA Experiment ID: 20000235 Result: Down-regulated in Transcription
  misc_feature: MA Experiment 20000235 PARAMETER Experiment Name: At_Siliques_P Parameter: Age (day) Value: 21
  misc_feature: MA Experiment 20000235 PARAMETER Experiment Name: At_Siliques_P Parameter: Organism Value: A. thaliana
  misc_feature: MA Experiment 20000235 PARAMETER Experiment Name: At_Siliques_P Parameter: Plant Line Value: WS
  misc_feature: MA Experiment 20000235 PARAMETER Experiment Name: At_Siliques_P Parameter: Tissue Value: 5-10mm Siliques vs. Whole Plant
  misc_feature: MA Experiment ID: 20000264 Result: Down-regulated in Transcription
  misc_feature: MA Experiment 20000264 PARAMETER Experiment Name: At_Open_Flower_P Parameter: Age (day) Value: 21
  misc_feature: MA Experiment 20000264 PARAMETER Experiment Name: At_Open_Flower_P Parameter: Plant Line Value: WS
  misc_feature: MA Experiment 20000264 PARAMETER Experiment Name: At_Open_Flower_P Parameter: Tissue Value: Open Flower vs. Whole Plant
  misc_feature: MA Experiment ID: 20000265 Result: Down-regulated in Transcription
  misc_feature: MA Experiment 20000265 PARAMETER Experiment Name: At_Open_Flower_P Parameter: Age (day) Value: 21
  misc_feature: MA Experiment 20000265 PARAMETER Experiment Name: At_Open_Flower_P Parameter: Plant Line Value: WS
  misc_feature: MA Experiment 20000265 PARAMETER Experiment Name: At_Open_Flower_P Parameter: Tissue Value: Closed Flower vs. Whole Plant
  misc_feature: MA Experiment ID: 20000438 Result: Down-regulated in Transcription
  misc_feature: MA Experiment 20000438 PARAMETER Experiment Name: At_Shoots__P Parameter: Age (day) Value: 14
  misc_feature: MA Experiment 20000438 PARAMETER Experiment Name: At_Shoots__P Parameter: Tissue Value: Shoots vs. Whole Plant
  misc_feature: MA Experiment ID: 20001558 Result: Down-regulated in Transcription
  misc_feature: MA Experiment 20001558 PARAMETER Experiment Name: At_Drought_Soil_Dry_P Parameter: Age (day) Value: 27
  misc_feature: MA Experiment 20001558 PARAMETER Experiment Name: At_Drought_Soil_Dry_P Parameter: Organism Value: A. thaliana
  misc_feature: MA Experiment 20001558 PARAMETER Experiment Name: At_Drought_Soil_Dry_P Parameter: Plant Line Value: WS
  misc_feature: MA Experiment 20001558 PARAMETER Experiment Name: At_Drought_Soil_Dry_P Parameter: Post Timepoint (hr) Value: 6
  misc_feature: MA Experiment 20001558 PARAMETER Experiment Name: At_Drought_Soil_Dry_P Parameter: Post-Treatment Value: Re-Water vs. No Drought
  misc_feature: MA Experiment 20001558 PARAMETER Experiment Name: At_Drought_Soil_Dry_P Parameter: Timepoint (day) Value: 13
  misc_feature: MA Experiment 20001558 PARAMETER Experiment Name: At_Drought_Soil_Dry_P Parameter: Treatment Value: Drought vs. No Drought
  misc_feature: MA Experiment ID: 20001911 Result: Up-regulated in Transcription
  misc_feature: MA Experiment 20001911 PARAMETER Experiment Name: At_Drought_Reproduction_P Parameter: Age (day) Value: 40
  misc_feature: MA Experiment 20001911 PARAMETER Experiment Name: At_Drought_Reproduction_P Parameter: Organism Value: A. thaliana
  misc_feature: MA Experiment 20001911 PARAMETER Experiment Name: At_Drought_Reproduction_P Parameter: Plant Line Value: WS
  misc_feature: MA Experiment 20001911 PARAMETER Experiment Name: At_Drought_Reproduction_P Parameter: Timepoint (day) Value: 10
  misc_feature: MA Experiment 20001911 PARAMETER Experiment Name: At_Drought_Reproduction_P Parameter: Tissue Value: Flowers
  misc_feature: MA Experiment 20001911 PARAMETER Experiment Name: At_Drought_Reproduction_P Parameter: Treatment Value: Drought vs. No Drought
agctctctctctctctctcgttaacgcttcggcgaaaaatccacgagtcagcttttactgatttgtacaaaaaatggatggatcaaagcatccatcagtctttcagaagctacatggacaatcttacttgatcaatagactttctccgagtgtgcaagctcgtggttactgtgtctctggtgcttatgtcaatggaggtttgcagagtctattgcagccaactagccatggcgttggctcgtctcttatacctcatggttcatttcctgtattagctcacgctcctagtgagaaaactggtactggtttcttgatcgatttccttatgggaggagtctcagctgctgtttcgaagacggcagccgcgcctatagagcgtgtgaagctcttgattcagaatcaagatgaaatgatcaaagctgggcgtctctctgagccatataaaggaatcagtgattgttttgctcgaacggtcaaagacgaaggaatgcttgctctttggagaggaaacactgccaatgttatcagatacttccccactcaggctttaaactttgcgttcaaagactacttcaagaggctgtttaacttcaagaaagaaaaagatggctactggaagtggtttgcagggaacctggcgtctggtggtgcagctggtgcatcatctctgctttttgtgtactctttggattacgctcgtacccgtttagccaatgatgcgaaggcggccaagaaaggtggtcagcggcagtttaatggcatggtcgacgtgtacaagaagactatagcctctgatggcattgtcgggctttaccgtggtttcaacatctcatgcgttggaattgtcgtgtaccgggggctttactttggattgtatgattccttgaagcctgtggttctagttgatggtctccaggatagcttccttgctagtttcttactgggatggggaatcaccattggagctggattggcgtcttacccaattgacacggttcgcagaagaatgatgatgacgtcaggtgaagcagtgaagtacaagagctctcttcaggccttctctcagatcgtcaagaacgaaggggccaagtcactcttcaagggtgcaggtgccaacatccttcgtgcggttgcaggcgctggtgtactggccggctatgacaagctccagctcattgtgttgggtaagaagtatggctctggtggtggctaaacgatgaggatgatgaaagaatagcccttgaggtctgtgaatgaataaagcagtgtgtccgttcgtataaatgttgcttttagaatatagagtgtctctgtcaagttgtggccctttgtcttagttctatacttctatgacttttgttgacaaaagaataaatacaaagaaaaccaataccatgtttatgttttttgt

SEQ ID NO: 37651 - protein, 379 aa, Arabidopsis thaliana
  peptide (1)..(379): Ceres Seq. ID no. 13491584
  misc_feature (2)..(378): Homolog of NCBI NO: 22166 NR Description: adenine nucleotide translocator [Zea mays]
  misc_feature (2)..(378): Homolog of NCBI NO: 113457 NR Description: ADP,ATP carrier protein, mitochondrial precursor
  misc_feature (1)..(378): Homolog of NCBI NO: 3334115 NR Description: ADP,ATP carrier protein 1, mitochondrial (ADP/ATP translocase 1) (Adenine nucleotide translocator 1) (ANT
  misc_feature (4)..(378): Homolog of NCBI NO: 485517 NR Description: ADP,ATP carrier protein - rice
  misc_feature (2)..(378): Homolog of NCBI NO: 113460 NR Description: ADP,ATP carrier protein 2, mitochondrial (ADP/ATP translocase 2) (Adenine nucleotide translocator 2) (ANT
  misc_feature (2)..(378): Homolog of NCBI NO: 113456 NR Description: ADP,ATP carrier protein 1, mitochondrial (ADP/ATP translocase 1) (Adenine nucleotide translocator 1) (ANT
  misc_feature (2)..(378): Homolog of NCBI NO: 100424 NR Description: ADP,ATP carrier protein precursor - potato
  misc_feature (4)..(378): Homolog of NCBI NO: 399015 NR Description: ADP,ATP carrier protein, mitochondrial precursor
  misc_feature (1)..(379): Homolog of NCBI NO: 21593729 NR Description: ADP,ATP carrier-like protein [Arabidopsis
  misc_feature (1)..(379): Homolog of NCBI NO: 15235280 NR Description: mitochondrial ADP,ATP carrier protein, putative
MDGSKHPSVFQKLHGQSYLINRLSPSVQARGYCVSGAYVNGGLQSLLQPTSHGVGSSLIPHGSFPVLAHAPSEKTGTGFLIDFLMGGVSAAVSKTAAAPIERVKLLIQNQDEMIKAGRLSEPYKGISDCFARTVKDEGMLALWRGNTANVIRYFPTQALNFAFKDYFKRLFNFKKEKDGYWKWFAGNLASGGAAGASSLLFVYSLDYARTRLANDAKAAKKGGQRQFNGMVDVYKKTIASDGIVGLYRGFNISCVGIVVYRGLYFGLYDSLKPVVLVDGLQDSFLASFLLGWGITIGAGLASYPIDTVRRRMMMTSGEAVKYKSSLQAFSQIVKNEGAKSLFKGAGANILRAVAGAGVLAGYDKLQLIVLGKKYGSGGG

SEQ ID NO: 37652 - protein, 295 aa, Arabidopsis thaliana
  peptide (1)..(295): Ceres Seq. ID no. 13491585
  misc_feature (1)..(294): Homolog of NCBI NO: 22166 NR Description: adenine nucleotide translocator [Zea mays]
  misc_feature (1)..(294): Homolog of NCBI NO: 113457 NR Description: ADP,ATP carrier protein, mitochondrial precursor
  misc_feature (1)..(294): Homolog of NCBI NO: 3334115 NR Description: ADP,ATP carrier protein 1, mitochondrial (ADP/ATP translocase 1) (Adenine nucleotide translocator 1) (ANT
  misc_feature (1)..(294): Homolog of NCBI NO: 485517 NR Description: ADP,ATP carrier protein - rice
  misc_feature (1)..(294): Homolog of NCBI NO: 113460 NR Description: ADP,ATP carrier protein 2, mitochondrial (ADP/ATP translocase 2) (Adenine nucleotide translocator 2) (ANT
  misc_feature (1)..(294): Homolog of NCBI NO: 113456 NR Description: ADP,ATP carrier protein 1, mitochondrial (ADP/ATP translocase 1) (Adenine nucleotide translocator 1) (ANT
  misc_feature (1)..(294): Homolog of NCBI NO: 100424 NR Description: ADP,ATP carrier protein precursor - potato
  misc_feature (1)..(294): Homolog of NCBI NO: 399015 NR Description: ADP,ATP carrier protein, mitochondrial precursor
  misc_feature (1)..(295): Homolog of NCBI NO: 21593729 NR Description: ADP,ATP carrier-like protein [Arabidopsis
  misc_feature (1)..(295): Homolog of NCBI NO: 15235280 NR Description: mitochondrial ADP,ATP carrier protein, putative
MGGVSAAVSKTAAAPIERVKLLIQNQDEMIKAGRLSEPYKGISDCFARTVKDEGMLALWRGNTANVIRYFPTQALNFAFKDYFKRLFNFKKEKDGYWKWFAGNLASGGAAGASSLLFVYSLDYARTRLANDAKAAKKGGQRQFNGMVDVYKKTIASDGIVGLYRGFNISCVGIVVYRGLYFGLYDSLKPVVLVDGLQDSFLASFLLGWGITIGAGLASYPIDTVRRRMMMTSGEAVKYKSSLQAFSQIVKNEGAKSLFKGAGANILRAVAGAGVLAGYDKLQLIVLGKKYGSGGG

SEQ ID NO: 37653 - protein, 267 aa, Arabidopsis thaliana
  peptide (1)..(267): Ceres Seq. ID no. 13491586
  misc_feature (1)..(266): Homolog of NCBI NO: 22166 NR Description: adenine nucleotide translocator [Zea mays]
  misc_feature (1)..(266): Homolog of NCBI NO: 113457 NR Description: ADP,ATP carrier protein, mitochondrial precursor
  misc_feature (1)..(266): Homolog of NCBI NO: 3334115 NR Description: ADP,ATP carrier protein 1, mitochondrial (ADP/ATP translocase 1) (Adenine nucleotide translocator 1) (ANT
  misc_feature (1)..(266): Homolog of NCBI NO: 485517 NR Description: ADP,ATP carrier protein - rice
  misc_feature (1)..(266): Homolog of NCBI NO: 113460 NR Description: ADP,ATP carrier protein 2, mitochondrial (ADP/ATP translocase 2) (Adenine nucleotide translocator 2) (ANT
  misc_feature (1)..(266): Homolog of NCBI NO: 113456 NR Description: ADP,ATP carrier protein 1, mitochondrial (ADP/ATP translocase 1) (Adenine nucleotide translocator 1) (ANT
  misc_feature (1)..(266): Homolog of NCBI NO: 100424 NR Description: ADP,ATP carrier protein precursor - potato
  misc_feature (1)..(266): Homolog of NCBI NO: 399015 NR Description: ADP,ATP carrier protein, mitochondrial precursor
  misc_feature (1)..(267): Homolog of NCBI NO: 21593729 NR Description: ADP,ATP carrier-like protein [Arabidopsis
  misc_feature (1)..(267): Homolog of NCBI NO: 15235280 NR Description: mitochondrial ADP,ATP carrier protein, putative
MIKAGRLSEPYKGISDCFARTVKDEGMLALWRGNTANVIRYFPTQALNFAFKDYFKRLFNFKKEKDGYWKWFAGNLASGGAAGASSLLFVYSLDYARTRLANDAKAAKKGGQRQFNGMVDVYKKTIASDGIVGLYRGFNISCVGIVVYRGLYFGLYDSLKPVVLVDGLQDSFLASFLLGWGITIGAGLASYPIDTVRRRMMMTSGEAVKYKSSLQAFSQIVKNEGAKSLFKGAGANILRAVAGAGVLAGYDKLQLIVLGKKYGSGGG

SEQ ID NO: 37654 - DNA, 1356 bp, Arabidopsis thaliana
  misc_feature (1)..(1356): Ceres Seq. ID no. 13488086
  misc_feature: MA Experiment ID: 108433 Result: Down-regulated in Transcription
  misc_feature: MA Experiment 108433 PARAMETER Experiment Name: At_rhl_Mutant2_cDNA_P Parameter: Age (day) Value: 7
  misc_feature: MA Experiment 108433 PARAMETER Experiment Name: At_rhl_Mutant2_cDNA_P Parameter: Organism Value: A. thaliana
  misc_feature: MA Experiment 108433 PARAMETER Experiment Name: At_rhl_Mutant2_cDNA_P Parameter: Plant Line Value: rhl Mutant vs. wt landsburg
  misc_feature: MA Experiment 108433 PARAMETER Experiment Name: At_rhl_Mutant2_cDNA_P Parameter: Tissue Value: Roots
  misc_feature: MA Experiment ID: 108434 Result: Up-regulated in Transcription
  misc_feature: MA Experiment 108434 PARAMETER Experiment Name: At_Root_Tips_cDNA_P Parameter: Tissue Value: Root Tips
  misc_feature: MA Experiment ID: 108561 Result: Down-regulated in Transcription
  misc_feature: MA Experiment 108561 PARAMETER Experiment Name: At_100uM_ABA_cDNA_P Parameter: Timepoint (hr) Value: 6
  misc_feature: MA Experiment 108561 PARAMETER Experiment Name: At_100uM_ABA_cDNA_P Parameter: Tissue Value: Aerial
  misc_feature: MA Experiment 108561 PARAMETER Experiment Name: At_100uM_ABA_cDNA_P Parameter: Treatment Value: 100uM ABA vs. No Treatment
  misc_feature: MA Experiment ID: 108573 Result: Down-regulated in Transcription
  misc_feature: MA Experiment 108573 PARAMETER Experiment Name: At_Drought_cDNA_P Parameter: Timepoint (hr) Value: 6
  misc_feature: MA Experiment 108573 PARAMETER Experiment Name: At_Drought_cDNA_P Parameter: Tissue Value: Aerial
  misc_feature: MA Experiment 108573 PARAMETER Experiment Name: At_Drought_cDNA_P Parameter: Treatment Value: Drought vs. No Drought
  misc_feature: MA Experiment ID: 108576 Result: Down-regulated in Transcription
  misc_feature: MA Experiment 108576 PARAMETER Experiment Name: At_42deg_Heat_cDNA_P Parameter: Temperature (deg C) Value: 42 vs. 22
  misc_feature: MA Experiment 108576 PARAMETER Experiment Name: At_42deg_Heat_cDNA_P Parameter: Timepoint (hr) Value: 1
  misc_feature: MA Experiment 108576 PARAMETER Experiment Name: At_42deg_Heat_cDNA_P Parameter: Tissue Value: Aerial
  misc_feature: MA Experiment ID: 108577 Result: Down-regulated in Transcription
  misc_feature: MA Experiment 108577 PARAMETER Experiment Name: At_42deg_Heat_cDNA_P Parameter: Temperature (deg C) Value: 42 vs. 22
  misc_feature: MA Experiment 108577 PARAMETER Experiment Name: At_42deg_Heat_cDNA_P Parameter: Timepoint (hr) Value: 6
  misc_feature: MA Experiment 108577 PARAMETER Experiment Name: At_42deg_Heat_cDNA_P Parameter: Tissue Value: Aerial
  misc_feature: MA Experiment ID: 108605 Result: Down-regulated in Transcription
  misc_feature: MA Experiment 108605 PARAMETER Experiment Name: At_100uM_ABA_cDNA_P Parameter: Timepoint (hr) Value: 6
  misc_feature: MA Experiment 108605 PARAMETER Experiment Name: At_100uM_ABA_cDNA_P Parameter: Tissue Value: Aerial
  misc_feature: MA Experiment 108605 PARAMETER Experiment Name: At_100uM_ABA_cDNA_P Parameter: Treatment Value: 100uM ABA vs. No Treatment
  misc_feature: MA Experiment ID: 108607 Result: Down-regulated in Transcription
  misc_feature: MA Experiment 108607 PARAMETER Experiment Name: At_100uM_ABA_cDNA_P Parameter: Timepoint (hr) Value: 4
  misc_feature: MA Experiment 108607 PARAMETER Experiment Name: At_100uM_ABA_cDNA_P Parameter: Tissue Value: Aerial
  misc_feature: MA Experiment 108607 PARAMETER Experiment Name: At_100uM_ABA_cDNA_P Parameter: Treatment Value: 100uM ABA vs. No Treatment
  misc_feature: MA Experiment ID: 108668 Result: Down-regulated in Transcription
  misc_feature: MA Experiment 108668 PARAMETER Experiment Name: At_2mM_SA_cDNA_P Parameter: Plant Line Value: WS
  misc_feature: MA Experiment 108668 PARAMETER Experiment Name: At_2mM_SA_cDNA_P Parameter: Timepoint (hr) Value: 6
  misc_feature: MA Experiment 108668 PARAMETER Experiment Name: At_2mM_SA_cDNA_P Parameter: Treatment Value: 2mM SA vs. No Treatment
  misc_feature: MA Experiment ID: 20000173 Result: Down-regulated in Transcription
  misc_feature: MA Experiment 20000173 PARAMETER Experiment Name: At_42deg_Heat_P Parameter: Age (day) Value: 14
  misc_feature: MA Experiment 20000173 PARAMETER Experiment Name: At_42deg_Heat_P Parameter: Organism Value: A. thaliana
  misc_feature: MA Experiment 20000173 PARAMETER Experiment Name: At_42deg_Heat_P Parameter: Plant Line Value: WS
  misc_feature: MA Experiment 20000173 PARAMETER Experiment Name: At_42deg_Heat_P Parameter: Temperature (deg C) Value: 42 vs. 22
  misc_feature: MA Experiment 20000173 PARAMETER Experiment Name: At_42deg_Heat_P Parameter: Timepoint (hr) Value: 6
  misc_feature: MA Experiment 20000173 PARAMETER Experiment Name: At_42deg_Heat_P Parameter: Tissue Value: Aerial
  misc_feature: MA Experiment ID: 20000182 Result: Down-regulated in Transcription
  misc_feature: MA Experiment 20000182 PARAMETER Experiment Name: At_2mM_SA_P Parameter: Age (day) Value: 14
  misc_feature: MA Experiment 20000182 PARAMETER Experiment Name: At_2mM_SA_P Parameter: Organism Value: A. thaliana
  misc_feature: MA Experiment 20000182 PARAMETER Experiment Name: At_2mM_SA_P Parameter: Plant Line Value: WS
  misc_feature: MA Experiment 20000182 PARAMETER Experiment Name: At_2mM_SA_P Parameter: Timepoint (hr) Value: 6
  misc_feature: MA Experiment 20000182 PARAMETER Experiment Name: At_2mM_SA_P Parameter: Tissue Value: Aerial
  misc_feature: MA Experiment 20000182 PARAMETER Experiment Name: At_2mM_SA_P Parameter: Treatment Value: 2mM SA vs. No Treatment
  misc_feature: MA Experiment ID: 20000184 Result: Up-regulated in Transcription
  misc_feature: MA Experiment 20000184 PARAMETER Experiment Name: At_Shoots__P Parameter: Age (day) Value: 7
  misc_feature: MA Experiment 20000184 PARAMETER Experiment Name: At_Shoots__P Parameter: Tissue Value: Shoots vs. Whole Plant
  misc_feature: MA Experiment ID: 20000234 Result: Up-regulated in Transcription
  misc_feature: MA Experiment 20000234 PARAMETER Experiment Name: At_Siliques_P Parameter: Age (day) Value: 21
  misc_feature: MA Experiment 20000234 PARAMETER Experiment Name: At_Siliques_P Parameter: Organism Value: A. thaliana
  misc_feature: MA Experiment 20000234 PARAMETER Experiment Name: At_Siliques_P Parameter: Plant Line Value: WS
  misc_feature: MA Experiment 20000234 PARAMETER Experiment Name: At_Siliques_P Parameter: Tissue Value: Less Than 5mm Siliques vs. Whole Plant
  misc_feature: MA Experiment ID: 20000264 Result: Up-regulated in Transcription
  misc_feature: MA Experiment 20000264 PARAMETER Experiment Name: At_Open_Flower_P Parameter: Age (day) Value: 21
  misc_feature: MA Experiment 20000264 PARAMETER Experiment Name: At_Open_Flower_P Parameter: Plant Line Value: WS
  misc_feature: MA Experiment 20000264 PARAMETER Experiment Name: At_Open_Flower_P Parameter: Tissue Value: Open Flower vs. Whole Plant
  misc_feature: MA Experiment ID: 20000265 Result: Up-regulated in Transcription
  misc_feature: MA Experiment 20000265 PARAMETER Experiment Name: At_Open_Flower_P Parameter: Age (day) Value: 21
  misc_feature: MA Experiment 20000265 PARAMETER Experiment Name: At_Open_Flower_P Parameter: Plant Line Value: WS
  misc_feature: MA Experiment 20000265 PARAMETER Experiment Name: At_Open_Flower_P Parameter: Tissue Value: Closed Flower vs. Whole Plant
  misc_feature: MA Experiment ID: 20000286 Result: Up-regulated in Transcription
  misc_feature: MA Experiment 20000286 PARAMETER Experiment Name: At_Open_Flower_P Parameter: Age (day) Value: 21
  misc_feature: MA Experiment 20000286 PARAMETER Experiment Name: At_Open_Flower_P Parameter: Plant Line Value: WS
  misc_feature: MA Experiment 20000286 PARAMETER Experiment Name: At_Open_Flower_P Parameter: Tissue Value: Half Open vs. Whole Plant
  misc_feature: MA Experiment ID: 20000437 Result: Down-regulated in Transcription
  misc_feature: MA Experiment 20000437 PARAMETER Experiment Name: At_Drought_P Parameter: Age (day) Value: 8
  misc_feature: MA Experiment 20000437 PARAMETER Experiment Name: At_Drought_P Parameter: Organism Value: A. thaliana
  misc_feature: MA Experiment 20000437 PARAMETER Experiment Name: At_Drought_P Parameter: Plant Line Value: WS
  misc_feature: MA Experiment 20000437 PARAMETER Experiment Name: At_Drought_P Parameter: Timepoint (hr) Value: 24
  misc_feature: MA Experiment 20000437 PARAMETER Experiment Name: At_Drought_P Parameter: Tissue Value: Whole Plant
  misc_feature: MA Experiment 20000437 PARAMETER Experiment Name: At_Drought_P Parameter: Treatment Value: Drought vs. No Drought
  misc_feature: MA Experiment ID: 20000438 Result: Up-regulated in Transcription
  misc_feature: MA Experiment 20000438 PARAMETER Experiment Name: At_Shoots__P Parameter: Age (day) Value: 14
  misc_feature: MA Experiment 20000438 PARAMETER Experiment Name: At_Shoots__P Parameter: Tissue Value: Shoots vs. Whole Plant
  misc_feature: MA Experiment ID: 20000794 Result: Down-regulated in Transcription
  misc_feature: MA Experiment 20000794 PARAMETER Experiment Name: At_Petals_P Parameter: Age (day) Value: 23-25 days
  misc_feature: MA Experiment 20000794 PARAMETER Experiment Name: At_Petals_P Parameter: Plant Line Value: WS
  misc_feature: MA Experiment 20000794 PARAMETER Experiment Name: At_Petals_P Parameter: Tissue Value: Petals vs. Whole plant
  misc_feature: MA Experiment ID: 20001560 Result: Up-regulated in Transcription
  misc_feature: MA Experiment 20001560 PARAMETER Experiment Name: At_Drought_Soil_Dry_P Parameter: Age (day) Value: 28
  misc_feature: MA Experiment 20001560 PARAMETER Experiment Name: At_Drought_Soil_Dry_P Parameter: Organism Value: A. thaliana
  misc_feature: MA Experiment 20001560 PARAMETER Experiment Name: At_Drought_Soil_Dry_P Parameter: Plant Line Value: WS
  misc_feature: MA Experiment 20001560 PARAMETER Experiment Name: At_Drought_Soil_Dry_P Parameter: Post Timepoint (hr) Value: None
  misc_feature: MA Experiment 20001560 PARAMETER Experiment Name: At_Drought_Soil_Dry_P Parameter: Post-Treatment Value: None
  misc_feature: MA Experiment 20001560 PARAMETER Experiment Name: At_Drought_Soil_Dry_P Parameter: Timepoint (day) Value: 14
  misc_feature: MA Experiment 20001560 PARAMETER Experiment Name: At_Drought_Soil_Dry_P Parameter: Treatment Value: Drought vs. No Drought
  misc_feature: MA Experiment ID: 20001757 Result: Up-regulated in Transcription
  misc_feature: MA Experiment 20001757 PARAMETER Experiment Name: At_50mM_NH4NO3_L-to-H_P Parameter: Timepoint (hr) Value: 6
  misc_feature: MA Experiment 20001757 PARAMETER Experiment Name: At_50mM_NH4NO3_L-to-H_P Parameter: Tissue Value: Leaf
  misc_feature: MA Experiment 20001757 PARAMETER Experiment Name: At_50mM_NH4NO3_L-to-H_P Parameter: Treatment Value: 50mM NH4NO3 vs 100mM Mannitol
  misc_feature: MA Experiment ID: 20001911 Result: Down-regulated in Transcription
  misc_feature: MA Experiment 20001911 PARAMETER Experiment Name: At_Drought_Reproduction_P Parameter: Age (day) Value: 40
  misc_feature: MA Experiment 20001911 PARAMETER Experiment Name: At_Drought_Reproduction_P Parameter: Organism Value: A. thaliana
  misc_feature: MA Experiment 20001911 PARAMETER Experiment Name: At_Drought_Reproduction_P Parameter: Plant Line Value: WS
  misc_feature: MA Experiment 20001911 PARAMETER Experiment Name: At_Drought_Reproduction_P Parameter: Timepoint (day) Value: 10
  misc_feature: MA Experiment 20001911 PARAMETER Experiment Name: At_Drought_Reproduction_P Parameter: Tissue Value: Flowers
  misc_feature: MA Experiment 20001911 PARAMETER Experiment Name: At_Drought_Reproduction_P Parameter: Treatment Value: Drought vs. No Drought
gaaaagctctagcacaaaccaaacaccaaatctcatttcttcttcttcttctttttccacattttctgattagcagatcaaatgatgcttgttcgatctgtatttcgatctcagttgcgaccctctgtctcgggtggtctgcaatctgcttcttgctattcttcattatctgctgcttcagctgaagctgagaggactatcagagaaggtcccagaaacgattggagtagagatgaaatcaagtctgtttatgattctcctcttcttgacctcctcttccatggagctcaggttcatagacatgttcataacttcagggaggtacaacaatgtaccctcctctccataaagactggtggctgtagtgaagactgttcatattgtcctcagtcttcgagatatagcactggagttaaggcacaaagactcatgtctaaggacgctgtcattgatgctgctaagaaggcaaaagaagctgggagcacacgtttttgcatgggtgctgcttggcgagatacaattggacggaaaaccaacttcagccagattcttgaatacatcaaagaaataagaggcatggggatggaagtttgctgcaccttaggcatgattgagaaacaacaagcactagagctaaagaaggctggcctcactgcttataaccacaatcttgatacttcaagagagtactacccaaacgtcatcactactagaagttatgacgatcgccttgaaactcttagccatgttcgtgatgctggaatcaacgtttgttcaggaggaatcatagggcttggtgaggcagaggaagacagaataggtttattacacacgctggcaacacttccttctcaccctgagagtgttcccattaatgctctacttgcagtgaaaggcactcctcttgaagaccagaagccagttgagatatgggagatgatcaggatgattggaaccgcacgtattgtaatgccaaaagcgatggtgagactgtctgctggtagagtccggttctcaatgtccgaacaagctctctgtttccttgctggtgcaaactctatcttcaccggagagaagcttttaaccacaccaaacaatgattttgacgctgaccagctcatgttcaagacattaggcctcattcctaaaccgccaagtttctctgaagatgattctgaatcagaaaactgcgagaaagttgcttccgcttctcactaatatcattatccacttttttttttgtttggagtcgggacactatagagcagtcccttttactatgtagcatggtttgacgattttgtgatatcatttttcgttaatcgttattcgaagatgtctagatttctcatctga

SEQ ID NO: 37655 - protein, 378 aa, Arabidopsis thaliana
  peptide (1)..(378): Ceres Seq. ID no. 13488087
  misc_feature (88)..(252): Pfam Name: Radical SAM superfamily Pfam Description: Radical SAM superfamily
  misc_feature (43)..(359): Homolog of NCBI NO: 23127772 NR Description: hypothetical protein [Nostoc punctiforme]
  misc_feature (45)..(359): Homolog of NCBI NO: 17229413 NR Description: biotin synthase [Nostoc sp. PCC 7120]
  misc_feature (45)..(353): Homolog of NCBI NO: 2961328 NR Description: Biotin synthase [Schizosaccharomyces pombe]
  misc_feature (28)..(358): Homolog of NCBI NO: 32405370 NR Description: hypothetical protein [Neurospora crassa]
  misc_feature (45)..(353): Homolog of NCBI NO: 19075228 NR Description: biotin synthase (EC 2.8.1.6) [Schizosaccharomyces
  misc_feature (18)..(378): Homolog of NCBI NO: 40738982 NR Description: hypothetical protein AN6643.2 [Aspergillus
  misc_feature (45)..(376): Homolog of NCBI NO: 23135112 NR Description: hypothetical protein [Cytophaga hutchinsonii]
  misc_feature (1)..(375): Homolog of NCBI NO: 38175566 NR Description: putative biotin synthase [Oryza sativa (japonica
  misc_feature (1)..(378): Homolog of NCBI NO: 28392925 NR Description: putative biotin synthase (Bio B) [Arabidopsis
  misc_feature (1)..(378): Homolog of NCBI NO: 15224273 NR Description: biotin synthase (BioB) (BIO2) [Arabidopsis
MMLVRSVFRSQLRPSVSGGLQSASCYSSLSAASAEAERTIREGPRNDWSRDEIKSVYDSPLLDLLFHGAQVHRHVHNFREVQQCTLLSIKTGGCSEDCSYCPQSSRYSTGVKAQRLMSKDAVIDAAKKAKEAGSTRFCMGAAWRDTIGRKTNFSQILEYIKEIRGMGMEVCCTLGMIEKQQALELKKAGLTAYNHNLDTSREYYPNVITTRSYDDRLETLSHVRDAGINVCSGGIIGLGEAEEDRIGLLHTLATLPSHPESVPINALLAVKGTPLEDQKPVEIWEMIRMIGTARIVMPKAMVRLSAGRVRFSMSEQALCFLAGANSIFTGEKLLTTPNNDFDADQLMFKTLGLIPKPPSFSEDDSESENCEKVASASH

SEQ ID NO: 37656 - protein, 377 aa, Arabidopsis thaliana
  peptide (1)..(377): Ceres Seq. ID no. 13488088
  misc_feature (87)..(251): Pfam Name: Radical SAM superfamily Pfam Description: Radical SAM superfamily
  misc_feature (42)..(358): Homolog of NCBI NO: 23127772 NR Description: hypothetical protein [Nostoc punctiforme]
  misc_feature (44)..(358): Homolog of NCBI NO: 17229413 NR Description: biotin synthase [Nostoc sp. PCC 7120]
  misc_feature (44)..(352): Homolog of NCBI NO: 2961328 NR Description: Biotin synthase [Schizosaccharomyces pombe]
  misc_feature (27)..(357): Homolog of NCBI NO: 32405370 NR Description: hypothetical protein [Neurospora crassa]
  misc_feature (44)..(352): Homolog of NCBI NO: 19075228 NR Description: biotin synthase (EC 2.8.1.6) [Schizosaccharomyces
  misc_feature (17)..(377): Homolog of NCBI NO: 40738982 NR Description: hypothetical protein AN6643.2 [Aspergillus
  misc_feature (44)..(375): Homolog of NCBI NO: 23135112 NR Description: hypothetical protein [Cytophaga hutchinsonii]
  misc_feature (1)..(374): Homolog of NCBI NO: 38175566 NR Description: putative biotin synthase [Oryza sativa (japonica
  misc_feature (1)..(377): Homolog of NCBI NO: 28392925 NR Description: putative biotin synthase (Bio B) [Arabidopsis
  misc_feature (1)..(377): Homolog of NCBI NO: 15224273 NR Description: biotin synthase (BioB) (BIO2) [Arabidopsis
MLVRSVFRSQLRPSVSGGLQSASCYSSLSAASAEAERTIREGPRNDWSRDEIKSVYDSPLLDLLFHGAQVHRHVHNFREVQQCTLLSIKTGGCSEDCSYCPQSSRYSTGVKAQRLMSKDAVIDAAKKAKEAGSTRFCMGAAWRDTIGRKTNFSQILEYIKEIRGMGMEVCCTLGMIEKQQALELKKAGLTAYNHNLDTSREYYPNVITTRSYDDRLETLSHVRDAGINVCSGGIIGLGEAEEDRIGLLHTLATLPSHPESVPINALLAVKGTPLEDQKPVEIWEMIRMIGTARIVMPKAMVRLSAGRVRFSMSEQALCFLAGANSIFTGEKLLTTPNNDFDADQLMFKTLGLIPKPPSFSEDDSESENCEKVASASH

SEQ ID NO: 37657 - protein, 262 aa, Arabidopsis thaliana
  peptide (1)..(262): Ceres Seq. ID no. 13488089
  misc_feature (1)..(136): Pfam Name: Radical SAM superfamily Pfam Description: Radical SAM superfamily
  misc_feature (1)..(243): Homolog of NCBI NO: 23127772 NR Description: hypothetical protein [Nostoc punctiforme]
  misc_feature (1)..(243): Homolog of NCBI NO: 17229413 NR Description: biotin synthase [Nostoc sp. PCC 7120]
  misc_feature (1)..(237): Homolog of NCBI NO: 2961328 NR Description: Biotin synthase [Schizosaccharomyces pombe]
  misc_feature (1)..(242): Homolog of NCBI NO: 32405370 NR Description: hypothetical protein [Neurospora crassa]
  misc_feature (1)..(237): Homolog of NCBI NO: 19075228 NR Description: biotin synthase (EC 2.8.1.6) [Schizosaccharomyces
  misc_feature (1)..(262): Homolog of NCBI NO: 40738982 NR Description: hypothetical protein AN6643.2 [Aspergillus
  misc_feature (1)..(260): Homolog of NCBI NO: 23135112 NR Description: hypothetical protein [Cytophaga hutchinsonii]
  misc_feature (1)..(259): Homolog of NCBI NO: 38175566 NR Description: putative biotin synthase [Oryza sativa (japonica
  misc_feature (1)..(262): Homolog of NCBI NO: 28392925 NR Description: putative biotin synthase (Bio B) [Arabidopsis
  misc_feature (1)..(262): Homolog of NCBI NO: 15224273 NR Description: biotin synthase (BioB) (BIO2) [Arabidopsis
MSKDAVIDAAKKAKEAGSTRFCMGAAWRDTIGRKTNFSQILEYIKEIRGMGMEVCCTLGMIEKQQALELKKAGLTAYNHNLDTSREYYPNVITTRSYDDRLETLSHVRDAGINVCSGGIIGLGEAEEDRIGLLHTLATLPSHPESVPINALLAVKGTPLEDQKPVEIWEMIRMIGTARIVMPKAMVRLSAGRVRFSMSEQALCFLAGANSIFTGEKLLTTPNNDFDADQLMFKTLGLIPKPPSFSEDDSESENCEKVASASH

SEQ ID NO: 37658 - DNA, 1615 bp, Arabidopsis thaliana
  misc_feature (1)..(1615): Ceres Seq. ID no. 12369892
  misc_feature: MA Experiment ID: 20000184 Result: Up-regulated in Transcription
  misc_feature: MA Experiment 20000184 PARAMETER Experiment Name: At_Shoots__P Parameter: Age (day) Value: 7
  misc_feature: MA Experiment 20000184 PARAMETER Experiment Name: At_Shoots__P Parameter: Tissue Value: Shoots vs. Whole Plant
  misc_feature: MA Experiment ID: 20000185 Result: Down-regulated in Transcription
  misc_feature: MA Experiment 20000185 PARAMETER Experiment Name: At_Roots__P Parameter: Age (day) Value: 7 vs. 21
  misc_feature: MA Experiment 20000185 PARAMETER Experiment Name: At_Roots__P Parameter: Organism Value: A. thaliana
  misc_feature: MA Experiment 20000185 PARAMETER Experiment Name: At_Roots__P Parameter: Tissue Value: Roots vs. Whole Plant
  misc_feature: MA Experiment ID: 20000265 Result: Up-regulated in Transcription
  misc_feature: MA Experiment 20000265 PARAMETER Experiment Name: At_Open_Flower_P Parameter: Age (day) Value: 21
  misc_feature: MA Experiment 20000265 PARAMETER Experiment Name: At_Open_Flower_P Parameter: Plant Line Value: WS
  misc_feature: MA Experiment 20000265 PARAMETER Experiment Name: At_Open_Flower_P Parameter: Tissue Value: Closed Flower vs. Whole Plant
  misc_feature: MA Experiment ID: 20000286 Result: Up-regulated in Transcription
  misc_feature: MA Experiment 20000286 PARAMETER Experiment Name: At_Open_Flower_P Parameter: Age (day) Value: 21
  misc_feature: MA Experiment 20000286 PARAMETER Experiment Name: At_Open_Flower_P Parameter: Plant Line Value: WS
  misc_feature: MA Experiment 20000286 PARAMETER Experiment Name: At_Open_Flower_P Parameter: Tissue Value: Half Open vs. Whole Plant
  misc_feature: MA Experiment ID: 20000437 Result: Down-regulated in Transcription
  misc_feature: MA Experiment 20000437 PARAMETER Experiment Name: At_Drought_P Parameter: Age (day) Value: 8
  misc_feature: MA Experiment 20000437 PARAMETER Experiment Name: At_Drought_P Parameter: Organism Value: A. thaliana
  misc_feature: MA Experiment 20000437 PARAMETER Experiment Name: At_Drought_P Parameter: Plant Line Value: WS
  misc_feature: MA Experiment 20000437 PARAMETER Experiment Name: At_Drought_P Parameter: Timepoint (hr) Value: 24
  misc_feature: MA Experiment 20000437 PARAMETER Experiment Name: At_Drought_P Parameter: Tissue Value: Whole Plant
  misc_feature: MA Experiment 20000437 PARAMETER Experiment Name: At_Drought_P Parameter: Treatment Value: Drought vs. No Drought
  misc_feature: MA Experiment ID: 20000438 Result: Up-regulated in Transcription
  misc_feature: MA Experiment 20000438 PARAMETER Experiment Name: At_Shoots__P Parameter: Age (day) Value: 14
  misc_feature: MA Experiment 20000438 PARAMETER Experiment Name: At_Shoots__P Parameter: Tissue Value: Shoots vs. Whole Plant
  misc_feature: MA Experiment ID: 20000439 Result: Down-regulated in Transcription
  misc_feature: MA Experiment 20000439 PARAMETER Experiment Name: At_Roots__P Parameter: Age (day) Value: 14 vs. 21
  misc_feature: MA Experiment 20000439 PARAMETER Experiment Name: At_Roots__P Parameter: Organism Value: A. thaliana
  misc_feature: MA Experiment 20000439 PARAMETER Experiment Name: At_Roots__P Parameter: Tissue Value: Roots vs. Whole Plant
  misc_feature: MA Experiment ID: 20001558 Result: Up-regulated in Transcription
  misc_feature: MA Experiment 20001558 PARAMETER Experiment Name: At_Drought_Soil_Dry_P Parameter: Age (day) Value: 27
  misc_feature: MA Experiment 20001558 PARAMETER Experiment Name: At_Drought_Soil_Dry_P Parameter: Organism Value: A. thaliana
  misc_feature: MA Experiment 20001558 PARAMETER Experiment Name: At_Drought_Soil_Dry_P Parameter: Plant Line Value: WS
  misc_feature: MA Experiment 20001558 PARAMETER Experiment Name: At_Drought_Soil_Dry_P Parameter: Post Timepoint (hr) Value: 6
  misc_feature: MA Experiment 20001558 PARAMETER Experiment Name: At_Drought_Soil_Dry_P Parameter: Post-Treatment Value: Re-Water vs. No Drought
  misc_feature: MA Experiment 20001558 PARAMETER Experiment Name: At_Drought_Soil_Dry_P Parameter: Timepoint (day) Value: 13
  misc_feature: MA Experiment 20001558 PARAMETER Experiment Name: At_Drought_Soil_Dry_P Parameter: Treatment Value: Drought vs. No Drought
  misc_feature: MA Experiment ID: 20001560 Result: Up-regulated in Transcription
  misc_feature: MA Experiment 20001560 PARAMETER Experiment Name: At_Drought_Soil_Dry_P Parameter: Age (day) Value: 28
  misc_feature: MA Experiment 20001560 PARAMETER Experiment Name: At_Drought_Soil_Dry_P Parameter: Organism Value: A. thaliana
  misc_feature: MA Experiment 20001560 PARAMETER Experiment Name: At_Drought_Soil_Dry_P Parameter: Plant Line Value: WS
  misc_feature: MA Experiment 20001560 PARAMETER Experiment Name: At_Drought_Soil_Dry_P Parameter: Post Timepoint (hr) Value: None
  misc_feature: MA Experiment 20001560 PARAMETER Experiment Name: At_Drought_Soil_Dry_P Parameter: Post-Treatment Value: None
  misc_feature: MA Experiment 20001560 PARAMETER Experiment Name: At_Drought_Soil_Dry_P Parameter: Timepoint (day) Value: 14
  misc_feature: MA Experiment 20001560 PARAMETER Experiment Name: At_Drought_Soil_Dry_P Parameter: Treatment Value: Drought vs. No Drought
  misc_feature: MA Experiment ID: 20001910 Result: Down-regulated in Transcription
  misc_feature: MA Experiment 20001910 PARAMETER Experiment Name: At_Drought_Reproduction_P Parameter: Age (day) Value: 37
  misc_feature: MA Experiment 20001910 PARAMETER Experiment Name: At_Drought_Reproduction_P Parameter: Organism Value: A. thaliana
  misc_feature: MA Experiment 20001910 PARAMETER Experiment Name: At_Drought_Reproduction_P Parameter: Plant Line Value: WS
  misc_feature: MA Experiment 20001910 PARAMETER Experiment Name: At_Drought_Reproduction_P Parameter: Timepoint (day) Value: 7
  misc_feature: MA Experiment 20001910 PARAMETER Experiment Name: At_Drought_Reproduction_P Parameter: Tissue Value: Flowers
  misc_feature: MA Experiment 20001910 PARAMETER Experiment Name: At_Drought_Reproduction_P Parameter: Treatment Value: Drought vs. No Drought
  misc_feature: MA Experiment ID: 20001911 Result: Down-regulated in Transcription
  misc_feature: MA Experiment 20001911 PARAMETER Experiment Name: At_Drought_Reproduction_P Parameter: Age (day) Value: 40
  misc_feature: MA Experiment 20001911 PARAMETER Experiment Name: At_Drought_Reproduction_P Parameter: Organism Value: A. thaliana
  misc_feature: MA Experiment 20001911 PARAMETER Experiment Name: At_Drought_Reproduction_P Parameter: Plant Line Value: WS
  misc_feature: MA Experiment 20001911 PARAMETER Experiment Name: At_Drought_Reproduction_P Parameter: Timepoint (day) Value: 10
  misc_feature: MA Experiment 20001911 PARAMETER Experiment Name: At_Drought_Reproduction_P Parameter: Tissue Value: Flowers
  misc_feature: MA Experiment 20001911 PARAMETER Experiment Name: At_Drought_Reproduction_P Parameter: Treatment Value: Drought vs. No Drought
aatctcaaaaagtctccgacactctctagatttcctttgctccttcgttctggccatggcaatggcaatggcaaaactcgcaattttcaccactcttatggccatactcgtaatgacatctcaaggaaggattccaacagaaggaggagagaaagaagcagaggctgacagaattacgtcacttccaggtcagcctaacgtcacgttcgagcagttttccggctacgtcaccgtcgataaactctccggaagatcactcttttattggctcactgaagcttctgacctccctctctccaaacctctcgtaatttggctcaacggaggaccgggatgttcgtcggtagcgtacggtgcgtcggaggagattggaccattcaggataagcaaaggtggttccggtttgtatctcaacaagttcgcatggaactcaatctccaatctcttgttcctcgaagctcccgccggcgtcggcttctcttacactaaccgctcctccgatctcttcaacaccggtgatcgccgtaccgccaaagattcacttcagtttcttattcaatggcttcaccggtttccgagatacaaccaccgggaaatctacatcaccggcgagagttacgccggacattacgttcctcagctggccaaagagatcatgaattacaacaaacgatcaaagaatccgttaaatctcaaaggaatcatggttggaaacgcggtgacggacaatcactatgataacctaggaacggtttcgtattggtggagccacgcgatgatctctgatcggacgtatcatcagttgataagcacttgcgattttagtcgtcagaaggaatctgatgaatgcgaaaccctttattcttacgctatggagcaggagtttggtaacattgatcagtacaacatctatgcgccgccgtgtaacaagtcaagcgacggtggtggtagctacaatggttcttccggccgccggagtatgcggcttcctcaccttccccactccgtattgaggaaaatttccggttatgatccatgtaccgagagatatgcagagatctattataaccggcctgatgttcagaaagctcttcacgccaacaccaccaagattccgtataaatggacagcttgcagtgaggtgctaaaccggaattggaacgacacagattcaacggttctccctatataccgggaaatgattgccggcggaattagagtttgggttttcagtggtgacgtcgattcagttgtaccagtgacagctactagatactcactagcaagacttagtttgagtaccaaacttccttggtatccttggtatgtcaagaaacaggttggaggatggacggaagtgtatgaaggactaacgttcgtgacggttagaggagcaggtcacgaggtgccattgttcaagccacgtgctgcttttgagctttttaagtatttcttgagaggcaagccacttccaaaggcttaaaaaaattgaagtcaagagagagattgtaacatttgaaatcatgcccgagaaaaatgaaaatgtaaagtttgggttatgagatggtatttaattaaatctagtctattaatgacagcaagtatttaattattt

SEQ ID NO: 37659 - protein, 493 aa, Arabidopsis thaliana
  peptide (1)..(493): Ceres Seq. ID no. 12369893
  misc_feature (62)..(487): Pfam Name: Serine carboxypeptidase Pfam Description: Serine carboxypeptidase
  misc_feature (52)..(491): Homolog of NCBI NO: 15227493 NR Description: putative serine carboxypeptidase II
  misc_feature (35)..(491): Homolog of NCBI NO: 34908012 NR Description: putative carboxypeptidase D
  misc_feature (32)..(491): Homolog of NCBI NO: 15231911 NR Description: putative serine carboxypeptidase II; protein id:
  misc_feature (21)..(492): Homolog of NCBI NO: 34895992 NR Description: putative carboxypeptidase D
  misc_feature (58)..(493): Homolog of NCBI NO: 15224083 NR Description: putative serine carboxypeptidase II; protein id:
  misc_feature (32)..(493): Homolog of NCBI NO: 15224082 NR Description: putative serine carboxypeptidase II; protein id:
  misc_feature (28)..(493): Homolog of NCBI NO: 15234795 NR Description: SERINE CARBOXYPEPTIDASE II-like protein
  misc_feature (28)..(493): Homolog of NCBI NO: 13877871 NR Description: putative serine carboxypeptidase II [Arabidopsis
  misc_feature (23)..(493): Homolog of NCBI NO: 21593731 NR Description: putative serine carboxypeptidase II [Arabidopsis
  misc_feature (21)..(493): Homolog of NCBI NO: 15232847 NR Description: putative serine carboxypeptidase II
ISKSLRHSLDFLCSFVLAMAMAMAKLAIFTTLMAILVMTSQGRIPTEGGEKEAEADRITSLPGQPNVTFEQFSGYVTVDKLSGRSLFYWLTEASDLPLSKPLVIWLNGGPGCSSVAYGASEEIGPFRISKGGSGLYLNKFAWNSISNLLFLEAPAGVGFSYTNRSSDLFNTGDRRTAKDSLQFLIQWLHRFPRYNHREIYITGESYAGHYVPQLAKEIMNYNKRSKNPLNLKGIMVGNAVTDNHYDNLGTVSYWWSHAMISDRTYHQLISTCDFSRQKESDECETLYSYAMEQEFGNIDQYNIYAPPCNKSSDGGGSYNGSSGRRSMRLPHLPHSVLRKISGYDPCTERYAEIYYNRPDVQKALHANTTKIPYKWTACSEVLNRNWNDTDSTVLPIYREMIAGGIRVWVFSGDVDSVVPVTATRYSLARLSLSTKLPWYPWYVKKQVGGWTEVYEGLTFVTVRGAGHEVPLFKPRAAFELFKYFLRGKPLPKA

SEQ ID NO: 37660 - protein, 475 aa, Arabidopsis thaliana
  peptide (1)..(475): Ceres Seq. ID no. 12369894
  misc_feature (44)..(469): Pfam Name: Serine carboxypeptidase Pfam Description: Serine carboxypeptidase
  misc_feature (34)..(473): Homolog of NCBI NO: 15227493 NR Description: putative serine carboxypeptidase II
  misc_feature (17)..(473): Homolog of NCBI NO: 34908012 NR Description: putative carboxypeptidase D
  misc_feature (14)..(473): Homolog of NCBI NO: 15231911 NR Description: putative serine carboxypeptidase II; protein id:
  misc_feature (3)..(474): Homolog of NCBI NO: 34895992 NR Description: putative carboxypeptidase D
  misc_feature (40)..(475): Homolog of NCBI NO: 15224083 NR Description: putative serine carboxypeptidase II; protein id:
  misc_feature (14)..(475): Homolog of NCBI NO: 15224082 NR Description: putative serine carboxypeptidase II; protein id:
  misc_feature (10)..(475): Homolog of NCBI NO: 15234795 NR Description: SERINE CARBOXYPEPTIDASE II-like protein
  misc_feature (10)..(475): Homolog of NCBI NO: 13877871 NR Description: putative serine carboxypeptidase II [Arabidopsis
  misc_feature (5)..(475): Homolog of NCBI NO: 21593731 NR Description: putative serine carboxypeptidase II [Arabidopsis
  misc_feature (3)..(475): Homolog of NCBI NO: 15232847 NR Description: putative serine carboxypeptidase II
MAMAMAKLAIFTTLMAILVMTSQGRIPTEGGEKEAEADRITSLPGQPNVTFEQFSGYVTVDKLSGRSLFYWLTEASDLPLSKPLVIWLNGGPGCSSVAYGASEEIGPFRISKGGSGLYLNKFAWNSISNLLFLEAPAGVGFSYTNRSSDLFNTGDRRTAKDSLQFLIQWLHRFPRYNHREIYITGESYAGHYVPQLAKEIMNYNKRSKNPLNLKGIMVGNAVTDNHYDNLGTVSYWWSHAMISDRTYHQLISTCDFSRQKESDECETLYSYAMEQEFGNIDQYNIYAPPCNKSSDGGGSYNGSSGRRSMRLPHLPHSVLRKISGYDPCTERYAEIYYNRPDVQKALHANTTKIPYKWTACSEVLNRNWNDTDSTVLPIYREMIAGGIRVWVFSGDVDSVVPVTATRYSLARLSLSTKLPWYPWYVKKQVGGWTEVYEGLTFVTVRGAGHEVPLFKPRAAFELFKYFLRGKPLPKA

SEQ ID NO: 37661 - protein, 473 aa, Arabidopsis thaliana
  peptide (1)..(473): Ceres Seq. ID no. 12369895
  misc_feature (42)..(467): Pfam Name: Serine carboxypeptidase Pfam Description: Serine carboxypeptidase
  misc_feature (32)..(471): Homolog of NCBI NO: 15227493 NR Description: putative serine carboxypeptidase II
  misc_feature (15)..(471): Homolog of NCBI NO: 34908012 NR Description: putative carboxypeptidase D
  misc_feature (12)..(471): Homolog of NCBI NO: 15231911 NR Description: putative serine carboxypeptidase II; protein id:
  misc_feature (1)..(472): Homolog of NCBI NO: 34895992 NR Description: putative carboxypeptidase D
  misc_feature (38)..(473): Homolog of NCBI NO: 15224083 NR Description: putative serine carboxypeptidase II; protein id:
  misc_feature (12)..(473): Homolog of NCBI NO: 15224082 NR Description: putative serine carboxypeptidase II; protein id:
  misc_feature (8)..(473): Homolog of NCBI NO: 15234795 NR Description: SERINE CARBOXYPEPTIDASE II-like protein
  misc_feature (8)..(473): Homolog of NCBI NO: 13877871 NR Description: putative serine carboxypeptidase II [Arabidopsis
  misc_feature (3)..(473): Homolog of NCBI NO: 21593731 NR Description: putative serine carboxypeptidase II [Arabidopsis
  misc_feature (1)..(473): Homolog of NCBI NO: 15232847 NR Description: putative serine carboxypeptidase II
MAMAKLAIFTTLMAILVMTSQGRIPTEGGEKEAEADRITSLPGQPNVTFEQFSGYVTVDKLSGRSLFYWLTEASDLPLSKPLVIWLNGGPGCSSVAYGASEEIGPFRISKGGSGLYLNKFAWNSISNLLFLEAPAGVGFSYTNRSSDLFNTGDRRTAKDSLQFLIQWLHRFPRYNHREIYITGESYAGHYVPQLAKEIMNYNKRSKNPLNLKGIMVGNAVTDNHYDNLGTVSYWWSHAMISDRTYHQLISTCDFSRQKESDECETLYSYAMEQEFGNIDQYNIYAPPCNKSSDGGGSYNGSSGRRSMRLPHLPHSVLRKISGYDPCTERYAEIYYNRPDVQKALHANTTKIPYKWTACSEVLNRNWNDTDSTVLPIYREMIAGGIRVWVFSGDVDSVVPVTATRYSLARLSLSTKLPWYPWYVKKQVGGWTEVYEGLTFVTVRGAGHEVPLFKPRAAFELFKYFLRGKPLPKA

SEQ ID NO: 37662 - DNA, 681 bp, Arabidopsis thaliana
  misc_feature (1)..(681): Ceres Seq. ID no. 12367005
  misc_feature: MA Experiment ID: 108434 Result: Up-regulated in Transcription
  misc_feature: MA Experiment 108434 PARAMETER Experiment Name: At_Root_Tips_cDNA_P Parameter: Tissue Value: Root Tips
  misc_feature: MA Experiment ID: 108579 Result: Down-regulated in Transcription
  misc_feature: MA Experiment 108579 PARAMETER Experiment Name: At_4deg_Cold_cDNA_P Parameter: Temperature (deg C) Value: 4 vs. 22
  misc_feature: MA Experiment 108579 PARAMETER Experiment Name: At_4deg_Cold_cDNA_P Parameter: Timepoint (hr) Value: 6
  misc_feature: MA Experiment 108579 PARAMETER Experiment Name: At_4deg_Cold_cDNA_P Parameter: Tissue Value: Aerial
agaaaaaaagaaagcgaaatgggattattggccgcgatcggagttctgttgccatttccgttctactggtggctgtggacgaatcctcagtcatgggtcaatctctgcggccgagaaagagacccatcgacggtaatggcacgtgtttctcacgtgctcaaggctgctcaactcctttctctcttctccgttgcttctctctcctggccgtctccgctctacttctggcctctcatggcctttggccagtttctcaacttcagggtataccaattgttaggtgaagctgggacttattacggtgttcgattcgggaagaacataccatgggttacagagttcccatttggagtcattagagatccacagtatgttgggagtatcatgtctctattggcatgcctctcttgggttccatttcaatacattctcctctggtctctcggttatgttttcatgatgtttctcgagtcaaaggaggatccaaatgctcgtgccaaatccatctcatgattcctaagcataacccactagtcttagaagagctcaactcccatgaacgtcaggtcttgactgttttctttatgagtttgtattctcttttgtactcaaactgatgctacactttcatggataatgcagttaccttttctcgggttatcggtagtctacagaattgtc

SEQ ID NO: 37663 - protein, 170 aa, Arabidopsis thaliana
  peptide (1)..(170): Ceres Seq. ID no. 12367006
  misc_feature (46)..(170): Homolog of NCBI NO: 30699543 NR Description: expressed protein [Arabidopsis thaliana]
  misc_feature (7)..(170): Homolog of NCBI NO: 18412906 NR Description: expressed protein
  misc_feature (7)..(170): Homolog of NCBI NO: 21593732 NR Description: unknown [Arabidopsis thaliana]
RKKESEMGLLAAIGVLLPFPFYWWLWTNPQSWVNLCGRERDPSTVMARVSHVLKAAQLLSLFSVASLSWPSPLYFWPLMAFGQFLNFRVYQLLGEAGTYYGVRFGKNIPWVTEFPFGVIRDPQYVGSIMSLLACLSWVPFQYILLWSLGYVFMMFLESKEDPNARAKSIS

SEQ ID NO: 37664 - protein, 164 aa, Arabidopsis thaliana
  peptide (1)..(164): Ceres Seq. ID no. 12367007
  misc_feature (40)..(164): Homolog of NCBI NO: 30699543 NR Description: expressed protein [Arabidopsis thaliana]
  misc_feature (1)..(164): Homolog of NCBI NO: 18412906 NR Description: expressed protein
  misc_feature (1)..(164): Homolog of NCBI NO: 21593732 NR Description: unknown [Arabidopsis thaliana]
MGLLAAIGVLLPFPFYWWLWTNPQSWVNLCGRERDPSTVMARVSHVLKAAQLLSLFSVASLSWPSPLYFWPLMAFGQFLNFRVYQLLGEAGTYYGVRFGKNIPWVTEFPFGVIRDPQYVGSIMSLLACLSWVPFQYILLWSLGYVFMMFLESKEDPNARAKSIS

SEQ ID NO: 37665 - protein, 125 aa, Arabidopsis thaliana
  peptide (1)..(125): Ceres Seq. ID no. 12367008
  misc_feature (1)..(125): Homolog of NCBI NO: 30699543 NR Description: expressed protein [Arabidopsis thaliana]
  misc_feature (1)..(125): Homolog of NCBI NO: 18412906 NR Description: expressed protein
  misc_feature (1)..(125): Homolog of NCBI NO: 21593732 NR Description: unknown [Arabidopsis thaliana]
MARVSHVLKAAQLLSLFSVASLSWPSPLYFWPLMAFGQFLNFRVYQLLGEAGTYYGVRFGKNIPWVTEFPFGVIRDPQYVGSIMSLLACLSWVPFQYILLWSLGYVFMMFLESKEDPNARAKSIS

SEQ ID NO: 37666 - DNA, 1598 bp, Arabidopsis thaliana
  misc_feature (1)..(1598): Ceres Seq. ID no. 12605969
  misc_feature: MA Experiment ID: 20000173 Result: Down-regulated in Transcription
  misc_feature: MA Experiment 20000173 PARAMETER Experiment Name: At_42deg_Heat_P Parameter: Age (day) Value: 14
  misc_feature: MA Experiment 20000173 PARAMETER Experiment Name: At_42deg_Heat_P Parameter: Organism Value: A. thaliana
  misc_feature: MA Experiment 20000173 PARAMETER Experiment Name: At_42deg_Heat_P Parameter: Plant Line Value: WS
  misc_feature: MA Experiment 20000173 PARAMETER Experiment Name: At_42deg_Heat_P Parameter: Temperature (deg C) Value: 42 vs. 22
  misc_feature: MA Experiment 20000173 PARAMETER Experiment Name: At_42deg_Heat_P Parameter: Timepoint (hr) Value: 6
  misc_feature: MA Experiment 20000173 PARAMETER Experiment Name: At_42deg_Heat_P Parameter: Tissue Value: Aerial
  misc_feature: MA Experiment ID: 20000179 Result: Up-regulated in Transcription
  misc_feature: MA Experiment 20000179 PARAMETER Experiment Name: At_Germinating_Seeds_P Parameter: Age (hr) Value: 6 vs. 0
  misc_feature: MA Experiment 20000179 PARAMETER Experiment Name: At_Germinating_Seeds_P Parameter: Tissue Value: Germinating Seeds
  misc_feature: MA Experiment ID: 20000180 Result: Up-regulated in Transcription
  misc_feature: MA Experiment 20000180 PARAMETER Experiment Name: At_Germinating_Seeds_P Parameter: Age (hr) Value: 24 vs. 0
  misc_feature: MA Experiment 20000180 PARAMETER Experiment Name: At_Germinating_Seeds_P Parameter: Tissue Value: Germinating Seeds
  misc_feature: MA Experiment ID: 20000794 Result: Down-regulated in Transcription
  misc_feature: MA Experiment 20000794 PARAMETER Experiment Name: At_Petals_P Parameter: Age (day) Value: 23-25 days
  misc_feature: MA Experiment 20000794 PARAMETER Experiment Name: At_Petals_P Parameter: Plant Line Value: WS
  misc_feature: MA Experiment 20000794 PARAMETER Experiment Name: At_Petals_P Parameter: Tissue Value: Petals vs. Whole plant
  misc_feature: MA Experiment ID: 20001911 Result: Down-regulated in Transcription
  misc_feature: MA Experiment 20001911 PARAMETER Experiment Name: At_Drought_Reproduction_P Parameter: Age (day) Value: 40
  misc_feature: MA Experiment 20001911 PARAMETER Experiment Name: At_Drought_Reproduction_P Parameter: Organism Value: A. thaliana
  misc_feature: MA Experiment 20001911 PARAMETER Experiment Name: At_Drought_Reproduction_P Parameter: Plant Line Value: WS
  misc_feature: MA Experiment 20001911 PARAMETER Experiment Name: At_Drought_Reproduction_P Parameter: Timepoint (day) Value: 10
  misc_feature: MA Experiment 20001911 PARAMETER Experiment Name: At_Drought_Reproduction_P Parameter: Tissue Value: Flowers
  misc_feature: MA Experiment 20001911 PARAMETER Experiment Name: At_Drought_Reproduction_P Parameter: Treatment Value: Drought vs. No Drought
atcgtcttcatcgttaacttcgcagactctgttgattagtcaacacagatcagaatctgaggctttggccgagacgagagaagcagaagaagaaaatggcggagactgtacattctccgatcgttacttacgcatcgatgttatcgcttctcgccttctgtccacctttcgtcattctcctatggtacacaatggttcatcaggatggttctgttactcagacctttggcttcttttgggagaatggagttcaaggacttatcaacatatggccaagacccactttgattgcttggaaaattatattttgctatggagcatttgaagctattcttcagctgcttctgcctggtaaaagagttgagggtccaatatctccagccggaaaccgaccagtttacaaggccaatggtctggctgcttactttgtgacactagcaacctatcttggtctttggtggtttggaatcttcaaccctgcaattgtctatgatcacttgggtgaaatattttcggcactaatattcggaagcttcatattttgtgttttgttgtacataaaaggccatgttgcaccttcatcaagtgactctggttcatgtggtaacctaataattgacttctattggggcatggagttgtaccctcgaattggtaagagctttgacatcaaggtgtttactaattgcagattcggaatgatgtcttgggcagttcttgcagtcacgtactgcataaaacagtatgaaataaatggcaaagtatctgattcaatgctggtgaacaccatcctgatgctggtgtatgtcacaaaattcttctggtgggaagctggttattggaacaccatggacattgcacatgaccgagctggattctatatatgctggggttgtctagtgtgggtgccttctgtctacacttctccaggcatgtaccttgtgaaccaccccgtcgaactcggaactcagttggcaatatacattctcgttgcaggaattctgtgcatttacataaactatgactgtgatagacaaaggcaagagttcaggaggacaaacgggaaatgtttggtttggggaagagccccgtcaaagattgtggcgtcgtatactacaacatctggtgaaactaaaactagtcttctcttaacgtctggatggtggggattggctcgtcatttccattatgttcctgagatcttaagtgctttcttctggaccgtaccggctctcttcgataacttcttggcatacttctacgtcatatttctcacccttcttctctttgatcgagccaagagagacgatgaccgatgccgatcaaagtatgggaaatattggaagctgtattgtgagaaagtcaaatacaggatcattccgggaatttattgattgtaacgaagtctgttgttctcattttctagttattacgttaattcgaacgttggaatcatcaaaagaccgtgccaaaacaaaaatgcaaattgatgcgatagacattcttttgctgatttgtatgctataggttttcaaatctctagctacgcttatgtatttccctagattatcaaagttagcctgccgttttctaatttt

SEQ ID NO: 37667 - protein, 432 aa, Arabidopsis thaliana
  peptide (1)..(432): Ceres Seq. ID no. 12605970
  misc_feature (3)..(432): Pfam Name: Ergosterol biosynthesis ERG4/ERG24 family Pfam Description: Ergosterol biosynthesis ERG4/ERG24 family
  misc_feature (13)..(432): Homolog of NCBI NO: 4503321 NR Description: 7-dehydrocholesterol reductase
  misc_feature (13)..(432): Homolog of NCBI NO: 3171089 NR Description: 7-dehydrocholesterol reductase [Homo sapiens]
  misc_feature (14)..(432): Homolog of NCBI NO: 11693158 NR Description: 7-dehydrocholesterol reductase [Rattus
  misc_feature (13)..(432): Homolog of NCBI NO: 6681179 NR Description: 7-dehydrocholesterol reductase [Mus musculus]
  misc_feature (13)..(432): Homolog of NCBI NO: 27924199 NR Description: Similar to 7-dehydrocholesterol reductase
  misc_feature (13)..(432): Homolog of NCBI NO: 38969866 NR Description: 7-dehydrocholesterol reductase [Silurana
  misc_feature (16)..(429): Homolog of NCBI NO: 29654463 NR Description: ergosterol biosynthesis ERG4/ERG24 family protein
  misc_feature (2)..(432): Homolog of NCBI NO: 39726086 NR Description: sterol delta-7 reductase [Tropaeolum majus]
  misc_feature (1)..(432): Homolog of NCBI NO: 1245182 NR Description: sterol delta-7 reductase
  misc_feature (1)..(432): Homolog of NCBI NO: 15222967 NR Description: sterol delta7 reductase
MAETVHSPIVTYASMLSLLAFCPPFVILLWYTMVHQDGSVTQTFGFFWENGVQGLINIWPRPTLIAWKIIFCYGAFEAILQLLLPGKRVEGPISPAGNRPVYKANGLAAYFVTLATYLGLWWFGIFNPAIVYDHLGEIFSALIFGSFIFCVLLYIKGHVAPSSSDSGSCGNLIIDFYWGMELYPRIGKSFDIKVFTNCRFGMMSWAVLAVTYCIKQYEINGKVSDSMLVNTILMLVYVTKFFWWEAGYWNTMDIAHDRAGFYICWGCLVWVPSVYTSPGMYLVNHPVELGTQLAIYILVAGILCIYINYDCDRQRQEFRRTNGKCLVWGRAPSKIVASYTTTSGETKTSLLLTSGWWGLARHFHYVPEILSAFFWTVPALFDNFLAYFYVIFLTLLLFDRAKRDDDRCRSKYGKYWKLYCEKVKYRIIPGIY

SEQ ID NO: 37668 - protein, 418 aa, Arabidopsis thaliana
  peptide (1)..(418): Ceres Seq. ID no. 12605971
  misc_feature (1)..(418): Pfam Name: Ergosterol biosynthesis ERG4/ERG24 family Pfam Description: Ergosterol biosynthesis ERG4/ERG24 family
  misc_feature (1)..(418): Homolog of NCBI NO: 4503321 NR Description: 7-dehydrocholesterol reductase
  misc_feature (1)..(418): Homolog of NCBI NO: 3171089 NR Description: 7-dehydrocholesterol reductase [Homo sapiens]
  misc_feature (1)..(418): Homolog of NCBI NO: 11693158 NR Description: 7-dehydrocholesterol reductase [Rattus
  misc_feature (1)..(418): Homolog of NCBI NO: 6681179 NR Description: 7-dehydrocholesterol reductase [Mus musculus]
  misc_feature (1)..(418): Homolog of NCBI NO: 27924199 NR Description: Similar to 7-dehydrocholesterol reductase
  misc_feature (1)..(418): Homolog of NCBI NO: 38969866 NR Description: 7-dehydrocholesterol reductase [Silurana
  misc_feature (2)..(415): Homolog of NCBI NO: 29654463 NR Description: ergosterol biosynthesis ERG4/ERG24 family protein
  misc_feature (1)..(418): Homolog of NCBI NO: 39726086 NR Description: sterol delta-7 reductase [Tropaeolum majus]
  misc_feature (1)..(418): Homolog of NCBI NO: 1245182 NR Description: sterol delta-7 reductase
  misc_feature (1)..(418): Homolog of NCBI NO: 15222967 NR Description: sterol delta7 reductase
MLSLLAFCPPFVILLWYTMVHQDGSVTQTFGFFWENGVQGLINIWPRPTLIAWKIIFCYGAFEAILQLLLPGKRVEGPISPAGNRPVYKANGLAAYFVTLATYLGLWWFGIFNPAIVYDHLGEIFSALIFGSFIFCVLLYIKGHVAPSSSDSGSCGNLIIDFYWGMELYPRIGKSFDIKVFTNCRFGMMSWAVLAVTYCIKQYEINGKVSDSMLVNTILMLVYVTKFFWWEAGYWNTMDIAHDRAGFYICWGCLVWVPSVYTSPGMYLVNHPVELGTQLAIYILVAGILCIYINYDCDRQRQEFRRTNGKCLVWGRAPSKIVASYTTTSGETKTSLLLTSGWWGLARHFHYVPEILSAFFWTVPALFDNFLAYFYVIFLTLLLFDRAKRDDDRCRSKYGKYWKLYCEKVKYRIIPGIY

SEQ ID NO: 37669 - protein, 400 aa, Arabidopsis thaliana
  peptide (1)..(400): Ceres Seq. ID no. 12605972
  misc_feature (1)..(400): Pfam Name: Ergosterol biosynthesis ERG4/ERG24 family Pfam Description: Ergosterol biosynthesis ERG4/ERG24 family
  misc_feature (1)..(400): Homolog of NCBI NO: 4503321 NR Description: 7-dehydrocholesterol reductase
  misc_feature (1)..(400): Homolog of NCBI NO: 3171089 NR Description: 7-dehydrocholesterol reductase [Homo sapiens]
  misc_feature (1)..(400): Homolog of NCBI NO: 11693158 NR Description: 7-dehydrocholesterol reductase [Rattus
  misc_feature (1)..(400): Homolog of NCBI NO: 6681179 NR Description: 7-dehydrocholesterol reductase [Mus musculus]
  misc_feature (1)..(400): Homolog of NCBI NO: 27924199 NR Description: Similar to 7-dehydrocholesterol reductase
  misc_feature (1)..(400): Homolog of NCBI NO: 38969866 NR Description: 7-dehydrocholesterol reductase [Silurana
  misc_feature (1)..(397): Homolog of NCBI NO: 29654463 NR Description: ergosterol biosynthesis ERG4/ERG24 family protein
  misc_feature (1)..(400): Homolog of NCBI NO: 39726086 NR Description: sterol delta-7 reductase [Tropaeolum majus]
  misc_feature (1)..(400): Homolog of NCBI NO: 1245182 NR Description: sterol delta-7 reductase
  misc_feature (1)..(400): Homolog of NCBI NO: 15222967 NR Description: sterol delta7 reductase
MVHQDGSVTQTFGFFWENGVQGLINIWPRPTLIAWKIIFCYGAFEAILQLLLPGKRVEGPISPAGNRPVYKANGLAAYFVTLATYLGLWWFGIFNPAIVYDHLGEIFSALIFGSFIFCVLLYIKGHVAPSSSDSGSCGNLIIDFYWGMELYPRIGKSFDIKVFTNCRFGMMSWAVLAVTYCIKQYEINGKVSDSMLVNTILMLVYVTKFFWWEAGYWNTMDIAHDRAGFYICWGCLVWVPSVYTSPGMYLVNHPVELGTQLAIYILVAGILCIYINYDCDRQRQEFRRTNGKCLVWGRAPSKIVASYTTTSGETKTSLLLTSGWWGLARHFHYVPEILSAFFWTVPALFDNFLAYFYVIFLTLLLFDRAKRDDDRCRSKYGKYWKLYCEKVKYRIIPGIY

SEQ ID NO: 37670 - DNA, 866 bp, Arabidopsis thaliana
  misc_feature (1)..(866): Ceres Seq. ID no. 12393035
  misc_feature: MA Experiment ID: 108435 Result: Down-regulated in Transcription
  misc_feature: MA Experiment 108435 PARAMETER Experiment Name: At_stm_Mutants_cDNA_P Parameter: Plant Line Value: wt Landsburg vs stm
  misc_feature: MA Experiment 108435 PARAMETER Experiment Name: At_stm_Mutants_cDNA_P Parameter: Tissue Value: Shoot Apical Meristem Region
  misc_feature: MA Experiment ID: 108462 Result: Up-regulated in Transcription
  misc_feature: MA Experiment 108462 PARAMETER Experiment Name: At_Germinating_Seeds_cDNA_P Parameter: Age (day) Value: 2 vs. 0
  misc_feature: MA Experiment 108462 PARAMETER Experiment Name: At_Germinating_Seeds_cDNA_P Parameter: Tissue Value: Germinating Seeds
  misc_feature: MA Experiment ID: 108464 Result: Up-regulated in Transcription
  misc_feature: MA Experiment 108464 PARAMETER Experiment Name: At_Germinating_Seeds_cDNA_P Parameter: Age (day) Value: 4 vs. 0
  misc_feature: MA Experiment 108464 PARAMETER Experiment Name: At_Germinating_Seeds_cDNA_P Parameter: Tissue Value: Germinating Seeds
  misc_feature: MA Experiment ID: 108595 Result: Down-regulated in Transcription
  misc_feature: MA Experiment 108595 PARAMETER Experiment Name: At_Ler-pi_Ovule_cDNA_P Parameter: Plant Line Value: null
  misc_feature: MA Experiment ID: 20000180 Result: Up-regulated in Transcription
  misc_feature: MA Experiment 20000180 PARAMETER Experiment Name: At_Germinating_Seeds_P Parameter: Age (hr) Value: 24 vs. 0
  misc_feature: MA Experiment 20000180 PARAMETER Experiment Name: At_Germinating_Seeds_P Parameter: Tissue Value: Germinating Seeds
  misc_feature: MA Experiment ID: 20000185 Result: Down-regulated in Transcription
  misc_feature: MA Experiment 20000185 PARAMETER Experiment Name: At_Roots__P Parameter: Age (day) Value: 7 vs. 21
  misc_feature: MA Experiment 20000185 PARAMETER Experiment Name: At_Roots__P Parameter: Organism Value: A. thaliana
  misc_feature: MA Experiment 20000185 PARAMETER Experiment Name: At_Roots__P Parameter: Tissue Value: Roots vs. Whole Plant
  misc_feature: MA Experiment ID: 20000286 Result: Down-regulated in Transcription
  misc_feature: MA Experiment 20000286 PARAMETER Experiment Name: At_Open_Flower_P Parameter: Age (day) Value: 21
  misc_feature: MA Experiment 20000286 PARAMETER Experiment Name: At_Open_Flower_P Parameter: Plant Line Value: WS
  misc_feature: MA Experiment 20000286 PARAMETER Experiment Name: At_Open_Flower_P Parameter: Tissue Value: Half Open vs. Whole Plant
  misc_feature: MA Experiment ID: 20000439 Result: Down-regulated in Transcription
  misc_feature: MA Experiment 20000439 PARAMETER Experiment Name: At_Roots__P Parameter: Age (day) Value: 14 vs. 21
  misc_feature: MA Experiment 20000439 PARAMETER Experiment Name: At_Roots__P Parameter: Organism Value: A. thaliana
  misc_feature: MA Experiment 20000439 PARAMETER Experiment Name: At_Roots__P Parameter: Tissue Value: Roots vs. Whole Plant
  misc_feature: MA Experiment ID: 20000794 Result: Down-regulated in Transcription
  misc_feature: MA Experiment 20000794 PARAMETER Experiment Name: At_Petals_P Parameter: Age (day) Value: 23-25 days
  misc_feature: MA Experiment 20000794 PARAMETER Experiment Name: At_Petals_P Parameter: Plant Line Value: WS
  misc_feature: MA Experiment 20000794 PARAMETER Experiment Name: At_Petals_P Parameter: Tissue Value: Petals vs. Whole plant
  misc_feature: MA Experiment ID: 20001557 Result: Down-regulated in Transcription
  misc_feature: MA Experiment 20001557 PARAMETER Experiment Name: At_Drought_Soil_Dry_P Parameter: Age (day) Value: 27
  misc_feature: MA Experiment 20001557 PARAMETER Experiment Name: At_Drought_Soil_Dry_P Parameter: Organism Value: A. thaliana
  misc_feature: MA Experiment 20001557 PARAMETER Experiment Name: At_Drought_Soil_Dry_P Parameter: Plant Line Value: WS
  misc_feature: MA Experiment 20001557 PARAMETER Experiment Name: At_Drought_Soil_Dry_P Parameter: Post Timepoint (hr) Value: 3
  misc_feature: MA Experiment 20001557 PARAMETER Experiment Name: At_Drought_Soil_Dry_P Parameter: Post-Treatment Value: Re-Water vs. No Drought
  misc_feature: MA Experiment 20001557 PARAMETER Experiment Name: At_Drought_Soil_Dry_P Parameter: Timepoint (day) Value: 13
  misc_feature: MA Experiment 20001557 PARAMETER Experiment Name: At_Drought_Soil_Dry_P Parameter: Treatment Value: Drought vs. No Drought
  misc_feature: MA Experiment ID: 20001558 Result: Down-regulated in Transcription
  misc_feature: MA Experiment 20001558 PARAMETER Experiment Name: At_Drought_Soil_Dry_P Parameter: Age (day) Value: 27
  misc_feature: MA Experiment 20001558 PARAMETER Experiment Name: At_Drought_Soil_Dry_P Parameter: Organism Value: A. thaliana
  misc_feature: MA Experiment 20001558 PARAMETER Experiment Name: At_Drought_Soil_Dry_P Parameter: Plant Line Value: WS
  misc_feature: MA Experiment 20001558 PARAMETER Experiment Name: At_Drought_Soil_Dry_P Parameter: Post Timepoint (hr) Value: 6
  misc_feature: MA Experiment 20001558 PARAMETER Experiment Name: At_Drought_Soil_Dry_P Parameter: Post-Treatment Value: Re-Water vs. No Drought
  misc_feature: MA Experiment 20001558 PARAMETER Experiment Name: At_Drought_Soil_Dry_P Parameter: Timepoint (day) Value: 13
  misc_feature: MA Experiment 20001558 PARAMETER Experiment Name: At_Drought_Soil_Dry_P Parameter: Treatment Value: Drought vs. No Drought
  misc_feature: MA Experiment ID: 20001905 Result: Down-regulated in Transcription
  misc_feature: MA Experiment 20001905 PARAMETER Experiment Name: At_Drought_Reproduction_P Parameter: Age (day) Value: 40
  misc_feature: MA Experiment 20001905 PARAMETER Experiment Name: At_Drought_Reproduction_P Parameter: Organism Value: A. thaliana
  misc_feature: MA Experiment 20001905 PARAMETER Experiment Name: At_Drought_Reproduction_P Parameter: Plant Line Value: WS
  misc_feature: MA Experiment 20001905 PARAMETER Experiment Name: At_Drought_Reproduction_P Parameter: Timepoint (day) Value: 10
  misc_feature: MA Experiment 20001905 PARAMETER Experiment Name: At_Drought_Reproduction_P Parameter: Tissue Value: Rosettes
  misc_feature: MA Experiment 20001905 PARAMETER Experiment Name: At_Drought_Reproduction_P Parameter: Treatment Value: Drought vs. No Drought
aaaaaccctctaaccactcaaaaaaatatctctgctctgctccaatggcgtcgttactcgattccgtcaccgtgacccgcgtgttttctctgccgattgcggcttcggtctcgtcttcttcagctgctccgtcggtttcacgacgccggatttctcccgccaggtttctggaattcagaggtttgaagtcttcgcggagtttggtgactcagtcggccagtctgggtgcgaatcgtagaaccagaatcgctcgcggtggacgaatcgcctgtgaggctcaggacaccactgccgccgccgtcgaagtaccaaatctgtctgattcagaatggcaaacaaaggttctggaatcagatgtcccagttctggtcgagttctgggcaccatggtgtggaccttgccgtatgattcaccccatagttgaccagctagccaaagatttcgcagggaagttcaaattctacaaaatcaacactgacgagagccctaatacagcaaaccgttacgggatacgaagcgttccaacagtaatcatcttcaaaggcggtgagaagaaagatagcatcattggagctgtgcctagagagacgttggagaaaactatagaaagattcttggtcgagtaacaaaatttgactcttttgtcactctgaaccattttaccttatcttctctcttgtaatctctgtaaagtcttttaagtttttgactattatgttatcgtgggtcctctttgtcttcttcaataaaaaaaatggaaacaaagtaatccaccgacgcatgagaagcataactccacgttgaaccacatgccattgttcttcctaattcaccgtacaatctatatacatacatatgttttgagt

SEQ ID NO: 37671 - protein, 207 aa, Arabidopsis thaliana
  peptide (1)..(207): Ceres Seq. ID no. 12393036
  misc_feature (30)..(205): Homolog of NCBI NO: 21354 NR Description: thioredoxin M precursor (AA -67 to 114) [Spinacia
  misc_feature (15)..(205): Homolog of NCBI NO: 38346628 NR Description: OSJNBa0074L08.22 [Oryza sativa (japonica
  misc_feature (38)..(205): Homolog of NCBI NO: 30678634 NR Description: thioredoxin M-type 1, chloroplast precursor
  misc_feature (29)..(205): Homolog of NCBI NO: 11135407 NR Description: Thioredoxin M-type, chloroplast precursor (TRX-M)
  misc_feature (36)..(205): Homolog of NCBI NO: 21618235 NR Description: putative M-type thioredoxin [Arabidopsis thaliana]
  misc_feature (36)..(205): Homolog of NCBI NO: 6539610 NR Description: thioredoxin m2 [Arabidopsis thaliana]
  misc_feature (36)..(205): Homolog of NCBI NO: 15236327 NR Description: putative M-type thioredoxin
  misc_feature (28)..(205): Homolog of NCBI NO: 15594012 NR Description: putative thioredoxin m2 [Pisum sativum]
  misc_feature (15)..(207): Homolog of NCBI NO: 6539614 NR Description: thioredoxin m4 [Arabidopsis thaliana]
  misc_feature (15)..(207): Homolog of NCBI NO: 15232567 NR Description: thioredoxin m4
KPSNHSKKYLCSAPMASLLDSVTVTRVFSLPIAASVSSSSAAPSVSRRRISPARFLEFRGLKSSRSLVTQSASLGANRRTRIARGGRIACEAQDTTAAAVEVPNLSDSEWQTKVLESDVPVLVEFWAPWCGPCRMIHPIVDQLAKDFAGKFKFYKINTDESPNTANRYGIRSVPTVIIFKGGEKKDSIIGAVPRETLEKTIERFLVE

SEQ ID NO: 37672 - protein, 193 aa, Arabidopsis thaliana
  peptide (1)..(193): Ceres Seq. ID no. 12393037
  misc_feature (16)..(191): Homolog of NCBI NO: 21354 NR Description: thioredoxin M precursor (AA -67 to 114) [Spinacia
  misc_feature (1)..(191): Homolog of NCBI NO: 38346628 NR Description: OSJNBa0074L08.22 [Oryza sativa (japonica
  misc_feature (24)..(191): Homolog of NCBI NO: 30678634 NR Description: thioredoxin M-type 1, chloroplast precursor
  misc_feature (15)..(191): Homolog of NCBI NO: 11135407 NR Description: Thioredoxin M-type, chloroplast precursor (TRX-M)
  misc_feature (22)..(191): Homolog of NCBI NO: 21618235 NR Description: putative M-type thioredoxin [Arabidopsis thaliana]
  misc_feature (22)..(191): Homolog of NCBI NO: 6539610 NR Description: thioredoxin m2 [Arabidopsis thaliana]
  misc_feature (22)..(191): Homolog of NCBI NO: 15236327 NR Description: putative M-type thioredoxin
  misc_feature (14)..(191): Homolog of NCBI NO: 15594012 NR Description: putative thioredoxin m2 [Pisum sativum]
  misc_feature (1)..(193): Homolog of NCBI NO: 6539614 NR Description: thioredoxin m4 [Arabidopsis thaliana]
  misc_feature (1)..(193): Homolog of NCBI NO: 15232567 NR Description: thioredoxin m4
MASLLDSVTVTRVFSLPIAASVSSSSAAPSVSRRRISPARFLEFRGLKSSRSLVTQSASLGANRRTRIARGGRIACEAQDTTAAAVEVPNLSDSEWQTKVLESDVPVLVEFWAPWCGPCRMIHPIVDQLAKDFAGKFKFYKINTDESPNTANRYGIRSVPTVIIFKGGEKKDSIIGAVPRETLEKTIERFLVE

SEQ ID NO: 37673 - DNA, 1214 bp, Arabidopsis thaliana
  misc_feature (1)..(1214): Ceres Seq. ID no. 12604914
  misc_feature: MA Experiment ID: 20000184 Result: Up-regulated in Transcription
  misc_feature: MA Experiment 20000184 PARAMETER Experiment Name: At_Shoots__P Parameter: Age (day) Value: 7
  misc_feature: MA Experiment 20000184 PARAMETER Experiment Name: At_Shoots__P Parameter: Tissue Value: Shoots vs. Whole Plant
  misc_feature: MA Experiment ID: 20000495 Result: Up-regulated in Transcription
  misc_feature: MA Experiment 20000495 PARAMETER Experiment Name: At_Guard_Cells_P Parameter: Harvest Date Value: 8/2/2002
  misc_feature: MA Experiment 20000495 PARAMETER Experiment Name: At_Guard_Cells_P Parameter: Organism Value: A. thaliana
  misc_feature: MA Experiment 20000495 PARAMETER Experiment Name: At_Guard_Cells_P Parameter: Tissue Value: Guard Cells vs. Leaves
aggctgcttttcttcgtgaatctcagaatcttaaaagactcttcaaatttgagaaaacgtttcactatctaaatccatttctctccctctctctatagccatttagaatgaagaaaagtctcactctactcatcctcctcctctgtactctcctcttctccaccgtcttgagcaacctactcgtcgaaccggtccaacccaacaccgtaccggctttcccggtcgaaacccaagctcaaagctgccggcttgacctctccaacgagctattcggtggcgtcaacgaagcttgcggaagaaaccttgaccggagtcgatgttgccctgttttagccgcttggctcttcgcagctcacgctcgctctgctctccagttaccagctcctgctccaacgccggaatcttctgatcccgacgaacccatgaagcctgacgactctcagaagtgcgtcaacacattgcaaagtgcgcttttgactaaacaaatcaagatccctcagcctaattctagctgtgacgcaatcttgtgcttctgtggtattcgtctccaccagattagctcactctcttgtcccgccgctttcaatgtctcctccggcttcaaaaacgcaactccgaccgccgccgtgaagaatcttgaaaaagaatgccggaactcttcttactccggttgtaccagatgcctcggtgctcttcaaaagctaaaggtaagaggaggaaacaagaagacaacaacagagagagggactaagatgatgagcaaagattgccagctcatgggactcacatggctactagctcgtaacaaaacggcatacattcccactgtttcggctgtgttaagagctattatgtatagtccacacccacctcacctcaacaagtgtagtcctgaccaagagaacatgcctttagcagttgactctctacagtttcaaaagagcttctcttcatcatctcatctttttggggttttaccgtttttacccttagtcctttgtatctttctctttctactgtgatttttttctgtattttttggtcgggaggggtaaagagagtcacgtgaagctacaagacagttgtgtgtatgtaaatgctgtgctctttttttggttctgcaaactcttaaccctcattttttggttttaactgtgttttgtcccatttaacactttgtacgaggtcttgaaattttaaaaaatcatcttggc

SEQ ID NO: 37674 - protein, 304 aa, Arabidopsis thaliana
  peptide (1)..(304): Ceres Seq. ID no. 12604915
  misc_feature (4)..(220): Homolog of NCBI NO: 18401752 NR Description: expressed protein
  misc_feature (81)..(283): Homolog of NCBI NO: 18401752 NR Description: expressed protein
  misc_feature (10)..(304): Homolog of NCBI NO: 34394002 NR Description: unknown protein [Oryza sativa (japonica
  misc_feature (1)..(304): Homolog of NCBI NO: 18417127 NR Description: expressed protein
  misc_feature (1)..(304): Homolog of NCBI NO: 21593735 NR Description: unknown [Arabidopsis thaliana]
MKKSLTLLILLLCTLLFSTVLSNLLVEPVQPNTVPAFPVETQAQSCRLDLSNELFGGVNEACGRNLDRSRCCPVLAAWLFAAHARSALQLPAPAPTPESSDPDEPMKPDDSQKCVNTLQSALLTKQIKIPQPNSSCDAILCFCGIRLHQISSLSCPAAFNVSSGFKNATPTAAVKNLEKECRNSSYSGCTRCLGALQKLKVRGGNKKTTTERGTKMMSKDCQLMGLTWLLARNKTAYIPTVSAVLRAIMYSPHPPHLNKCSPDQENMPLAVDSLQFQKSFSSSSHLFGVLPFLPLVLCIFLFLL

SEQ ID NO: 37675 - protein, 199 aa, Arabidopsis thaliana
  peptide (1)..(199): Ceres Seq. ID no. 12604916
  misc_feature (1)..(115): Homolog of NCBI NO: 18401752 NR Description: expressed protein
  misc_feature (1)..(178): Homolog of NCBI NO: 18401752 NR Description: expressed protein
  misc_feature (1)..(199): Homolog of NCBI NO: 34394002 NR Description: unknown protein [Oryza sativa (japonica
  misc_feature (1)..(199): Homolog of NCBI NO: 18417127 NR Description: expressed protein
  misc_feature (1)..(199): Homolog of NCBI NO: 21593735 NR Description: unknown [Arabidopsis thaliana]
MKPDDSQKCVNTLQSALLTKQIKIPQPNSSCDAILCFCGIRLHQISSLSCPAAFNVSSGFKNATPTAAVKNLEKECRNSSYSGCTRCLGALQKLKVRGGNKKTTTERGTKMMSKDCQLMGLTWLLARNKTAYIPTVSAVLRAIMYSPHPPHLNKCSPDQENMPLAVDSLQFQKSFSSSSHLFGVLPFLPLVLCIFLFLL

SEQ ID NO: 37676 - DNA, 524 bp, Arabidopsis thaliana
  misc_feature (1)..(524): Ceres Seq. ID no. 12331297
  misc_feature: MA Experiment ID: 108434 Result: Down-regulated in Transcription
  misc_feature: MA Experiment 108434 PARAMETER Experiment Name: At_Root_Tips_cDNA_P Parameter: Tissue Value: Root Tips
  misc_feature: MA Experiment ID: 108435 Result: Up-regulated in Transcription
  misc_feature: MA Experiment 108435 PARAMETER Experiment Name: At_stm_Mutants_cDNA_P Parameter: Plant Line Value: wt Landsburg vs stm
  misc_feature: MA Experiment 108435 PARAMETER Experiment Name: At_stm_Mutants_cDNA_P Parameter: Tissue Value: Shoot Apical Meristem Region
  misc_feature: MA Experiment ID: 108461 Result: Down-regulated in Transcription
  misc_feature: MA Experiment 108461 PARAMETER Experiment Name: At_Germinating_Seeds_cDNA_P Parameter: Age (day) Value: 1 vs. 0
  misc_feature: MA Experiment 108461 PARAMETER Experiment Name: At_Germinating_Seeds_cDNA_P Parameter: Tissue Value: Germinating Seeds
  misc_feature: MA Experiment ID: 108473 Result: Up-regulated in Transcription
  misc_feature: MA Experiment 108473 PARAMETER Experiment Name: At_Drought_Flowers_cDNA_P Parameter: Timepoint (hr) Value: 7 d
  misc_feature: MA Experiment 108473 PARAMETER Experiment Name: At_Drought_Flowers_cDNA_P Parameter: Tissue Value: Flower
  misc_feature: MA Experiment 108473 PARAMETER Experiment Name: At_Drought_Flowers_cDNA_P Parameter: Treatment Value: Drought vs. No Drought
  misc_feature: MA Experiment ID: 108561 Result: Up-regulated in Transcription
  misc_feature: MA Experiment 108561 PARAMETER Experiment Name: At_100uM_ABA_cDNA_P Parameter: Timepoint (hr) Value: 6
  misc_feature: MA Experiment 108561 PARAMETER Experiment Name: At_100uM_ABA_cDNA_P Parameter: Tissue Value: Aerial
  misc_feature: MA Experiment 108561 PARAMETER Experiment Name: At_100uM_ABA_cDNA_P Parameter: Treatment Value: 100uM ABA vs. No Treatment
  misc_feature: MA Experiment ID: 108573 Result: Up-regulated in Transcription
  misc_feature: MA Experiment 108573 PARAMETER Experiment Name: At_Drought_cDNA_P Parameter: Timepoint (hr) Value: 6
  misc_feature: MA Experiment 108573 PARAMETER Experiment Name: At_Drought_cDNA_P Parameter: Tissue Value: Aerial
  misc_feature: MA Experiment 108573 PARAMETER Experiment Name: At_Drought_cDNA_P Parameter: Treatment Value: Drought vs. No Drought
  misc_feature: MA Experiment ID: 108594 Result: Down-regulated in Transcription
  misc_feature: MA Experiment 108594 PARAMETER Experiment Name: At_Ler-rhl_Root_cDNA_P Parameter: Plant Line Value: null
  misc_feature: MA Experiment ID: 108595 Result: Up-regulated in Transcription
  misc_feature: MA Experiment 108595 PARAMETER Experiment Name: At_Ler-pi_Ovule_cDNA_P Parameter: Plant Line Value: null
  misc_feature: MA Experiment ID: 108605 Result: Up-regulated in Transcription
  misc_feature: MA Experiment 108605 PARAMETER Experiment Name: At_100uM_ABA_cDNA_P Parameter: Timepoint (hr) Value: 6
  misc_feature: MA Experiment 108605 PARAMETER Experiment Name: At_100uM_ABA_cDNA_P Parameter: Tissue Value: Aerial
  misc_feature: MA Experiment 108605 PARAMETER Experiment Name: At_100uM_ABA_cDNA_P Parameter: Treatment Value: 100uM ABA vs. No Treatment
  misc_feature: MA Experiment ID: 108607 Result: Up-regulated in Transcription
  misc_feature: MA Experiment 108607 PARAMETER Experiment Name: At_100uM_ABA_cDNA_P Parameter: Timepoint (hr) Value: 4
  misc_feature: MA Experiment 108607 PARAMETER Experiment Name: At_100uM_ABA_cDNA_P Parameter: Tissue Value: Aerial
  misc_feature: MA Experiment 108607 PARAMETER Experiment Name: At_100uM_ABA_cDNA_P Parameter: Treatment Value: 100uM ABA vs. No Treatment
  misc_feature: MA Experiment ID: 108609 Result: Up-regulated in Transcription
  misc_feature: MA Experiment 108609 PARAMETER Experiment Name: At_100uM_ABA_cDNA_P Parameter: Timepoint (hr) Value: 24
  misc_feature: MA Experiment 108609 PARAMETER Experiment Name: At_100uM_ABA_cDNA_P Parameter: Tissue Value: Aerial
  misc_feature: MA Experiment 108609 PARAMETER Experiment Name: At_100uM_ABA_cDNA_P Parameter: Treatment Value: 100uM ABA vs. No Treatment
  misc_feature: MA Experiment ID: 20000069 Result: Up-regulated in Transcription
  misc_feature: MA Experiment 20000069 PARAMETER Experiment Name: At_100uM_ABA_Mutants_cDNA_P Parameter: Plant Line Value: CS23
  misc_feature: MA Experiment 20000069 PARAMETER Experiment Name: At_100uM_ABA_Mutants_cDNA_P Parameter: Timepoint (hr) Value: 6
  misc_feature: MA Experiment 20000069 PARAMETER Experiment Name: At_100uM_ABA_Mutants_cDNA_P Parameter: Tissue Value: Aerial
  misc_feature: MA Experiment 20000069 PARAMETER Experiment Name: At_100uM_ABA_Mutants_cDNA_P Parameter: Treatment Value: 100uM ABA vs. No Treatment
  misc_feature: MA Experiment ID: 20000071 Result: Up-regulated in Transcription
  misc_feature: MA Experiment 20000071 PARAMETER Experiment Name: At_100uM_ABA_Mutants_cDNA_P Parameter: Plant Line Value: CS8104
  misc_feature: MA Experiment 20000071 PARAMETER Experiment Name: At_100uM_ABA_Mutants_cDNA_P Parameter: Timepoint (hr) Value: 6
  misc_feature: MA Experiment 20000071 PARAMETER Experiment Name: At_100uM_ABA_Mutants_cDNA_P Parameter: Tissue Value: Aerial
  misc_feature: MA Experiment 20000071 PARAMETER Experiment Name: At_100uM_ABA_Mutants_cDNA_P Parameter: Treatment Value: 100uM ABA vs. No Treatment
  misc_feature: MA Experiment ID: 20000087 Result: Up-regulated in Transcription
  misc_feature: MA Experiment 20000087 PARAMETER Experiment Name: At_100uM_ABA_Mutants_cDNA_P Parameter: Plant Line Value: WS
  misc_feature: MA Experiment 20000087 PARAMETER Experiment Name: At_100uM_ABA_Mutants_cDNA_P Parameter: Timepoint (hr) Value: 6
  misc_feature: MA Experiment 20000087 PARAMETER Experiment Name: At_100uM_ABA_Mutants_cDNA_P Parameter: Tissue Value: Aerial
  misc_feature: MA Experiment 20000087 PARAMETER Experiment Name: At_100uM_ABA_Mutants_cDNA_P Parameter: Treatment Value: 100uM ABA vs. No Treatment
  misc_feature: MA Experiment ID: 20000090 Result: Down-regulated in Transcription
  misc_feature: MA Experiment ID: 20000111 Result: Up-regulated in Transcription
  misc_feature: MA Experiment 20000111 PARAMETER Experiment Name: At_42deg_Heat_cDNA_P Parameter: Temperature (deg C) Value: 42 vs. 22
  misc_feature: MA Experiment 20000111 PARAMETER Experiment Name: At_42deg_Heat_cDNA_P Parameter: Timepoint (hr) Value: 6
  misc_feature: MA Experiment 20000111 PARAMETER Experiment Name: At_42deg_Heat_cDNA_P Parameter: Tissue Value: Aerial
  misc_feature: MA Experiment ID: 20000117 Result: Up-regulated in Transcription
  misc_feature: MA Experiment 20000117 PARAMETER Experiment Name: At_100uM_ABA_Mutants_cDNA_P Parameter: Plant Line Value: Columbia
  misc_feature: MA Experiment 20000117 PARAMETER Experiment Name: At_100uM_ABA_Mutants_cDNA_P Parameter: Timepoint (hr) Value: 6
  misc_feature: MA Experiment 20000117 PARAMETER Experiment Name: At_100uM_ABA_Mutants_cDNA_P Parameter: Tissue Value: Aerial
  misc_feature: MA Experiment 20000117 PARAMETER Experiment Name: At_100uM_ABA_Mutants_cDNA_P Parameter: Treatment Value: 100uM ABA vs. No Treatment
  misc_feature: MA Experiment ID: 20000169 Result: Up-regulated in Transcription
  misc_feature: MA Experiment 20000169 PARAMETER Experiment Name: At_100uM_ABA_P Parameter: Age (day) Value: 14
  misc_feature: MA Experiment 20000169 PARAMETER Experiment Name: At_100uM_ABA_P Parameter: Organism Value: A. thaliana
  misc_feature: MA Experiment 20000169 PARAMETER Experiment Name: At_100uM_ABA_P Parameter: Plant Line Value: WS
  misc_feature: MA Experiment 20000169 PARAMETER Experiment Name: At_100uM_ABA_P Parameter: Timepoint (hr) Value: 6
  misc_feature: MA Experiment 20000169 PARAMETER Experiment Name: At_100uM_ABA_P Parameter: Tissue Value: Aerial
  misc_feature: MA Experiment 20000169 PARAMETER Experiment Name: At_100uM_ABA_P Parameter: Treatment Value: 100uM ABA vs. No Treatment
  misc_feature: MA Experiment ID: 20000179 Result: Down-regulated in Transcription
  misc_feature: MA Experiment 20000179 PARAMETER Experiment Name: At_Germinating_Seeds_P Parameter: Age (hr) Value: 6 vs. 0
  misc_feature: MA Experiment 20000179 PARAMETER Experiment Name: At_Germinating_Seeds_P Parameter: Tissue Value: Germinating Seeds
  misc_feature: MA Experiment ID: 20000180 Result: Down-regulated in Transcription
  misc_feature: MA Experiment 20000180 PARAMETER Experiment Name: At_Germinating_Seeds_P Parameter: Age (hr) Value: 24 vs. 0
  misc_feature: MA Experiment 20000180 PARAMETER Experiment Name: At_Germinating_Seeds_P Parameter: Tissue Value: Germinating Seeds
  misc_feature: MA Experiment ID: 20000227 Result: Down-regulated in Transcription
  misc_feature: MA Experiment 20000227 PARAMETER Experiment Name: At_Root-Tips-vs-Tops_P Parameter: Tissue Value: Root Tips vs. Root Tops
  misc_feature: MA Experiment ID: 20000234 Result: Up-regulated in Transcription
  misc_feature: MA Experiment 20000234 PARAMETER Experiment Name: At_Siliques_P Parameter: Age (day) Value: 21
  misc_feature: MA Experiment 20000234 PARAMETER Experiment Name: At_Siliques_P Parameter: Organism Value: A. thaliana
  misc_feature: MA Experiment 20000234 PARAMETER Experiment Name: At_Siliques_P Parameter: Plant Line Value: WS
  misc_feature: MA Experiment 20000234 PARAMETER Experiment Name: At_Siliques_P Parameter: Tissue Value: Less Than 5mm Siliques vs. Whole Plant
  misc_feature: MA Experiment ID: 20000264 Result: Up-regulated in Transcription
  misc_feature: MA Experiment 20000264 PARAMETER Experiment Name: At_Open_Flower_P Parameter: Age (day) Value: 21
  misc_feature: MA Experiment 20000264 PARAMETER Experiment Name: At_Open_Flower_P Parameter: Plant Line Value: WS
  misc_feature: MA Experiment 20000264 PARAMETER Experiment Name: At_Open_Flower_P Parameter: Tissue Value: Open Flower vs. Whole Plant
  misc_feature: MA Experiment ID: 20000265 Result: Up-regulated in Transcription
  misc_feature: MA Experiment 20000265 PARAMETER Experiment Name: At_Open_Flower_P Parameter: Age (day) Value: 21
  misc_feature: MA Experiment 20000265 PARAMETER Experiment Name: At_Open_Flower_P Parameter: Plant Line Value: WS
  misc_feature: MA Experiment 20000265 PARAMETER Experiment Name: At_Open_Flower_P Parameter: Tissue Value: Closed Flower vs. Whole Plant
  misc_feature: MA Experiment ID: 20000269 Result: Down-regulated in Transcription
  misc_feature: MA Experiment 20000269 PARAMETER Experiment Name: At_1mM_KNO3_L-vs-H_Roots_P Parameter: Age (day) Value: 7,10,12
  misc_feature: MA Experiment 20000269 PARAMETER Experiment Name: At_1mM_KNO3_L-vs-H_Roots_P Parameter: Organism Value: A. thaliana
  misc_feature: MA Experiment 20000269 PARAMETER Experiment Name: At_1mM_KNO3_L-vs-H_Roots_P Parameter: Plant Line Value: WS
  misc_feature: MA Experiment 20000269 PARAMETER Experiment Name: At_1mM_KNO3_L-vs-H_Roots_P Parameter: Timepoint (day) Value: 7,10,12
  misc_feature: MA Experiment 20000269 PARAMETER Experiment Name: At_1mM_KNO3_L-vs-H_Roots_P Parameter: Tissue Value: Roots
  misc_feature: MA Experiment 20000269 PARAMETER Experiment Name: At_1mM_KNO3_L-vs-H_Roots_P Parameter: Treatment Value: 1mM KNO3 vs. 50mM KNO3
  misc_feature: MA Experiment ID: 20000286 Result: Up-regulated in Transcription
  misc_feature: MA Experiment 20000286 PARAMETER Experiment Name: At_Open_Flower_P Parameter: Age (day) Value: 21
  misc_feature: MA Experiment 20000286 PARAMETER Experiment Name: At_Open_Flower_P Parameter: Plant Line Value: WS
  misc_feature: MA Experiment 20000286 PARAMETER Experiment Name: At_Open_Flower_P Parameter: Tissue Value: Half Open vs. Whole Plant
  misc_feature: MA Experiment ID: 20000436 Result: Up-regulated in Transcription
  misc_feature: MA Experiment 20000436 PARAMETER Experiment Name: At_Drought_P Parameter: Age (day) Value: 7
  misc_feature: MA Experiment 20000436 PARAMETER Experiment Name: At_Drought_P Parameter: Organism Value: A. thaliana
  misc_feature: MA Experiment 20000436 PARAMETER Experiment Name: At_Drought_P Parameter: Plant Line Value: WS
  misc_feature: MA Experiment 20000436 PARAMETER Experiment Name: At_Drought_P Parameter: Timepoint (hr) Value: 12
  misc_feature: MA Experiment 20000436 PARAMETER Experiment Name: At_Drought_P Parameter: Tissue Value: Whole Plant
  misc_feature: MA Experiment 20000436 PARAMETER Experiment Name: At_Drought_P Parameter: Treatment Value: Drought vs. No Drought
  misc_feature: MA Experiment ID: 20000438 Result: Down-regulated in Transcription
  misc_feature: MA Experiment 20000438 PARAMETER Experiment Name: At_Shoots__P Parameter: Age (day) Value: 14
  misc_feature: MA Experiment 20000438 PARAMETER Experiment Name: At_Shoots__P Parameter: Tissue Value: Shoots vs. Whole Plant
  misc_feature: MA Experiment ID: 20000453 Result: Up-regulated in Transcription
  misc_feature: MA Experiment 20000453 PARAMETER Experiment Name: At_100uM_ABA_P Parameter: Age (day) Value: 15
  misc_feature: MA Experiment 20000453 PARAMETER Experiment Name: At_100uM_ABA_P Parameter: Organism Value: A. thaliana
  misc_feature: MA Experiment 20000453 PARAMETER Experiment Name: At_100uM_ABA_P Parameter: Plant Line Value: WS
  misc_feature: MA Experiment 20000453 PARAMETER Experiment Name: At_100uM_ABA_P Parameter: Timepoint (hr) Value: 24
  misc_feature: MA Experiment 20000453 PARAMETER Experiment Name: At_100uM_ABA_P Parameter: Tissue Value: Aerial
  misc_feature: MA Experiment 20000453 PARAMETER Experiment Name: At_100uM_ABA_P Parameter: Treatment Value: 100uM ABA vs. No Treatment
  misc_feature: MA Experiment ID: 20000455 Result: Up-regulated in Transcription
  misc_feature: MA Experiment 20000455 PARAMETER Experiment Name: At_100uM_ABA_P Parameter: Age (day) Value: 16
  misc_feature: MA Experiment 20000455 PARAMETER Experiment Name: At_100uM_ABA_P Parameter: Organism Value: A. thaliana
  misc_feature: MA Experiment 20000455 PARAMETER Experiment Name: At_100uM_ABA_P Parameter: Plant Line Value: WS
  misc_feature: MA Experiment 20000455 PARAMETER Experiment Name: At_100uM_ABA_P Parameter: Timepoint (hr) Value: 48
  misc_feature: MA Experiment 20000455 PARAMETER Experiment Name: At_100uM_ABA_P Parameter: Tissue Value: Aerial
  misc_feature: MA Experiment 20000455 PARAMETER Experiment Name: At_100uM_ABA_P Parameter: Treatment Value: 100uM ABA vs. No Treatment
  misc_feature: MA Experiment ID: 20000794 Result: Up-regulated in Transcription
  misc_feature: MA Experiment 20000794 PARAMETER Experiment Name: At_Petals_P Parameter: Age (day) Value: 23-25 days
  misc_feature: MA Experiment 20000794 PARAMETER Experiment Name: At_Petals_P Parameter: Plant Line Value: WS
  misc_feature: MA Experiment 20000794 PARAMETER Experiment Name: At_Petals_P Parameter: Tissue Value: Petals vs. Whole plant
  misc_feature: MA Experiment ID: 20001248 Result: Down-regulated in Transcription
  misc_feature: MA Experiment 20001248 PARAMETER Experiment Name: At_Far-red-induction_P Parameter: Age (day) Value: 7
  misc_feature: MA Experiment 20001248 PARAMETER Experiment Name: At_Far-red-induction_P Parameter: Light Value: Far-red vs. White
  misc_feature: MA Experiment 20001248 PARAMETER Experiment Name: At_Far-red-induction_P Parameter: Organism Value: A. thaliana
  misc_feature: MA Experiment 20001248 PARAMETER Experiment Name: At_Far-red-induction_P Parameter: Plant Line Value: Columbia
  misc_feature: MA Experiment 20001248 PARAMETER Experiment Name: At_Far-red-induction_P Parameter: Timepoint (hr) Value: 4
  misc_feature: MA Experiment 20001248 PARAMETER Experiment Name: At_Far-red-induction_P Parameter: Tissue Value: Whole Plant
  misc_feature: MA Experiment ID: 20001554 Result: Up-regulated in Transcription
  misc_feature: MA Experiment 20001554 PARAMETER Experiment Name: At_Drought_Soil_Dry_P Parameter: Age (day) Value: 21
  misc_feature: MA Experiment 20001554 PARAMETER Experiment Name: At_Drought_Soil_Dry_P Parameter: Organism Value: A. thaliana
  misc_feature: MA Experiment 20001554 PARAMETER Experiment Name: At_Drought_Soil_Dry_P Parameter: Plant Line Value: WS
  misc_feature: MA Experiment 20001554 PARAMETER Experiment Name: At_Drought_Soil_Dry_P Parameter: Post Timepoint (hr) Value: None
  misc_feature: MA Experiment 20001554 PARAMETER Experiment Name: At_Drought_Soil_Dry_P Parameter: Post-Treatment Value: None
  misc_feature: MA Experiment 20001554 PARAMETER Experiment Name: At_Drought_Soil_Dry_P Parameter: Timepoint (day) Value: 7
  misc_feature: MA Experiment 20001554 PARAMETER Experiment Name: At_Drought_Soil_Dry_P Parameter: Treatment Value: Drought vs. No Drought
  misc_feature: MA Experiment ID: 20001555 Result: Up-regulated in Transcription
  misc_feature: MA Experiment 20001555 PARAMETER Experiment Name: At_Drought_Soil_Dry_P Parameter: Age (day) Value: 24
  misc_feature: MA Experiment 20001555 PARAMETER Experiment Name: At_Drought_Soil_Dry_P Parameter: Organism Value: A. thaliana
  misc_feature: MA Experiment 20001555 PARAMETER Experiment Name: At_Drought_Soil_Dry_P Parameter: Plant Line Value: WS
  misc_feature: MA Experiment 20001555 PARAMETER Experiment Name: At_Drought_Soil_Dry_P Parameter: Post Timepoint (hr) Value: None
  misc_feature: MA Experiment 20001555 PARAMETER Experiment Name: At_Drought_Soil_Dry_P Parameter: Post-Treatment Value: None
  misc_feature: MA Experiment 20001555 PARAMETER Experiment Name: At_Drought_Soil_Dry_P Parameter: Timepoint (day) Value: 10
  misc_feature: MA Experiment 20001555 PARAMETER Experiment Name: At_Drought_Soil_Dry_P Parameter: Treatment Value: Drought vs. No Drought
  misc_feature: MA Experiment ID: 20001556 Result: Up-regulated in Transcription
  misc_feature: MA Experiment 20001556 PARAMETER Experiment Name: At_Drought_Soil_Dry_P Parameter: Age (day) Value: 26
  misc_feature: MA Experiment 20001556 PARAMETER Experiment Name: At_Drought_Soil_Dry_P Parameter: Organism Value: A. thaliana
  misc_feature: MA Experiment 20001556 PARAMETER Experiment Name: At_Drought_Soil_Dry_P Parameter: Plant Line Value: WS
  misc_feature: MA Experiment 20001556 PARAMETER Experiment Name: At_Drought_Soil_Dry_P Parameter: Post Timepoint (hr) Value: None
  misc_feature: MA Experiment 20001556 PARAMETER Experiment Name: At_Drought_Soil_Dry_P Parameter: Post-Treatment Value: None
  misc_feature: MA Experiment 20001556 PARAMETER Experiment Name: At_Drought_Soil_Dry_P Parameter: Timepoint (day) Value: 12
  misc_feature: MA Experiment 20001556 PARAMETER Experiment Name: At_Drought_Soil_Dry_P Parameter: Treatment Value: Drought vs. No Drought
  misc_feature: MA Experiment ID: 20001559 Result: Up-regulated in Transcription
  misc_feature: MA Experiment 20001559 PARAMETER Experiment Name: At_Drought_Soil_Dry_P Parameter: Age (day) Value: 28
  misc_feature: MA Experiment 20001559 PARAMETER Experiment Name: At_Drought_Soil_Dry_P Parameter: Organism Value: A. thaliana
  misc_feature: MA Experiment 20001559 PARAMETER Experiment Name: At_Drought_Soil_Dry_P Parameter: Plant Line Value: WS
  misc_feature: MA Experiment 20001559 PARAMETER Experiment Name: At_Drought_Soil_Dry_P Parameter: Post Timepoint (hr) Value: 29
  misc_feature: MA Experiment 20001559 PARAMETER Experiment Name: At_Drought_Soil_Dry_P Parameter: Post-Treatment Value: Re-Water vs. No Drought
  misc_feature: MA Experiment 20001559 PARAMETER Experiment Name: At_Drought_Soil_Dry_P Parameter: Timepoint (day) Value: 14
  misc_feature: MA Experiment 20001559 PARAMETER Experiment Name: At_Drought_Soil_Dry_P Parameter: Treatment Value: Drought vs. No Drought
  misc_feature: MA Experiment ID: 20001757 Result: Up-regulated in Transcription
  misc_feature: MA Experiment 20001757 PARAMETER Experiment Name: At_50mM_NH4NO3_L-to-H_P Parameter: Timepoint (hr) Value: 6
  misc_feature: MA Experiment 20001757 PARAMETER Experiment Name: At_50mM_NH4NO3_L-to-H_P Parameter: Tissue Value: Leaf
  misc_feature: MA Experiment 20001757 PARAMETER Experiment Name: At_50mM_NH4NO3_L-to-H_P Parameter: Treatment Value: 50mM NH4NO3 vs 100mM Mannitol
  misc_feature: MA Experiment ID: 20001773 Result: Up-regulated in Transcription
  misc_feature: MA Experiment 20001773 PARAMETER Experiment Name: At_Far-red-enriched-adult_P Parameter: Age (day) Value: 30
  misc_feature: MA Experiment 20001773 PARAMETER Experiment Name: At_Far-red-enriched-adult_P Parameter: Light Value: Far-red enriched vs. White
  misc_feature: MA Experiment 20001773 PARAMETER Experiment Name: At_Far-red-enriched-adult_P Parameter: Organism Value: A. thaliana
  misc_feature: MA Experiment 20001773 PARAMETER Experiment Name: At_Far-red-enriched-adult_P Parameter: Plant Line Value: Columbia
  misc_feature: MA Experiment 20001773 PARAMETER Experiment Name: At_Far-red-enriched-adult_P Parameter: Timepoint (hr) Value: 48
  misc_feature: MA Experiment 20001773 PARAMETER Experiment Name: At_Far-red-enriched-adult_P Parameter: Tissue Value: Aerial
  misc_feature: MA Experiment ID: 20001774 Result: Up-regulated in Transcription
  misc_feature: MA Experiment 20001774 PARAMETER Experiment Name: At_Far-red-enriched-adult_P Parameter: Age (day) Value: 31
  misc_feature: MA Experiment 20001774 PARAMETER Experiment Name: At_Far-red-enriched-adult_P Parameter: Light Value: Far-red enriched vs. White
  misc_feature: MA Experiment 20001774 PARAMETER Experiment Name: At_Far-red-enriched-adult_P Parameter: Organism Value: A. thaliana
  misc_feature: MA Experiment 20001774 PARAMETER Experiment Name: At_Far-red-enriched-adult_P Parameter: Plant Line Value: Columbia
  misc_feature: MA Experiment 20001774 PARAMETER Experiment Name: At_Far-red-enriched-adult_P Parameter: Timepoint (hr) Value: 72
  misc_feature: MA Experiment 20001774 PARAMETER Experiment Name: At_Far-red-enriched-adult_P Parameter: Tissue Value: Aerial
aaaacagaacaaacacaaacacaaacagagaatcaacgaagaagaaaaatggtgaaggtgatgtgggtttccgttttagctctggcggcggcgattctccttttgacggtcccggtggcagaaggggtgacgtgctcgcctatgcagctggcttcatgtgcggcggcgatgacgtcatcgtcgccgccatcggaggcgtgttgcacaaagctgagagagcagcagccatgcctttgtgggtacatgaggaaccctaccctccgccaatacgttagctcccctaacgcaaggaaagtctccaacagttgcaagattccttccccaagctgttaaggaaatgttaatcatgattaattagtgacaagtttcgctgattatagtggttaatgctggtcttatcttcgtcagtactacttaaaataataaatgagtgatgatgattgatgattatcatcatcatgcttgaatgttatgttttctatcttataaaatatgaaatatactttagaaatatgtttcgtcgt

SEQ ID NO: 37677 - protein, 110 aa, Arabidopsis thaliana
  peptide (1)..(110): Ceres Seq. ID no. 12331298
  misc_feature (45)..(110): Pfam Name: Protease inhibitor/seed storage/LTP family Pfam Description: Protease inhibitor/seed storage/LTP family
  misc_feature (43)..(110): Homolog of NCBI NO: 14423789 NR Description: NONSPECIFIC LIPID-TRANSFER PROTEIN 2 (LTP 2)
  misc_feature (24)..(110): Homolog of NCBI NO: 24745959 NR Description: putative lipid transfer protein [Solanum
  misc_feature (24)..(110): Homolog of NCBI NO: 498036 NR Description: lipid transfer protein
  misc_feature (16)..(110): Homolog of NCBI NO: 7489428 NR Description: probable lipid transfer protein - barley
  misc_feature (16)..(110): Homolog of NCBI NO: 3183088 NR Description: Probable nonspecific lipid-transfer protein AKCS9
  misc_feature (29)..(110): Homolog of NCBI NO: 543650 NR Description: P48h-10 protein precursor - Zinnia elegans (cv.
  misc_feature (29)..(110): Homolog of NCBI NO: 543565 NR Description: hypothetical 10.0K protein - Zinnia elegans
  misc_feature (17)..(110): Homolog of NCBI NO: 15229614 NR Description: lipid transfer protein, putative
  misc_feature (17)..(110): Homolog of NCBI NO: 12597812 NR Description: lipid transfer protein, putative [Arabidopsis
  misc_feature (17)..(110): Homolog of NCBI NO: 18402345 NR Description: lipid transfer protein, putative
KTEQTQTQTENQRRRKMVKVMWVSVLALAAAILLLTVPVAEGVTCSPMQLASCAAAMTSSSPPSEACCTKLREQQPCLCGYMRNPTLRQYVSSPNARKVSNSCKIPSPSC

SEQ ID NO: 37678 - protein, 94 aa, Arabidopsis thaliana
  peptide (1)..(94): Ceres Seq. ID no. 12331299
  misc_feature (29)..(94): Pfam Name: Protease inhibitor/seed storage/LTP family Pfam Description: Protease inhibitor/seed storage/LTP family
  misc_feature (27)..(94): Homolog of NCBI NO: 14423789 NR Description: NONSPECIFIC LIPID-TRANSFER PROTEIN 2 (LTP 2)
  misc_feature (8)..(94): Homolog of NCBI NO: 24745959 NR Description: putative lipid transfer protein [Solanum
  misc_feature (8)..(94): Homolog of NCBI NO: 498036 NR Description: lipid transfer protein
  misc_feature (1)..(94): Homolog of NCBI NO: 7489428 NR Description: probable lipid transfer protein - barley
  misc_feature (1)..(94): Homolog of NCBI NO: 3183088 NR Description: Probable nonspecific lipid-transfer protein AKCS9
  misc_feature (13)..(94): Homolog of NCBI NO: 543650 NR Description: P48h-10 protein precursor - Zinnia elegans (cv.
  misc_feature (13)..(94): Homolog of NCBI NO: 543565 NR Description: hypothetical 10.0K protein - Zinnia elegans
  misc_feature (1)..(94): Homolog of NCBI NO: 15229614 NR Description: lipid transfer protein, putative
  misc_feature (1)..(94): Homolog of NCBI NO: 12597812 NR Description: lipid transfer protein, putative [Arabidopsis
  misc_feature (1)..(94): Homolog of NCBI NO: 18402345 NR Description: lipid transfer protein, putative
MVKVMWVSVLALAAAILLLTVPVAEGVTCSPMQLASCAAAMTSSSPPSEACCTKLREQQPCLCGYMRNPTLRQYVSSPNARKVSNSCKIPSPSC

SEQ ID NO: 37679 - protein, 90 aa, Arabidopsis thaliana
  peptide (1)..(90): Ceres Seq. ID no. 12331300
NRTNTNTNRESTKKKNGEGDVGFRFSSGGGDSPFDGPGGRRGDVLAYAAGFMCGGDDVIVAAIGGVLHKAERAAAMPLWVHEEPYPPPIR

SEQ ID NO: 37680 - DNA, 1190 bp, Arabidopsis thaliana
  misc_feature (1)..(1190): Ceres Seq. ID no. 12337456
  misc_feature: MA Experiment ID: 108434 Result: Down-regulated in Transcription
  misc_feature: MA Experiment 108434 PARAMETER Experiment Name: At_Root_Tips_cDNA_P Parameter: Tissue Value: Root Tips
  misc_feature: MA Experiment ID: 108435 Result: Up-regulated in Transcription
  misc_feature: MA Experiment 108435 PARAMETER Experiment Name: At_stm_Mutants_cDNA_P Parameter: Plant Line Value: wt Landsburg vs stm
  misc_feature: MA Experiment 108435 PARAMETER Experiment Name: At_stm_Mutants_cDNA_P Parameter: Tissue Value: Shoot Apical Meristem Region
  misc_feature: MA Experiment ID: 108462 Result: Down-regulated in Transcription
  misc_feature: MA Experiment 108462 PARAMETER Experiment Name: At_Germinating_Seeds_cDNA_P Parameter: Age (day) Value: 2 vs. 0
  misc_feature: MA Experiment 108462 PARAMETER Experiment Name: At_Germinating_Seeds_cDNA_P Parameter: Tissue Value: Germinating Seeds
  misc_feature: MA Experiment ID: 108463 Result: Down-regulated in Transcription
  misc_feature: MA Experiment 108463 PARAMETER Experiment Name: At_Germinating_Seeds_cDNA_P Parameter: Age (day) Value: 3 vs. 0
  misc_feature: MA Experiment 108463 PARAMETER Experiment Name: At_Germinating_Seeds_cDNA_P Parameter: Tissue Value: Germinating Seeds
  misc_feature: MA Experiment ID: 108464 Result: Down-regulated in Transcription
  misc_feature: MA Experiment 108464 PARAMETER Experiment Name: At_Germinating_Seeds_cDNA_P Parameter: Age (day) Value: 4 vs. 0
  misc_feature: MA Experiment 108464 PARAMETER Experiment Name: At_Germinating_Seeds_cDNA_P Parameter: Tissue Value: Germinating Seeds
  misc_feature: MA Experiment ID: 108473 Result: Down-regulated in Transcription
  misc_feature: MA Experiment 108473 PARAMETER Experiment Name: At_Drought_Flowers_cDNA_P Parameter: Timepoint (hr) Value: 7 d
  misc_feature: MA Experiment 108473 PARAMETER Experiment Name: At_Drought_Flowers_cDNA_P Parameter: Tissue Value: Flower
  misc_feature: MA Experiment 108473 PARAMETER Experiment Name: At_Drought_Flowers_cDNA_P Parameter: Treatment Value: Drought vs. No Drought
  misc_feature: MA Experiment ID: 108594 Result: Down-regulated in Transcription
  misc_feature: MA Experiment 108594 PARAMETER Experiment Name: At_Ler-rhl_Root_cDNA_P Parameter: Plant Line Value: null
  misc_feature: MA Experiment ID: 20000144 Result: Down-regulated in Transcription
  misc_feature: MA Experiment 20000144 PARAMETER Experiment Name: At_42deg_Heat_cDNA_P Parameter: Temperature (deg C) Value: 42 vs. 22
  misc_feature: MA Experiment 20000144 PARAMETER Experiment Name: At_42deg_Heat_cDNA_P Parameter: Timepoint (hr) Value: 1
  misc_feature: MA Experiment 20000144 PARAMETER Experiment Name: At_42deg_Heat_cDNA_P Parameter: Tissue Value: Aerial
  misc_feature: MA Experiment ID: 20000171 Result: Down-regulated in Transcription
  misc_feature: MA Experiment 20000171 PARAMETER Experiment Name: At_42deg_Heat_P Parameter: Age (day) Value: 14
  misc_feature: MA Experiment 20000171 PARAMETER Experiment Name: At_42deg_Heat_P Parameter: Organism Value: A. thaliana
  misc_feature: MA Experiment 20000171 PARAMETER Experiment Name: At_42deg_Heat_P Parameter: Plant Line Value: WS
  misc_feature: MA Experiment 20000171 PARAMETER Experiment Name: At_42deg_Heat_P Parameter: Temperature (deg C) Value: 42 vs. 22
  misc_feature: MA Experiment 20000171 PARAMETER Experiment Name: At_42deg_Heat_P Parameter: Timepoint (hr) Value: 1
  misc_feature: MA Experiment 20000171 PARAMETER Experiment Name: At_42deg_Heat_P Parameter: Tissue Value: Aerial
  misc_feature: MA Experiment ID: 20000173 Result: Down-regulated in Transcription
  misc_feature: MA Experiment 20000173 PARAMETER Experiment Name: At_42deg_Heat_P Parameter: Age (day) Value: 14
  misc_feature: MA Experiment 20000173 PARAMETER Experiment Name: At_42deg_Heat_P Parameter: Organism Value: A. thaliana
  misc_feature: MA Experiment 20000173 PARAMETER Experiment Name: At_42deg_Heat_P Parameter: Plant Line Value: WS
  misc_feature: MA Experiment 20000173 PARAMETER Experiment Name: At_42deg_Heat_P Parameter: Temperature (deg C) Value: 42 vs. 22
  misc_feature: MA Experiment 20000173 PARAMETER Experiment Name: At_42deg_Heat_P Parameter: Timepoint (hr) Value: 6
  misc_feature: MA Experiment 20000173 PARAMETER Experiment Name: At_42deg_Heat_P Parameter: Tissue Value: Aerial
  misc_feature: MA Experiment ID: 20000184 Result: Up-regulated in Transcription
  misc_feature: MA Experiment 20000184 PARAMETER Experiment Name: At_Shoots__P Parameter: Age (day) Value: 7
  misc_feature: MA Experiment 20000184 PARAMETER Experiment Name: At_Shoots__P Parameter: Tissue Value: Shoots vs. Whole Plant
  misc_feature: MA Experiment ID: 20000185 Result: Up-regulated in Transcription
  misc_feature: MA Experiment 20000185 PARAMETER Experiment Name: At_Roots__P Parameter: Age (day) Value: 7 vs. 21
  misc_feature: MA Experiment 20000185 PARAMETER Experiment Name: At_Roots__P Parameter: Organism Value: A. thaliana
  misc_feature: MA Experiment 20000185 PARAMETER Experiment Name: At_Roots__P Parameter: Tissue Value: Roots vs. Whole Plant
  misc_feature: MA Experiment ID: 20000224 Result: Up-regulated in Transcription
  misc_feature: MA Experiment ID: 20000227 Result: Down-regulated in Transcription
  misc_feature: MA Experiment 20000227 PARAMETER Experiment Name: At_Root-Tips-vs-Tops_P Parameter: Tissue Value: Root Tips vs. Root Tops
  misc_feature: MA Experiment ID: 20000234 Result: Up-regulated in Transcription
  misc_feature: MA Experiment 20000234 PARAMETER Experiment Name: At_Siliques_P Parameter: Age (day) Value: 21
  misc_feature: MA Experiment 20000234 PARAMETER Experiment Name: At_Siliques_P Parameter: Organism Value: A. thaliana
  misc_feature: MA Experiment 20000234 PARAMETER Experiment Name: At_Siliques_P Parameter: Plant Line Value: WS
  misc_feature: MA Experiment 20000234 PARAMETER Experiment Name: At_Siliques_P Parameter: Tissue Value: Less Than 5mm Siliques vs. Whole Plant
  misc_feature: MA Experiment ID: 20000265 Result: Up-regulated in Transcription
  misc_feature: MA Experiment 20000265 PARAMETER Experiment Name: At_Open_Flower_P Parameter: Age (day) Value: 21
  misc_feature: MA Experiment 20000265 PARAMETER Experiment Name: At_Open_Flower_P Parameter: Plant Line Value: WS
  misc_feature: MA Experiment 20000265 PARAMETER Experiment Name: At_Open_Flower_P Parameter: Tissue Value: Closed Flower vs. Whole Plant
  misc_feature: MA Experiment ID: 20000286 Result: Up-regulated in Transcription
  misc_feature: MA Experiment 20000286 PARAMETER Experiment Name: At_Open_Flower_P Parameter: Age (day) Value: 21
  misc_feature: MA Experiment 20000286 PARAMETER Experiment Name: At_Open_Flower_P Parameter: Plant Line Value: WS
  misc_feature: MA Experiment 20000286 PARAMETER Experiment Name: At_Open_Flower_P Parameter: Tissue Value: Half Open vs. Whole Plant
  misc_feature: MA Experiment ID: 20000439 Result: Up-regulated in Transcription
  misc_feature: MA Experiment 20000439 PARAMETER Experiment Name: At_Roots__P Parameter: Age (day) Value: 14 vs. 21
  misc_feature: MA Experiment 20000439 PARAMETER Experiment Name: At_Roots__P Parameter: Organism Value: A. thaliana
  misc_feature: MA Experiment 20000439 PARAMETER Experiment Name: At_Roots__P Parameter: Tissue Value: Roots vs. Whole Plant
  misc_feature: MA Experiment ID: 20000794 Result: Down-regulated in Transcription
  misc_feature: MA Experiment 20000794 PARAMETER Experiment Name: At_Petals_P Parameter: Age (day) Value: 23-25 days
  misc_feature: MA Experiment 20000794 PARAMETER Experiment Name: At_Petals_P Parameter: Plant Line Value: WS
  misc_feature: MA Experiment 20000794 PARAMETER Experiment Name: At_Petals_P Parameter: Tissue Value: Petals vs. Whole plant
  misc_feature: MA Experiment ID: 20001557 Result: Up-regulated in Transcription
  misc_feature: MA Experiment 20001557 PARAMETER Experiment Name: At_Drought_Soil_Dry_P Parameter: Age (day) Value: 27
  misc_feature: MA Experiment 20001557 PARAMETER Experiment Name: At_Drought_Soil_Dry_P Parameter: Organism Value: A. thaliana
  misc_feature: MA Experiment 20001557 PARAMETER Experiment Name: At_Drought_Soil_Dry_P Parameter: Plant Line Value: WS
  misc_feature: MA Experiment 20001557 PARAMETER Experiment Name: At_Drought_Soil_Dry_P Parameter: Post Timepoint (hr) Value: 3
  misc_feature: MA Experiment 20001557 PARAMETER Experiment Name: At_Drought_Soil_Dry_P Parameter: Post-Treatment Value: Re-Water vs. No Drought
  misc_feature: MA Experiment 20001557 PARAMETER Experiment Name: At_Drought_Soil_Dry_P Parameter: Timepoint (day) Value: 13
  misc_feature: MA Experiment 20001557 PARAMETER Experiment Name: At_Drought_Soil_Dry_P Parameter: Treatment Value: Drought vs. No Drought
  misc_feature: MA Experiment ID: 20001558 Result: Up-regulated in Transcription
  misc_feature: MA Experiment 20001558 PARAMETER Experiment Name: At_Drought_Soil_Dry_P Parameter: Age (day) Value: 27
  misc_feature: MA Experiment 20001558 PARAMETER Experiment Name: At_Drought_Soil_Dry_P Parameter: Organism Value: A. thaliana
  misc_feature: MA Experiment 20001558 PARAMETER Experiment Name: At_Drought_Soil_Dry_P Parameter: Plant Line Value: WS
  misc_feature: MA Experiment 20001558 PARAMETER Experiment Name: At_Drought_Soil_Dry_P Parameter: Post Timepoint (hr) Value: 6
  misc_feature: MA Experiment 20001558 PARAMETER Experiment Name: At_Drought_Soil_Dry_P Parameter: Post-Treatment Value: Re-Water vs. No Drought
  misc_feature: MA Experiment 20001558 PARAMETER Experiment Name: At_Drought_Soil_Dry_P Parameter: Timepoint (day) Value: 13
  misc_feature: MA Experiment 20001558 PARAMETER Experiment Name: At_Drought_Soil_Dry_P Parameter: Treatment Value: Drought vs. No Drought
  misc_feature: MA Experiment ID: 20001560 Result: Up-regulated in Transcription
  misc_feature: MA Experiment 20001560 PARAMETER Experiment Name: At_Drought_Soil_Dry_P Parameter: Age (day) Value: 28
  misc_feature: MA Experiment 20001560 PARAMETER Experiment Name: At_Drought_Soil_Dry_P Parameter: Organism Value: A. thaliana
  misc_feature: MA Experiment 20001560 PARAMETER Experiment Name: At_Drought_Soil_Dry_P Parameter: Plant Line Value: WS
  misc_feature: MA Experiment 20001560 PARAMETER Experiment Name: At_Drought_Soil_Dry_P Parameter: Post Timepoint (hr) Value: None
  misc_feature: MA Experiment 20001560 PARAMETER Experiment Name: At_Drought_Soil_Dry_P Parameter: Post-Treatment Value: None
  misc_feature: MA Experiment 20001560 PARAMETER Experiment Name: At_Drought_Soil_Dry_P Parameter: Timepoint (day) Value: 14
  misc_feature: MA Experiment 20001560 PARAMETER Experiment Name: At_Drought_Soil_Dry_P Parameter: Treatment Value: Drought vs. No Drought
  misc_feature: MA Experiment ID: 20001904 Result: Up-regulated in Transcription
  misc_feature: MA Experiment 20001904 PARAMETER Experiment Name: At_Drought_Reproduction_P Parameter: Age (day) Value: 37
  misc_feature: MA Experiment 20001904 PARAMETER Experiment Name: At_Drought_Reproduction_P Parameter: Organism Value: A. thaliana
  misc_feature: MA Experiment 20001904 PARAMETER Experiment Name: At_Drought_Reproduction_P Parameter: Plant Line Value: WS
  misc_feature: MA Experiment 20001904 PARAMETER Experiment Name: At_Drought_Reproduction_P Parameter: Timepoint (day) Value: 7
  misc_feature: MA Experiment 20001904 PARAMETER Experiment Name: At_Drought_Reproduction_P Parameter: Tissue Value: Rosettes
  misc_feature: MA Experiment 20001904 PARAMETER Experiment Name: At_Drought_Reproduction_P Parameter: Treatment Value: Drought vs. No Drought
  misc_feature: MA Experiment ID: 20001911 Result: Down-regulated in Transcription
  misc_feature: MA Experiment 20001911 PARAMETER Experiment Name: At_Drought_Reproduction_P Parameter: Age (day) Value: 40
  misc_feature: MA Experiment 20001911 PARAMETER Experiment Name: At_Drought_Reproduction_P Parameter: Organism Value: A. thaliana
  misc_feature: MA Experiment 20001911 PARAMETER Experiment Name: At_Drought_Reproduction_P Parameter: Plant Line Value: WS
  misc_feature: MA Experiment 20001911 PARAMETER Experiment Name: At_Drought_Reproduction_P Parameter: Timepoint (day) Value: 10
  misc_feature: MA Experiment 20001911 PARAMETER Experiment Name: At_Drought_Reproduction_P Parameter: Tissue Value: Flowers
  misc_feature: MA Experiment 20001911 PARAMETER Experiment Name: At_Drought_Reproduction_P Parameter: Treatment Value: Drought vs. No Drought
attaatcatcatcttttcttcacagagaggaaaaaaaaaaaatggcgacagattctcaaccaaaccaaaagctaacgcttccgttaaaaacaagaatcgctctcaccgttatctccaccatgaccgataacgctcaacgtcctgacggaactatcaaccgccgtttcctccgcctcttcgatttccgtgctcctcccaatcctaaacccgtcaacatcgtctccacctccgatttcgtcgtggatcaatcccgtgatctctggttccgattgtacactccacatgtctccggcgataaaatccccgtcgttgttttcttccacggcggtggtttcgctttccttagtcctaatgcgtatccttacgataatgtatgccggagattcgctaggaaattacctgcttatgtcatctccgttaactaccgtctcgctccggagcatcgttatcctgctcaatacgacgacggtttcgatgctttgaagtacatcgaggagaatcacggttcgattcttccggcgaacgctgatctctcgagatgcttcttcgccggagacagtgcaggtggaaacatcgcgcacaacgtcgcgattcgaatttgtcgcgagccgcggtcatctttcaccgccgtgaaactcatcggacttatctcgattcaacctttcttcggcggagaagagagaacggaagcggagaaacaactcgtcggagctcctttggtttcaccggaccgaacagattggtgctggaaagcgatgggattaaaccgggatcatgaagcggttaacgtaggcggaccaaacgcggttgatatatcgggtctggattatccggagacgatggtggtagtagctgggtttgatccgttaaaagattggcagagaagttactacgagtggttaaagttatgcggtaaaaaagcaacgttaatcgaatattcaaacatgtttcatgcgttttacattttccctgaattgcctgaggcgggtcagttaattatgcggattaaggattttgttgatgagcgcgtggcttcactctccgcttaatcaccttcgctaatgatggatttttaaattagctcaatgaataataatgtattaagctctatgcttgtgtcttgtttagtgttttaaaaatggtgtaggtcgatctattttcattattaatcaagtgttcaactttaagtg

SEQ ID NO: 37681 - protein, 335 aa, Arabidopsis thaliana; identical to SEQ ID NO: 28285
  peptide (1)..(335): Ceres Seq. ID no. 12337457
  misc_feature (78)..(109): Pfam Name: Carboxylesterase Pfam Description: Carboxylesterase
  misc_feature (10)..(327): Homolog of NCBI NO: 15229905 NR Description: unknown protein; protein id: At3g05120.1
  misc_feature (10)..(327): Homolog of NCBI NO: 15240483 NR Description: putative protein
  misc_feature (33)..(328): Homolog of NCBI NO: 34904758 NR Description: hypothetical protein~predicted by GeneMark.hmm
  misc_feature (9)..(332): Homolog of NCBI NO: 34904772 NR Description: similar to carboxylesterase
  misc_feature (1)..(335): Homolog of NCBI NO: 34904760 NR Description: similar to carboxylesterase
  misc_feature (3)..(335): Homolog of NCBI NO: 34904774 NR Description: similar to carboxylesterase
  misc_feature (3)..(335): Homolog of NCBI NO: 34393714 NR Description: putative esterase [Oryza sativa (japonica
  misc_feature (1)..(327): Homolog of NCBI NO: 34904770 NR Description: similar to carboxylesterase
  misc_feature (1)..(335): Homolog of NCBI NO: 15237783 NR Description: putative protein
  misc_feature (1)..(335): Homolog of NCBI NO: 21618039 NR Description: unknown [Arabidopsis thaliana]

SEQ ID NO: 37682 - protein, 309 aa, Arabidopsis thaliana; identical to SEQ ID NO: 28286
  peptide (1)..(309): Ceres Seq. ID no. 12337458
  misc_feature (52)..(83): Pfam Name: Carboxylesterase Pfam Description: Carboxylesterase
  misc_feature (1)..(301): Homolog of NCBI NO: 15229905 NR Description: unknown protein; protein id: At3g05120.1
  misc_feature (1)..(301): Homolog of NCBI NO: 15240483 NR Description: putative protein
  misc_feature (7)..(302): Homolog of NCBI NO: 34904758 NR Description: hypothetical protein~predicted by GeneMark.hmm
  misc_feature (1)..(306): Homolog of NCBI NO: 34904772 NR Description: similar to carboxylesterase
  misc_feature (1)..(309): Homolog of NCBI NO: 34904760 NR Description: similar to carboxylesterase
  misc_feature (1)..(309): Homolog of NCBI NO: 34904774 NR Description: similar to carboxylesterase
  misc_feature (1)..(309): Homolog of NCBI NO: 34393714 NR Description: putative esterase [Oryza sativa (japonica
  misc_feature (1)..(301): Homolog of NCBI NO: 34904770 NR Description: similar to carboxylesterase
  misc_feature (1)..(309): Homolog of NCBI NO: 15237783 NR Description: putative protein
  misc_feature (1)..(309): Homolog of NCBI NO: 21618039 NR Description: unknown [Arabidopsis thaliana]

SEQ ID NO: 37683 - DNA, 1913 bp, Arabidopsis thaliana
  misc_feature (1)..(1913): Ceres Seq. ID no. 13645775
  misc_feature: MA Experiment ID: 20000173 Result: Up-regulated in Transcription
  misc_feature: MA Experiment 20000173 PARAMETER Experiment Name: At_42deg_Heat_P Parameter: Age (day) Value: 14
  misc_feature: MA Experiment 20000173 PARAMETER Experiment Name: At_42deg_Heat_P Parameter: Organism Value: A. thaliana
  misc_feature: MA Experiment 20000173 PARAMETER Experiment Name: At_42deg_Heat_P Parameter: Plant Line Value: WS
  misc_feature: MA Experiment 20000173 PARAMETER Experiment Name: At_42deg_Heat_P Parameter: Temperature (deg C) Value: 42 vs. 22
  misc_feature: MA Experiment 20000173 PARAMETER Experiment Name: At_42deg_Heat_P Parameter: Timepoint (hr) Value: 6
  misc_feature: MA Experiment 20000173 PARAMETER Experiment Name: At_42deg_Heat_P Parameter: Tissue Value: Aerial
  misc_feature: MA Experiment ID: 20000184 Result: Up-regulated in Transcription
  misc_feature: MA Experiment 20000184 PARAMETER Experiment Name: At_Shoots__P Parameter: Age (day) Value: 7
  misc_feature: MA Experiment 20000184 PARAMETER Experiment Name: At_Shoots__P Parameter: Tissue Value: Shoots vs. Whole Plant
  misc_feature: MA Experiment ID: 20000267 Result: Down-regulated in Transcription
  misc_feature: MA Experiment 20000267 PARAMETER Experiment Name: At_Drought_P Parameter: Age (day) Value: 7
  misc_feature: MA Experiment 20000267 PARAMETER Experiment Name: At_Drought_P Parameter: Organism Value: A. thaliana
  misc_feature: MA Experiment 20000267 PARAMETER Experiment Name: At_Drought_P Parameter: Plant Line Value: WS
  misc_feature: MA Experiment 20000267 PARAMETER Experiment Name: At_Drought_P Parameter: Timepoint (hr) Value: 6
  misc_feature: MA Experiment 20000267 PARAMETER Experiment Name: At_Drought_P Parameter: Tissue Value: Whole Plant
  misc_feature: MA Experiment 20000267 PARAMETER Experiment Name: At_Drought_P Parameter: Treatment Value: Drought vs. No Drought
  misc_feature: MA Experiment ID: 20000436 Result: Down-regulated in Transcription
  misc_feature: MA Experiment 20000436 PARAMETER Experiment Name: At_Drought_P Parameter: Age (day) Value: 7
  misc_feature: MA Experiment 20000436 PARAMETER Experiment Name: At_Drought_P Parameter: Organism Value: A. thaliana
  misc_feature: MA Experiment 20000436 PARAMETER Experiment Name: At_Drought_P Parameter: Plant Line Value: WS
  misc_feature: MA Experiment 20000436 PARAMETER Experiment Name: At_Drought_P Parameter: Timepoint (hr) Value: 12
  misc_feature: MA Experiment 20000436 PARAMETER Experiment Name: At_Drought_P Parameter: Tissue Value: Whole Plant
  misc_feature: MA Experiment 20000436 PARAMETER Experiment Name: At_Drought_P Parameter: Treatment Value: Drought vs. No Drought
  misc_feature: MA Experiment ID: 20000437 Result: Down-regulated in Transcription
  misc_feature: MA Experiment 20000437 PARAMETER Experiment Name: At_Drought_P Parameter: Age (day) Value: 8
  misc_feature: MA Experiment 20000437 PARAMETER Experiment Name: At_Drought_P Parameter: Organism Value: A. thaliana
  misc_feature: MA Experiment 20000437 PARAMETER Experiment Name: At_Drought_P Parameter: Plant Line Value: WS
  misc_feature: MA Experiment 20000437 PARAMETER Experiment Name: At_Drought_P Parameter: Timepoint (hr) Value: 24
  misc_feature: MA Experiment 20000437 PARAMETER Experiment Name: At_Drought_P Parameter: Tissue Value: Whole Plant
  misc_feature: MA Experiment 20000437 PARAMETER Experiment Name: At_Drought_P Parameter: Treatment Value: Drought vs. No Drought
  misc_feature: MA Experiment ID: 20000438 Result: Up-regulated in Transcription
  misc_feature: MA Experiment 20000438 PARAMETER Experiment Name: At_Shoots__P Parameter: Age (day) Value: 14
  misc_feature: MA Experiment 20000438 PARAMETER Experiment Name: At_Shoots__P Parameter: Tissue Value: Shoots vs. Whole Plant
  misc_feature: MA Experiment ID: 20000443 Result: Up-regulated in Transcription
  misc_feature: MA Experiment 20000443 PARAMETER Experiment Name: At_1uM_BR-BRZ__P Parameter: Tissue Value: Shoot Apices
  misc_feature: MA Experiment 20000443 PARAMETER Experiment Name: At_1uM_BR-BRZ__P Parameter: Treatment Value: 1uM BRZ vs. No Treatment
  misc_feature: MA Experiment ID: 20000573 Result: Down-regulated in Transcription
  misc_feature: MA Experiment 20000573 PARAMETER Experiment Name: At_100uM_ABA_Mutants__P Parameter: Organism Value: A. thaliana
  misc_feature: MA Experiment 20000573 PARAMETER Experiment Name: At_100uM_ABA_Mutants__P Parameter: Plant Line Value: CS22 vs. Ler wt
  misc_feature: MA Experiment 20000573 PARAMETER Experiment Name: At_100uM_ABA_Mutants__P Parameter: Timepoint (hr) Value: N/A
  misc_feature: MA Experiment 20000573 PARAMETER Experiment Name: At_100uM_ABA_Mutants__P Parameter: Tissue Value: Whole Plant
  misc_feature: MA Experiment 20000573 PARAMETER Experiment Name: At_100uM_ABA_Mutants__P Parameter: Treatment Value: None
  misc_feature: MA Experiment ID: 20001248 Result: Down-regulated in Transcription
  misc_feature: MA Experiment 20001248 PARAMETER Experiment Name: At_Far-red-induction_P Parameter: Age (day) Value: 7
  misc_feature: MA Experiment 20001248 PARAMETER Experiment Name: At_Far-red-induction_P Parameter: Light Value: Far-red vs. White
  misc_feature: MA Experiment 20001248 PARAMETER Experiment Name: At_Far-red-induction_P Parameter: Organism Value: A. thaliana
  misc_feature: MA Experiment 20001248 PARAMETER Experiment Name: At_Far-red-induction_P Parameter: Plant Line Value: Columbia
  misc_feature: MA Experiment 20001248 PARAMETER Experiment Name: At_Far-red-induction_P Parameter: Timepoint (hr) Value: 4
  misc_feature: MA Experiment 20001248 PARAMETER Experiment Name: At_Far-red-induction_P Parameter: Tissue Value: Whole Plant
  misc_feature: MA Experiment ID: 20001451 Result: Up-regulated in Transcription
  misc_feature: MA Experiment 20001451 PARAMETER Experiment Name: At_Far-red-induction_P Parameter: Age (day) Value: 7
  misc_feature: MA Experiment 20001451 PARAMETER Experiment Name: At_Far-red-induction_P Parameter: Light Value: Far-red vs. White
  misc_feature: MA Experiment 20001451 PARAMETER Experiment Name: At_Far-red-induction_P Parameter: Organism Value: A. thaliana
  misc_feature: MA Experiment 20001451 PARAMETER Experiment Name: At_Far-red-induction_P Parameter: Plant Line Value: Columbia
  misc_feature: MA Experiment 20001451 PARAMETER Experiment Name: At_Far-red-induction_P Parameter: Timepoint (hr) Value: 24
  misc_feature: MA Experiment 20001451 PARAMETER Experiment Name: At_Far-red-induction_P Parameter: Tissue Value: Whole Plant
  misc_feature: MA Experiment ID: 20001905 Result: Down-regulated in Transcription
  misc_feature: MA Experiment 20001905 PARAMETER Experiment Name: At_Drought_Reproduction_P Parameter: Age (day) Value: 40
  misc_feature: MA Experiment 20001905 PARAMETER Experiment Name: At_Drought_Reproduction_P Parameter: Organism Value: A. thaliana
  misc_feature: MA Experiment 20001905 PARAMETER Experiment Name: At_Drought_Reproduction_P Parameter: Plant Line Value: WS
  misc_feature: MA Experiment 20001905 PARAMETER Experiment Name: At_Drought_Reproduction_P Parameter: Timepoint (day) Value: 10
  misc_feature: MA Experiment 20001905 PARAMETER Experiment Name: At_Drought_Reproduction_P Parameter: Tissue Value: Rosettes
  misc_feature: MA Experiment 20001905 PARAMETER Experiment Name: At_Drought_Reproduction_P Parameter: Treatment Value: Drought vs. No Drought
atggagaagaagaagaagaagagagatgaggaagaaacgagaggctaaagatgaaaatgaagaagaagaagaggagaagaagaagagactagagttgatgaaggcagctgcgcaggcttggctcagccactcccaaacctcaaaacatactgttttagagttcgatgcgcagagaaagcatgcttttgtcaaagggaaggcatcacgtttcaaaacggaagccttgtccgcaaagcatcatccgtcgtttttggattgggaattcggacagtcgctgtgggatccctacgagattctttcggtctctaagaaactggaacgcgaactcactttagaagaacaaaccttctcttcttcagataatgatggcctcaagaagatgaagaagaagaaaactagagacagcagaaacagccttaggagtttgttcactcgttcgtcttcaaagagattctaacaaactcatcatgttactacttcaaacttgtaaatttttctcaaaaagtgaaatcaattatgaatgtcttttattggtcgaaaaaaaaaaaaaaaaaagcttttttttttttttttttgcaaagaaagctttgttttgattgataatattacacataaccaagagagagcatatagtacaaacgaaaacaagaatagttatccttagaagtaatcctcagtcctgcccttgaatccgatttgtccgaaagtgaggcagaggaagaggcctaagtgccacgtaaccaaccacaaccagaactgtgaagtgagagctggaggagtcgggaagtgagcgagctcagttccgatgctatcgaagaagagacccgtcaggctcttcccatttatcgctggaatgctcgacggagctagccatccgatcagcccaaatcctaccacgttcaaatctctcctcaaccagttcctctcaaagcaagtgactcttcctcccgatgcaccggcgagtctcaaagggttcttggcgcttaatgttggttttaaaaaggatgaagagaagggtttggtggtgatggatgatcctccgaggcctatcaccgtcgatggtgttgcaaatgttgctgccatttttcttctgggctgctcacaagaccgactttttctcggacaagttcggtgtgaggtcaatcagggacaataacgatgaactaatgggtgctgtgtatctacaagttagtatcatcagtcaagctctaatctttgtcaccaggtcaaggagttggtcatttgtcgaacgtcctggggcgcttctgatgattgcattcgtcattgcacaactggttgcaactttgatcgcagtgtatgccgactggacatttgcaaaggtgaagggtatcggttggggatgggcaggtgtgatttggatttacagtatcgtaacatacttcccacaggacattttgaagtttgccattcggtatatcttgagtggaaaggcttgggccagcttgtttgacaacaggaccgctttcacaaccaagaaagattacggtattggagaaagagaagctcaatgggcacaagctcaaaggacattgcacggtctgcagccaaaagaagatgttaatatcttcccagagaaaggaagttacagagagctgtctgagatcgcagagcaagccaagagaagggccgagatagctaggcttagggagcttcacacattgaagggacatgtggaatcagtcgcaaagctaaagggattggacattgatacagcaggacatcactacactgtgtagttggagttgcacaacaacacaaacatttaccgaaaaccaaccccatcatgactcatcttttgttttgtcttcacaaatctctctttaaaagtcattacagtagagggaagagaactcttgtgtattgccataactcttccaaaactcttttttctt

SEQ ID NO: 37684 - protein, 241 aa, Arabidopsis thaliana
  peptide (1)..(241): Ceres Seq. ID no. 13645776
  misc_feature (12)..(241): Homolog of NCBI NO: 1076511 NR Description: H+-exporting ATPase (EC 3.6.3.6) - kidney bean
  misc_feature (12)..(241): Homolog of NCBI NO: 13016808 NR Description: P-type H+-ATPase [Vicia faba]
  misc_feature (12)..(241): Homolog of NCBI NO: 31580853 NR Description: plasma membrane H+-ATPase [Sesbania rostrata]
  misc_feature (12)..(241): Homolog of NCBI NO: 7105717 NR Description: plasma membrane proton ATPase [Kosteletzkya
  misc_feature (1)..(241): Homolog of NCBI NO: 416664 NR Description: Plasma membrane ATPase 4 (Proton pump 4)
  misc_feature (14)..(241): Homolog of NCBI NO: 1621440 NR Description: plasma membrane H+-ATPase [Lycopersicon
  misc_feature (14)..(241): Homolog of NCBI NO: 1076663 NR Description: H+-exporting ATPase (EC 3.6.3.6) (clone PHA2) -
  misc_feature (19)..(241): Homolog of NCBI NO: 15234666 NR Description: ATPase 2, plasma membrane-type (proton pump 2)
  misc_feature (19)..(241): Homolog of NCBI NO: 166746 NR Description: plasma membrane proton pump H+ ATPase
  misc_feature (19)..(241): Homolog of NCBI NO: 15224264 NR Description: ATPase 1, plasma membrane-type (proton pump 1)
MILRGLSPSMVLQMLLPFFFWAAHKTDFFSDKFGVRSIRDNNDELMGAVYLQVSIISQALIFVTRSRSWSFVERPGALLMIAFVIAQLVATLIAVYADWTFAKVKGIGWGWAGVIWIYSIVTYFPQDILKFAIRYILSGKAWASLFDNRTAFTTKKDYGIGEREAQWAQAQRTLHGLQPKEDVNIFPEKGSYRELSEIAEQAKRRAEIARLRELHTLKGHVESVAKLKGLDIDTAGHHYTV

SEQ ID NO: 37685 - protein, 232 aa, Arabidopsis thaliana
  peptide (1)..(232): Ceres Seq. ID no. 13645777
  misc_feature (3)..(232): Homolog of NCBI NO: 1076511 NR Description: H+-exporting ATPase (EC 3.6.3.6) - kidney bean
  misc_feature (3)..(232): Homolog of NCBI NO: 13016808 NR Description: P-type H+-ATPase [Vicia faba]
  misc_feature (3)..(232): Homolog of NCBI NO: 31580853 NR Description: plasma membrane H+-ATPase [Sesbania rostrata]
  misc_feature (3)..(232): Homolog of NCBI NO: 7105717 NR Description: plasma membrane proton ATPase [Kosteletzkya
  misc_feature (1)..(232): Homolog of NCBI NO: 416664 NR Description: Plasma membrane ATPase 4 (Proton pump 4)
  misc_feature (5)..(232): Homolog of NCBI NO: 1621440 NR Description: plasma membrane H+-ATPase [Lycopersicon
  misc_feature (5)..(232): Homolog of NCBI NO: 1076663 NR Description: H+-exporting ATPase (EC 3.6.3.6) (clone PHA2) -
  misc_feature (10)..(232): Homolog of NCBI NO: 15234666 NR Description: ATPase 2, plasma membrane-type (proton pump 2)
  misc_feature (10)..(232): Homolog of NCBI NO: 166746 NR Description: plasma membrane proton pump H+ ATPase
  misc_feature (10)..(232): Homolog of NCBI NO: 15224264 NR Description: ATPase 1, plasma membrane-type (proton pump 1)
MVLQMLLPFFFWAAHKTDFFSDKFGVRSIRDNNDELMGAVYLQVSIISQALIFVTRSRSWSFVERPGALLMIAFVIAQLVATLIAVYADWTFAKVKGIGWGWAGVIWIYSIVTYFPQDILKFAIRYILSGKAWASLFDNRTAFTTKKDYGIGEREAQWAQAQRTLHGLQPKEDVNIFPEKGSYRELSEIAEQAKRRAEIARLRELHTLKGHVESVAKLKGLDIDTAGHHYTV

SEQ ID NO: 37686 - protein, 228 aa, Arabidopsis thaliana
  peptide (1)..(228): Ceres Seq. ID no. 13645778
  misc_feature (1)..(228): Homolog of NCBI NO: 1076511 NR Description: H+-exporting ATPase (EC 3.6.3.6) - kidney bean
  misc_feature (1)..(228): Homolog of NCBI NO: 13016808 NR Description: P-type H+-ATPase [Vicia faba]
  misc_feature (1)..(228): Homolog of NCBI NO: 31580853 NR Description: plasma membrane H+-ATPase [Sesbania rostrata]
  misc_feature (1)..(228): Homolog of NCBI NO: 7105717 NR Description: plasma membrane proton ATPase [Kosteletzkya
  misc_feature (1)..(228): Homolog of NCBI NO: 416664 NR Description: Plasma membrane ATPase 4 (Proton pump 4)
  misc_feature (1)..(228): Homolog of NCBI NO: 1621440 NR Description: plasma membrane H+-ATPase [Lycopersicon
  misc_feature (1)..(228): Homolog of NCBI NO: 1076663 NR Description: H+-exporting ATPase (EC 3.6.3.6) (clone PHA2) -
  misc_feature (6)..(228): Homolog of NCBI NO: 15234666 NR Description: ATPase 2, plasma membrane-type (proton pump 2)
  misc_feature (6)..(228): Homolog of NCBI NO: 166746 NR Description: plasma membrane proton pump H+ ATPase
  misc_feature (6)..(228): Homolog of NCBI NO: 15224264 NR Description: ATPase 1, plasma membrane-type (proton pump 1)
MLLPFFFWAAHKTDFFSDKFGVRSIRDNNDELMGAVYLQVSIISQALIFVTRSRSWSFVERPGALLMIAFVIAQLVATLIAVYADWTFAKVKGIGWGWAGVIWIYSIVTYFPQDILKFAIRYILSGKAWASLFDNRTAFTTKKDYGIGEREAQWAQAQRTLHGLQPKEDVNIFPEKGSYRELSEIAEQAKRRAEIARLRELHTLKGHVESVAKLKGLDIDTAGHHYTV

SEQ ID NO: 37687 - DNA, 823 bp, Arabidopsis thaliana
  misc_feature (1)..(823): Ceres Seq. ID no. 12337242
  misc_feature: MA Experiment ID: 108501 Result: Up-regulated in Transcription
  misc_feature: MA Experiment 108501 PARAMETER Experiment Name: At_ap2_floral_buds_cDNA_P Parameter: Plant Line Value: ap2 (Ler.)
  misc_feature: MA Experiment 108501 PARAMETER Experiment Name: At_ap2_floral_buds_cDNA_P Parameter: Tissue Value: Closed Flower
  misc_feature: MA Experiment ID: 108579 Result: Up-regulated in Transcription
  misc_feature: MA Experiment 108579 PARAMETER Experiment Name: At_4deg_Cold_cDNA_P Parameter: Temperature (deg C) Value: 4 vs. 22
  misc_feature: MA Experiment 108579 PARAMETER Experiment Name: At_4deg_Cold_cDNA_P Parameter: Timepoint (hr) Value: 6
  misc_feature: MA Experiment 108579 PARAMETER Experiment Name: At_4deg_Cold_cDNA_P Parameter: Tissue Value: Aerial
  misc_feature: MA Experiment ID: 20000171 Result: Up-regulated in Transcription
  misc_feature: MA Experiment 20000171 PARAMETER Experiment Name: At_42deg_Heat_P Parameter: Age (day) Value: 14
  misc_feature: MA Experiment 20000171 PARAMETER Experiment Name: At_42deg_Heat_P Parameter: Organism Value: A. thaliana
  misc_feature: MA Experiment 20000171 PARAMETER Experiment Name: At_42deg_Heat_P Parameter: Plant Line Value: WS
  misc_feature: MA Experiment 20000171 PARAMETER Experiment Name: At_42deg_Heat_P Parameter: Temperature (deg C) Value: 42 vs. 22
  misc_feature: MA Experiment 20000171 PARAMETER Experiment Name: At_42deg_Heat_P Parameter: Timepoint (hr) Value: 1
  misc_feature: MA Experiment 20000171 PARAMETER Experiment Name: At_42deg_Heat_P Parameter: Tissue Value: Aerial
  misc_feature: MA Experiment ID: 20000173 Result: Up-regulated in Transcription
  misc_feature: MA Experiment 20000173 PARAMETER Experiment Name: At_42deg_Heat_P Parameter: Age (day) Value: 14
  misc_feature: MA Experiment 20000173 PARAMETER Experiment Name: At_42deg_Heat_P Parameter: Organism Value: A. thaliana
  misc_feature: MA Experiment 20000173 PARAMETER Experiment Name: At_42deg_Heat_P Parameter: Plant Line Value: WS
  misc_feature: MA Experiment 20000173 PARAMETER Experiment Name: At_42deg_Heat_P Parameter: Temperature (deg C) Value: 42 vs. 22
  misc_feature: MA Experiment 20000173 PARAMETER Experiment Name: At_42deg_Heat_P Parameter: Timepoint (hr) Value: 6
  misc_feature: MA Experiment 20000173 PARAMETER Experiment Name: At_42deg_Heat_P Parameter: Tissue Value: Aerial
acaaacttcactcaaaacctaattaacttagagagaaagagagagagagaagggttgcaaaatgcgttcttcgtaccaagaatctccaccgttgcttcttgaagatcttaaggttacgatcaaagaatcaacactcattttcccatctgaagaaaccagcgagagaaaatccatgttcttatccaacgtcgaccaaattctcaactttgacgttcaaacagttcatttcttccgacctaacaaggagtttccaccggagatggtctcggagaagctgagaaaggcgttggtgaaactcatggacgcttatgagttcttggccgggagactctgcgtggatcctagctctggacggcttgatgttgactgtaacggtgctggagctggctttgtgacggcggcgagtgactacacgttggaggaacttggagatttggtttatccaaatccagcttttgctcaattggttacaagtcagcttcagagtttgcccaaagatgatcaacccttgtttgtctttcaggaagaaagaaaaaaaaaatcaaaagttttgagtgtataaacacaaagaagcttccttagaatcaaaaaaatttcgaacatgttcacaataaattttgtgaacttttagctattttgcaacctcgagggagggatctcaaggatctaagtaccatcatgatatttatagaaatctagtttatataggtcattagtcgaggaccatgtgggtaaaatagaataaaaacttgtttcttctatagagtccaagtattaatcggagttttgtgtgagatcctccgtattcaaaatataaatgttt

SEQ ID NO: 37688 - protein, 166 aa, Arabidopsis thaliana
  peptide (1)..(166): Ceres Seq. ID no. 12337243
  misc_feature (16)..(154): Pfam Name: Transferase family Pfam Description: Transferase family
  misc_feature (16)..(130): Homolog of NCBI NO: 30693725 NR Description: transferase family [Arabidopsis thaliana]
  misc_feature (16)..(159): Homolog of NCBI NO: 40644899 NR Description: hydroxycinnamoyl CoA quinate transferase
  misc_feature (16)..(154): Homolog of NCBI NO: 21536883 NR Description: anthranilate N-benzoyltransferase [Arabidopsis
  misc_feature (16)..(154): Homolog of NCBI NO: 15239747 NR Description: anthranilate N-benzoyltransferase
  misc_feature (16)..(159): Homolog of NCBI NO: 40644084 NR Description: hydroxycinnamoyl CoA quinate transferase
  misc_feature (14)..(159): Homolog of NCBI NO: 6469032 NR Description: N-hydroxycinnamoyl/benzoyltransferase [Ipomoea
  misc_feature (16)..(154): Homolog of NCBI NO: 27475616 NR Description: hydroxycinnamoyl transferase [Nicotiana tabacum]
  misc_feature (1)..(154): Homolog of NCBI NO: 7487802 NR Description: hypothetical protein T8F5.23 - Arabidopsis
  misc_feature (1)..(166): Homolog of NCBI NO: 18408285 NR Description: Expressed protein
  misc_feature (1)..(166): Homolog of NCBI NO: 21593740 NR Description: unknown [Arabidopsis thaliana]
MRSSYQESPPLLLEDLKVTIKESTLIFPSEETSERKSMFLSNVDQILNFDVQTVHFFRPNKEFPPEMVSEKLRKALVKLMDAYEFLAGRLCVDPSSGRLDVDCNGAGAGFVTAASDYTLEELGDLVYPNPAFAQLVTSQLQSLPKDDQPLFVFQEERKKKSKVLSV

SEQ ID NO: 37689 - protein, 129 aa, Arabidopsis thaliana
  peptide (1)..(129): Ceres Seq. ID no. 12337244
  misc_feature (1)..(117): Pfam Name: Transferase family Pfam Description: Transferase family
  misc_feature (1)..(93): Homolog of NCBI NO: 30693725 NR Description: transferase family [Arabidopsis thaliana]
  misc_feature (1)..(122): Homolog of NCBI NO: 40644899 NR Description: hydroxycinnamoyl CoA quinate transferase
  misc_feature (1)..(117): Homolog of NCBI NO: 21536883 NR Description: anthranilate N-benzoyltransferase [Arabidopsis
  misc_feature (1)..(117): Homolog of NCBI NO: 15239747 NR Description: anthranilate N-benzoyltransferase
  misc_feature (1)..(122): Homolog of NCBI NO: 40644084 NR Description: hydroxycinnamoyl CoA quinate transferase
  misc_feature (1)..(122): Homolog of NCBI NO: 6469032 NR Description: N-hydroxycinnamoyl/benzoyltransferase [Ipomoea
  misc_feature (1)..(117): Homolog of NCBI NO: 27475616 NR Description: hydroxycinnamoyl transferase [Nicotiana tabacum]
  misc_feature (1)..(117): Homolog of NCBI NO: 7487802 NR Description: hypothetical protein T8F5.23 - Arabidopsis
  misc_feature (1)..(129): Homolog of NCBI NO: 18408285 NR Description: Expressed protein
  misc_feature (1)..(129): Homolog of NCBI NO: 21593740 NR Description: unknown [Arabidopsis thaliana]
MFLSNVDQILNFDVQTVHFFRPNKEFPPEMVSEKLRKALVKLMDAYEFLAGRLCVDPSSGRLDVDCNGAGAGFVTAASDYTLEELGDLVYPNPAFAQLVTSQLQSLPKDDQPLFVFQEERKKKSKVLSV

SEQ ID NO: 37690 - protein, 100 aa, Arabidopsis thaliana
  peptide (1)..(100): Ceres Seq. ID no. 12337245
  misc_feature (1)..(88): Pfam Name: Transferase family Pfam Description: Transferase family
  misc_feature (1)..(64): Homolog of NCBI NO: 30693725 NR Description: transferase family [Arabidopsis thaliana]
  misc_feature (1)..(93): Homolog of NCBI NO: 40644899 NR Description: hydroxycinnamoyl CoA quinate transferase
  misc_feature (1)..(88): Homolog of NCBI NO: 21536883 NR Description: anthranilate N-benzoyltransferase [Arabidopsis
  misc_feature (1)..(88): Homolog of NCBI NO: 15239747 NR Description: anthranilate N-benzoyltransferase
  misc_feature (1)..(93): Homolog of NCBI NO: 40644084 NR Description: hydroxycinnamoyl CoA quinate transferase
  misc_feature (1)..(93): Homolog of NCBI NO: 6469032 NR Description: N-hydroxycinnamoyl/benzoyltransferase [Ipomoea
  misc_feature (1)..(88): Homolog of NCBI NO: 27475616 NR Description: hydroxycinnamoyl transferase [Nicotiana tabacum]
  misc_feature (1)..(88): Homolog of NCBI NO: 7487802 NR Description: hypothetical protein T8F5.23 - Arabidopsis
  misc_feature (1)..(100): Homolog of NCBI NO: 18408285 NR Description: Expressed protein
  misc_feature (1)..(100): Homolog of NCBI NO: 21593740 NR Description: unknown [Arabidopsis thaliana]
MVSEKLRKALVKLMDAYEFLAGRLCVDPSSGRLDVDCNGAGAGFVTAASDYTLEELGDLVYPNPAFAQLVTSQLQSLPKDDQPLFVFQEERKKKSKVLSV

SEQ ID NO: 37691 - DNA, 1283 bp, Arabidopsis thaliana
  misc_feature (1)..(1283): Ceres Seq. ID no. 13509079
  misc_feature: MA Experiment ID: 20000184 Result: Down-regulated in Transcription
  misc_feature: MA Experiment 20000184 PARAMETER Experiment Name: At_Shoots__P Parameter: Age (day) Value: 7
  misc_feature: MA Experiment 20000184 PARAMETER Experiment Name: At_Shoots__P Parameter: Tissue Value: Shoots vs. Whole Plant
gacggctaagtcttcctctctctctctctctctctctctctctgcaatggactctctggtagcgagctacgcttcgtcggacgaagaagaagatcttcaaccacgtcgagaagctttcactgtaaaatcctcagaaccttccgcttcgtctctattctcagctattcctcaacctaaagaactcaaatcctccgaagatggtgatttaggctcatcttcctctcgaggaaaatcttcttctttcctctcatctctccctcctcccaaatcctcaatttcacggaaaaaaaatcccaatccgtcgtcaattccgaaacgtgtcgtccagatcaggcttccagtaaaccctagaccgagcaatcttgacgacgaagacgacgaagaagaagagaaagctaggaagaagcgtaaacagatggaatctgcttccgcatctcacgattcatcagtaagatcgttcttatccgccatgcctgcacctaaaagctcacaaacactaggtgctcttccttcattgggatcaggatcaggtcgaagatcgaatctcgaaacagaaacaccttcaattgcatttcctcaaacggattcaggtattagtgatcaacaaaaccagagctatgaatcgtttagtcatagtaatagcgaaacggaacaaatcgttggagtagataactattatgctactggttatgatggtggatacgaaacaattcctagtggtagtagtgtgggatatgatggtagtagctatggaggtaatacttggaatggtggtgggtttgaggcaatgacgggattgcctgaagcggttgtagctatggatagtggtgcgaggagaggaaggagagggaggaatcagatgccagagattgttgaggttaagcaagatgagcttatgaagaataggccacgagttgatcaggttaaatctactggaatcgcctttggacctgcgtatcagccggtaacatcttcatctaaagggaaagtgtcaaagcttcacaagaggaagcatcaaatcactgcgttgttcatggacatgaagcacaaggagtcggagttgacagagagacgttctagaggattgctcacgaaagccgagacacaagctaaatacggatggtgatttgccgctattgtttttctcaatttgtgaaatttgcaacagattttctgtaactcagagtgtaatttttttcttttactattttccaagatccaagctttgaatgtaatactcatttccgtgaatgaatctaatctcagcagaatgctttgacccg

SEQ ID NO: 37692 - protein, 374 aa, Arabidopsis thaliana
  peptide (1)..(374): Ceres Seq. ID no. 13509080
  misc_feature (28)..(190): Pfam Name: Lipoprotein amino terminal region Pfam Description: Lipoprotein amino terminal region
  misc_feature (267)..(374): Homolog of NCBI NO: 34857916 NR Description: similar to papillary renal cell
  misc_feature (18)..(135): Homolog of NCBI NO: 34857916 NR Description: similar to papillary renal cell
  misc_feature (139)..(374): Homolog of NCBI NO: 22135888 NR Description: unknown protein [Arabidopsis thaliana]
  misc_feature (16)..(374): Homolog of NCBI NO: 15224752 NR Description: expressed protein [Arabidopsis thaliana]
TAKSSSLSLSLSLSAMDSLVASYASSDEEEDLQPRREAFTVKSSEPSASSLFSAIPQPKELKSSEDGDLGSSSSRGKSSSFLSSLPPPKSSISRKKNPNPSSIPKRVVQIRLPVNPRPSNLDDEDDEEEEKARKKRKQMESASASHDSSVRSFLSAMPAPKSSQTLGALPSLGSGSGRRSNLETETPSIAFPQTDSGISDQQNQSYESFSHSNSETEQIVGVDNYYATGYDGGYETIPSGSSVGYDGSSYGGNTWNGGGFEAMTGLPEAVVAMDSGARRGRRGRNQMPEIVEVKQDELMKNRPRVDQVKSTGIAFGPAYQPVTSSSKGKVSKLHKRKHQITALFMDMKHKESELTERRSRGLLTKAETQAKYGW

SEQ ID NO: 37693 - protein, 359 aa, Arabidopsis thaliana
  peptide (1)..(359): Ceres Seq. ID no. 13509081
  misc_feature (13)..(175): Pfam Name: Lipoprotein amino terminal region Pfam Description: Lipoprotein amino terminal region
  misc_feature (252)..(359): Homolog of NCBI NO: 34857916 NR Description: similar to papillary renal cell
  misc_feature (3)..(120): Homolog of NCBI NO: 34857916 NR Description: similar to papillary renal cell
  misc_feature (124)..(359): Homolog of NCBI NO: 22135888 NR Description: unknown protein [Arabidopsis thaliana]
  misc_feature (1)..(359): Homolog of NCBI NO: 15224752 NR Description: expressed protein [Arabidopsis thaliana]
MDSLVASYASSDEEEDLQPRREAFTVKSSEPSASSLFSAIPQPKELKSSEDGDLGSSSSRGKSSSFLSSLPPPKSSISRKKNPNPSSIPKRVVQIRLPVNPRPSNLDDEDDEEEEKARKKRKQMESASASHDSSVRSFLSAMPAPKSSQTLGALPSLGSGSGRRSNLETETPSIAFPQTDSGISDQQNQSYESFSHSNSETEQIVGVDNYYATGYDGGYETIPSGSSVGYDGSSYGGNTWNGGGFEAMTGLPEAVVAMDSGARRGRRGRNQMPEIVEVKQDELMKNRPRVDQVKSTGIAFGPAYQPVTSSSKGKVSKLHKRKHQITALFMDMKHKESELTERRSRGLLTKAETQAKYGW

SEQ ID NO: 37694 - protein, 236 aa, Arabidopsis thaliana
  peptide (1)..(236): Ceres Seq. ID no. 13509082
  misc_feature (1)..(52): Pfam Name: Lipoprotein amino terminal region Pfam Description: Lipoprotein amino terminal region
  misc_feature (129)..(236): Homolog of NCBI NO: 34857916 NR Description: similar to papillary renal cell
  misc_feature (1)..(236): Homolog of NCBI NO: 22135888 NR Description: unknown protein [Arabidopsis thaliana]
  misc_feature (1)..(236): Homolog of NCBI NO: 15224752 NR Description: expressed protein [Arabidopsis thaliana]
MESASASHDSSVRSFLSAMPAPKSSQTLGALPSLGSGSGRRSNLETETPSIAFPQTDSGISDQQNQSYESFSHSNSETEQIVGVDNYYATGYDGGYETIPSGSSVGYDGSSYGGNTWNGGGFEAMTGLPEAVVAMDSGARRGRRGRNQMPEIVEVKQDELMKNRPRVDQVKSTGIAFGPAYQPVTSSSKGKVSKLHKRKHQITALFMDMKHKESELTERRSRGLLTKAETQAKYGW

SEQ ID NO: 37695 - DNA, 684 bp, Arabidopsis thaliana
  misc_feature (1)..(684): Ceres Seq. ID no. 12326967
  misc_feature: MA Experiment ID: 108434 Result: Up-regulated in Transcription
  misc_feature: MA Experiment 108434 PARAMETER Experiment Name: At_Root_Tips_cDNA_P Parameter: Tissue Value: Root Tips
  misc_feature: MA Experiment ID: 108462 Result: Down-regulated in Transcription
  misc_feature: MA Experiment 108462 PARAMETER Experiment Name: At_Germinating_Seeds_cDNA_P Parameter: Age (day) Value: 2 vs. 0
  misc_feature: MA Experiment 108462 PARAMETER Experiment Name: At_Germinating_Seeds_cDNA_P Parameter: Tissue Value: Germinating Seeds
  misc_feature: MA Experiment ID: 108463 Result: Down-regulated in Transcription
  misc_feature: MA Experiment 108463 PARAMETER Experiment Name: At_Germinating_Seeds_cDNA_P Parameter: Age (day) Value: 3 vs. 0
  misc_feature: MA Experiment 108463 PARAMETER Experiment Name: At_Germinating_Seeds_cDNA_P Parameter: Tissue Value: Germinating Seeds
  misc_feature: MA Experiment ID: 108464 Result: Down-regulated in Transcription
  misc_feature: MA Experiment 108464 PARAMETER Experiment Name: At_Germinating_Seeds_cDNA_P Parameter: Age (day) Value: 4 vs. 0
  misc_feature: MA Experiment 108464 PARAMETER Experiment Name: At_Germinating_Seeds_cDNA_P Parameter: Tissue Value: Germinating Seeds
  misc_feature: MA Experiment ID: 108488 Result: Up-regulated in Transcription
  misc_feature: MA Experiment ID: 108489 Result: Up-regulated in Transcription
  misc_feature: MA Experiment ID: 108573 Result: Down-regulated in Transcription
  misc_feature: MA Experiment 108573 PARAMETER Experiment Name: At_Drought_cDNA_P Parameter: Timepoint (hr) Value: 6
  misc_feature: MA Experiment 108573 PARAMETER Experiment Name: At_Drought_cDNA_P Parameter: Tissue Value: Aerial
  misc_feature: MA Experiment 108573 PARAMETER Experiment Name: At_Drought_cDNA_P Parameter: Treatment Value: Drought vs. No Drought
  misc_feature: MA Experiment ID: 108585 Result: Down-regulated in Transcription
  misc_feature: MA Experiment 108585 PARAMETER Experiment Name: At_5mM_NaNP_cDNA_P Parameter: Timepoint (hr) Value: 6
  misc_feature: MA Experiment 108585 PARAMETER Experiment Name: At_5mM_NaNP_cDNA_P Parameter: Tissue Value: Aerial
  misc_feature: MA Experiment 108585 PARAMETER Experiment Name: At_5mM_NaNP_cDNA_P Parameter: Treatment Value: null
  misc_feature: MA Experiment ID: 108609 Result: Down-regulated in Transcription
  misc_feature: MA Experiment 108609 PARAMETER Experiment Name: At_100uM_ABA_cDNA_P Parameter: Timepoint (hr) Value: 24
  misc_feature: MA Experiment 108609 PARAMETER Experiment Name: At_100uM_ABA_cDNA_P Parameter: Tissue Value: Aerial
  misc_feature: MA Experiment 108609 PARAMETER Experiment Name: At_100uM_ABA_cDNA_P Parameter: Treatment Value: 100uM ABA vs. No Treatment
  misc_feature: MA Experiment ID: 20000112 Result: Down-regulated in Transcription
  misc_feature: MA Experiment 20000112 PARAMETER Experiment Name: At_42deg_Heat_cDNA_P Parameter: Temperature (deg C) Value: 42 vs. 22
  misc_feature: MA Experiment 20000112 PARAMETER Experiment Name: At_42deg_Heat_cDNA_P Parameter: Timepoint (hr) Value: 2
  misc_feature: MA Experiment 20000112 PARAMETER Experiment Name: At_42deg_Heat_cDNA_P Parameter: Tissue Value: Aerial
  misc_feature: MA Experiment ID: 20000117 Result: Down-regulated in Transcription
  misc_feature: MA Experiment 20000117 PARAMETER Experiment Name: At_100uM_ABA_Mutants_cDNA_P Parameter: Plant Line Value: Columbia
  misc_feature: MA Experiment 20000117 PARAMETER Experiment Name: At_100uM_ABA_Mutants_cDNA_P Parameter: Timepoint (hr) Value: 6
  misc_feature: MA Experiment 20000117 PARAMETER Experiment Name: At_100uM_ABA_Mutants_cDNA_P Parameter: Tissue Value: Aerial
  misc_feature: MA Experiment 20000117 PARAMETER Experiment Name: At_100uM_ABA_Mutants_cDNA_P Parameter: Treatment Value: 100uM ABA vs. No Treatment
  misc_feature: MA Experiment ID: 20000180 Result: Down-regulated in Transcription
  misc_feature: MA Experiment 20000180 PARAMETER Experiment Name: At_Germinating_Seeds_P Parameter: Age (hr) Value: 24 vs. 0
  misc_feature: MA Experiment 20000180 PARAMETER Experiment Name: At_Germinating_Seeds_P Parameter: Tissue Value: Germinating Seeds
  misc_feature: MA Experiment ID: 20000184 Result: Up-regulated in Transcription
  misc_feature: MA Experiment 20000184 PARAMETER Experiment Name: At_Shoots__P Parameter: Age (day) Value: 7
  misc_feature: MA Experiment 20000184 PARAMETER Experiment Name: At_Shoots__P Parameter: Tissue Value: Shoots vs. Whole Plant
  misc_feature: MA Experiment ID: 20000227 Result: Up-regulated in Transcription
  misc_feature: MA Experiment 20000227 PARAMETER Experiment Name: At_Root-Tips-vs-Tops_P Parameter: Tissue Value: Root Tips vs. Root Tops
  misc_feature: MA Experiment ID: 20000234 Result: Up-regulated in Transcription
  misc_feature: MA Experiment 20000234 PARAMETER Experiment Name: At_Siliques_P Parameter: Age (day) Value: 21
  misc_feature: MA Experiment 20000234 PARAMETER Experiment Name: At_Siliques_P Parameter: Organism Value: A. thaliana
  misc_feature: MA Experiment 20000234 PARAMETER Experiment Name: At_Siliques_P Parameter: Plant Line Value: WS
  misc_feature: MA Experiment 20000234 PARAMETER Experiment Name: At_Siliques_P Parameter: Tissue Value: Less Than 5mm Siliques vs. Whole Plant
  misc_feature: MA Experiment ID: 20000436 Result: Down-regulated in Transcription
  misc_feature: MA Experiment 20000436 PARAMETER Experiment Name: At_Drought_P Parameter: Age (day) Value: 7
  misc_feature: MA Experiment 20000436 PARAMETER Experiment Name: At_Drought_P Parameter: Organism Value: A. thaliana
  misc_feature: MA Experiment 20000436 PARAMETER Experiment Name: At_Drought_P Parameter: Plant Line Value: WS
  misc_feature: MA Experiment 20000436 PARAMETER Experiment Name: At_Drought_P Parameter: Timepoint (hr) Value: 12
  misc_feature: MA Experiment 20000436 PARAMETER Experiment Name: At_Drought_P Parameter: Tissue Value: Whole Plant
  misc_feature: MA Experiment 20000436 PARAMETER Experiment Name: At_Drought_P Parameter: Treatment Value: Drought vs. No Drought
  misc_feature: MA Experiment ID: 20000437 Result: Down-regulated in Transcription
  misc_feature: MA Experiment 20000437 PARAMETER Experiment Name: At_Drought_P Parameter: Age (day) Value: 8
  misc_feature: MA Experiment 20000437 PARAMETER Experiment Name: At_Drought_P Parameter: Organism Value: A. thaliana
  misc_feature: MA Experiment 20000437 PARAMETER Experiment Name: At_Drought_P Parameter: Plant Line Value: WS
  misc_feature: MA Experiment 20000437 PARAMETER Experiment Name: At_Drought_P Parameter: Timepoint (hr) Value: 24
  misc_feature: MA Experiment 20000437 PARAMETER Experiment Name: At_Drought_P Parameter: Tissue Value: Whole Plant
  misc_feature: MA Experiment 20000437 PARAMETER Experiment Name: At_Drought_P Parameter: Treatment Value: Drought vs. No Drought
  misc_feature: MA Experiment ID: 20000794 Result: Down-regulated in Transcription
  misc_feature: MA Experiment 20000794 PARAMETER Experiment Name: At_Petals_P Parameter: Age (day) Value: 23-25 days
  misc_feature: MA Experiment 20000794 PARAMETER Experiment Name: At_Petals_P Parameter: Plant Line Value: WS
  misc_feature: MA Experiment 20000794 PARAMETER Experiment Name: At_Petals_P Parameter: Tissue Value: Petals vs. Whole plant
  misc_feature: MA Experiment ID: 20001458 Result: Up-regulated in Transcription
  misc_feature: MA Experiment 20001458 PARAMETER Experiment Name: At_50mM_NH4NO3_L-to-H_P Parameter: Age (day) Value: Undefined
  misc_feature: MA Experiment 20001458 PARAMETER Experiment Name: At_50mM_NH4NO3_L-to-H_P Parameter: Organism Value: Undefined
  misc_feature: MA Experiment 20001458 PARAMETER Experiment Name: At_50mM_NH4NO3_L-to-H_P Parameter: Plant Line Value: Undefined
  misc_feature: MA Experiment 20001458 PARAMETER Experiment Name: At_50mM_NH4NO3_L-to-H_P Parameter: Timepoint (hr) Value: 2
  misc_feature: MA Experiment 20001458 PARAMETER Experiment Name: At_50mM_NH4NO3_L-to-H_P Parameter: Tissue Value: Siliques
  misc_feature: MA Experiment 20001458 PARAMETER Experiment Name: At_50mM_NH4NO3_L-to-H_P Parameter: Treatment Value: 50mM NH4NO3 vs. 100mM Manitol
  misc_feature: MA Experiment ID: 20001557 Result: Up-regulated in Transcription
  misc_feature: MA Experiment 20001557 PARAMETER Experiment Name: At_Drought_Soil_Dry_P Parameter: Age (day) Value: 27
  misc_feature: MA Experiment 20001557 PARAMETER Experiment Name: At_Drought_Soil_Dry_P Parameter: Organism Value: A. thaliana
  misc_feature: MA Experiment 20001557 PARAMETER Experiment Name: At_Drought_Soil_Dry_P Parameter: Plant Line Value: WS
  misc_feature: MA Experiment 20001557 PARAMETER Experiment Name: At_Drought_Soil_Dry_P Parameter: Post Timepoint (hr) Value: 3
  misc_feature: MA Experiment 20001557 PARAMETER Experiment Name: At_Drought_Soil_Dry_P Parameter: Post-Treatment Value: Re-Water vs. No Drought
  misc_feature: MA Experiment 20001557 PARAMETER Experiment Name: At_Drought_Soil_Dry_P Parameter: Timepoint (day) Value: 13
  misc_feature: MA Experiment 20001557 PARAMETER Experiment Name: At_Drought_Soil_Dry_P Parameter: Treatment Value: Drought vs. No Drought
  misc_feature: MA Experiment ID: 20001558 Result: Up-regulated in Transcription
  misc_feature: MA Experiment 20001558 PARAMETER Experiment Name: At_Drought_Soil_Dry_P Parameter: Age (day) Value: 27
  misc_feature: MA Experiment 20001558 PARAMETER Experiment Name: At_Drought_Soil_Dry_P Parameter: Organism Value: A. thaliana
  misc_feature: MA Experiment 20001558 PARAMETER Experiment Name: At_Drought_Soil_Dry_P Parameter: Plant Line Value: WS
  misc_feature: MA Experiment 20001558 PARAMETER Experiment Name: At_Drought_Soil_Dry_P Parameter: Post Timepoint (hr) Value: 6
  misc_feature: MA Experiment 20001558 PARAMETER Experiment Name: At_Drought_Soil_Dry_P Parameter: Post-Treatment Value: Re-Water vs. No Drought
  misc_feature: MA Experiment 20001558 PARAMETER Experiment Name: At_Drought_Soil_Dry_P Parameter: Timepoint (day) Value: 13
  misc_feature: MA Experiment 20001558 PARAMETER Experiment Name: At_Drought_Soil_Dry_P Parameter: Treatment Value: Drought vs. No Drought
  misc_feature: MA Experiment ID: 20001757 Result: Up-regulated in Transcription
  misc_feature: MA Experiment 20001757 PARAMETER Experiment Name: At_50mM_NH4NO3_L-to-H_P Parameter: Timepoint (hr) Value: 6
  misc_feature: MA Experiment 20001757 PARAMETER Experiment Name: At_50mM_NH4NO3_L-to-H_P Parameter: Tissue Value: Leaf
  misc_feature: MA Experiment 20001757 PARAMETER Experiment Name: At_50mM_NH4NO3_L-to-H_P Parameter: Treatment Value: 50mM NH4NO3 vs 100mM Mannitol
  misc_feature: MA Experiment ID: 20001911 Result: Down-regulated in Transcription
  misc_feature: MA Experiment 20001911 PARAMETER Experiment Name: At_Drought_Reproduction_P Parameter: Age (day) Value: 40
  misc_feature: MA Experiment 20001911 PARAMETER Experiment Name: At_Drought_Reproduction_P Parameter: Organism Value: A. thaliana
  misc_feature: MA Experiment 20001911 PARAMETER Experiment Name: At_Drought_Reproduction_P Parameter: Plant Line Value: WS
  misc_feature: MA Experiment 20001911 PARAMETER Experiment Name: At_Drought_Reproduction_P Parameter: Timepoint (day) Value: 10
  misc_feature: MA Experiment 20001911 PARAMETER Experiment Name: At_Drought_Reproduction_P Parameter: Tissue Value: Flowers
  misc_feature: MA Experiment 20001911 PARAMETER Experiment Name: At_Drought_Reproduction_P Parameter: Treatment Value: Drought vs. No Drought
gagtgagtgagagaagaatcagagaaaatgccgccgaaattggatccatctcaaatcgtcgacgtctacgtccgagtcaccggaggtgaggtcggagcagcgtcttcactcgctccaaagatcggtccactcggtctggcaccaaagaagatcggagaagacatcgccaaagagacagcgaaagaatggaaaggtcttcgagtcaccgtgaagcttacggtacagaatcgtcaagctaaggtcacagtggttccatccgcagcggctctagtcatcaaagccctcaaggagccagagagagataggaagaaagtgaagaacatcaaacataatggcaacatttcgtttgatgatgtgattgagattgctaagataatgcgtcctagatctatcgctaaggaattgagtggaacagtgaaggagattttaggaacttgtgtctctgttggttgcactgttgatggtaaagaccctaaggatcttcaggaagaaattaacagtggtgacattgatattcctaacgagtgataaaggtttttacttttgagttctctatcgttttattttttgtatttgattttgaggatttggtattagtaatactatatttcggaagttgagaattgttggcttttgcccatttgaatcctttcttgggattaatcaaaatgttcaattttctac

SEQ ID NO: 37696 - protein, 166 aa, Arabidopsis thaliana
  peptide (1)..(166): Ceres Seq. ID no. 12326968
  misc_feature (76)..(144): Pfam Name: Ribosomal protein L11, RNA binding domain Pfam Description: Ribosomal protein L11, RNA binding domain
  misc_feature (1)..(159): Homolog of NCBI NO: 15293891 NR Description: ribosomal protein L12 [Ictalurus punctatus]
  misc_feature (1)..(166): Homolog of NCBI NO: 19075397 NR Description: 60s ribosomal protein l12 [Schizosaccharomyces
  misc_feature (1)..(166): Homolog of NCBI NO: 31235341 NR Description: ENSANGP00000019214 [Anopheles gambiae]
  misc_feature (1)..(142): Homolog of NCBI NO: 3986695 NR Description: ribosomal protein L12 [Cichorium intybus]
  misc_feature (1)..(164): Homolog of NCBI NO: 6094002 NR Description: 60S RIBOSOMAL PROTEIN L12
  misc_feature (1)..(165): Homolog of NCBI NO: 38567975 NR Description: OSJNBa0093F12.16 [Oryza sativa (japonica
  misc_feature (1)..(164): Homolog of NCBI NO: 40287508 NR Description: 60S ribosomal protein L12 [Capsicum annuum]
  misc_feature (1)..(164): Homolog of NCBI NO: 15228098 NR Description: 60S ribosomal protein L12
  misc_feature (1)..(164): Homolog of NCBI NO: 15231814 NR Description: 60S RIBOSOMAL PROTEIN L12 -like; protein id:
  misc_feature (1)..(166): Homolog of NCBI NO: 15239409 NR Description: 60S ribosomal protein L12 - like
MPPKLDPSQIVDVYVRVTGGEVGAASSLAPKIGPLGLAPKKIGEDIAKETAKEWKGLRVTVKLTVQNRQAKVTVVPSAAALVIKALKEPERDRKKVKNIKHNGNISFDDVIEIAKIMRPRSIAKELSGTVKEILGTCVSVGCTVDGKDPKDLQEEINSGDIDIPNE

SEQ ID NO: 37697 - DNA, 1352 bp, Arabidopsis thaliana
  misc_feature (1)..(1352): Ceres Seq. ID no. 13509120
  misc_feature: MA Experiment ID: 20000171 Result: Up-regulated in Transcription
  misc_feature: MA Experiment 20000171 PARAMETER Experiment Name: At_42deg_Heat_P Parameter: Age (day) Value: 14
  misc_feature: MA Experiment 20000171 PARAMETER Experiment Name: At_42deg_Heat_P Parameter: Organism Value: A. thaliana
  misc_feature: MA Experiment 20000171 PARAMETER Experiment Name: At_42deg_Heat_P Parameter: Plant Line Value: WS
  misc_feature: MA Experiment 20000171 PARAMETER Experiment Name: At_42deg_Heat_P Parameter: Temperature (deg C) Value: 42 vs. 22
  misc_feature: MA Experiment 20000171 PARAMETER Experiment Name: At_42deg_Heat_P Parameter: Timepoint (hr) Value: 1
  misc_feature: MA Experiment 20000171 PARAMETER Experiment Name: At_42deg_Heat_P Parameter: Tissue Value: Aerial
  misc_feature: MA Experiment ID: 20000286 Result: Up-regulated in Transcription
  misc_feature: MA Experiment 20000286 PARAMETER Experiment Name: At_Open_Flower_P Parameter: Age (day) Value: 21
  misc_feature: MA Experiment 20000286 PARAMETER Experiment Name: At_Open_Flower_P Parameter: Plant Line Value: WS
  misc_feature: MA Experiment 20000286 PARAMETER Experiment Name: At_Open_Flower_P Parameter: Tissue Value: Half Open vs. Whole Plant
  misc_feature: MA Experiment ID: 20000495 Result: Down-regulated in Transcription
  misc_feature: MA Experiment 20000495 PARAMETER Experiment Name: At_Guard_Cells_P Parameter: Harvest Date Value: 8/2/2002
  misc_feature: MA Experiment 20000495 PARAMETER Experiment Name: At_Guard_Cells_P Parameter: Organism Value: A. thaliana
  misc_feature: MA Experiment 20000495 PARAMETER Experiment Name: At_Guard_Cells_P Parameter: Tissue Value: Guard Cells vs. Leaves
  misc_feature: MA Experiment ID: 20001451 Result: Down-regulated in Transcription
  misc_feature: MA Experiment 20001451 PARAMETER Experiment Name: At_Far-red-induction_P Parameter: Age (day) Value: 7
  misc_feature: MA Experiment 20001451 PARAMETER Experiment Name: At_Far-red-induction_P Parameter: Light Value: Far-red vs. White
  misc_feature: MA Experiment 20001451 PARAMETER Experiment Name: At_Far-red-induction_P Parameter: Organism Value: A. thaliana
  misc_feature: MA Experiment 20001451 PARAMETER Experiment Name: At_Far-red-induction_P Parameter: Plant Line Value: Columbia
  misc_feature: MA Experiment 20001451 PARAMETER Experiment Name: At_Far-red-induction_P Parameter: Timepoint (hr) Value: 24
  misc_feature: MA Experiment 20001451 PARAMETER Experiment Name: At_Far-red-induction_P Parameter: Tissue Value: Whole Plant
aaagtgaaatgaagtcagcaatttcatcgtcactcttcttcaattcgaagaatcttttaaaccctaatcctctttctcgcttcatttctctcaaatctaacttcctccctaaattatctccgagatcgatcactagtcacaccttgaagctcccatcttcgtcaacctcagctttaagatccatttcctcttccatggcttcttctttcaaccctgaacaagctagagttccctctgctcttcctctcccagctcctccgttgaccaaattcaacatcggattgtgtcagctatctgttacatctgacaaaaagagaaacatctctcatgctaaaaaagccattgaagaagctgcttctaaaggagctaagcttgttctcttacccgaaatttggaacagtccgtattccaatgatagttttccagtttatgcggaggagattgatgcaggtggtgatgcttctccttcaacggcaatgctttctgaagtttccaaacgtctcaagattacaatcattggtggatctataccagaaagagttggagatcgtttgtataacacttgctgtgtctttggttccgatggagagctaaaagctaagcatcggaagatacatttatttgatatagacattcccgggaagattacttttatggaatccaaaactcttactgctggagagacaccaacaatcgttgacacagatgtagggcgtattggaataggcatctgttatgatatcaggttccaggagttagctatgatatatgctgcaagaggggctcatttgctgtgctacccgggagcctttaacatgacaactggaccattgcattgggaattactacaaagggccagggctacggataatcagttatatgtggcgacatgctcacctgccagagattcaggagctggctacactgcttgggggcactcaacactcgttgggccttttggagaagtactagcaacgactgagcatgaggaggccattatcatagcagagattgattactctatccttgaacaacgaaggactagccttccattgaataggcagcggcggggagatctttaccagcttgtagacgtacagcgcttagactctaaatgaacgcagcagtaactgtatatctgagagatattgcgagttgagcacgatttggttacttacaacttcatgcatgatcagtcatttctccacaactttgctgagatatgtaaaagaataaaaatcaaacttttgagttaaaatcgaacaaaggcaagtaaattctgcttagataatgtgaactccacccacttgccatgtgtttgttgtttataaacttcaatgcattctgataac

SEQ ID NO: 37698 - protein, 371 aa, Arabidopsis thaliana
  peptide (1)..(371): Ceres Seq. ID no. 13509121
  misc_feature (319)..(349): Homolog of NCBI NO: 18390107 NR Description: putative protein NP_196765.1 [Sorghum bicolor]
  misc_feature (33)..(291): Homolog of NCBI NO: 18390107 NR Description: putative protein NP_196765.1 [Sorghum bicolor]
  misc_feature (92)..(360): Homolog of NCBI NO: 40743456 NR Description: hypothetical protein AN5486.2 [Aspergillus
  misc_feature (78)..(363): Homolog of NCBI NO: 19115066 NR Description: putative amidohydrolase [Schizosaccharomyces
  misc_feature (87)..(360): Homolog of NCBI NO: 12963555 NR Description: Nit protein 2 [Mus musculus]
  misc_feature (80)..(362): Homolog of NCBI NO: 34868007 NR Description: similar to Nit protein 2 [Rattus norvegicus]
  misc_feature (87)..(360): Homolog of NCBI NO: 18088311 NR Description: Nit protein 2 [Homo sapiens]
  misc_feature (87)..(360): Homolog of NCBI NO: 9910460 NR Description: Nit protein 2 [Homo sapiens]
  misc_feature (65)..(371): Homolog of NCBI NO: 11357420 NR Description: hypothetical protein F14F18.210 - Arabidopsis
  misc_feature (3)..(371): Homolog of NCBI NO: 22326744 NR Description: expressed protein [Arabidopsis thaliana]
SEMKSAISSSLFFNSKNLLNPNPLSRFISLKSNFLPKLSPRSITSHTLKLPSSSTSALRSISSSMASSFNPEQARVPSALPLPAPPLTKFNIGLCQLSVTSDKKRNISHAKKAIEEAASKGAKLVLLPEIWNSPYSNDSFPVYAEEIDAGGDASPSTAMLSEVSKRLKITIIGGSIPERVGDRLYNTCCVFGSDGELKAKHRKIHLFDIDIPGKITFMESKTLTAGETPTIVDTDVGRIGIGICYDIRFQELAMIYAARGAHLLCYPGAFNMTTGPLHWELLQRARATDNQLYVATCSPARDSGAGYTAWGHSTLVGPFGEVLATTEHEEAIIIAEIDYSILEQRRTSLPLNRQRRGDLYQLVDVQRLDSK

SEQ ID NO: 37699 - protein, 369 aa, Arabidopsis thaliana
  peptide (1)..(369): Ceres Seq. ID no. 13509122
  misc_feature (317)..(347): Homolog of NCBI NO: 18390107 NR Description: putative protein NP_196765.1 [Sorghum bicolor]
  misc_feature (31)..(289): Homolog of NCBI NO: 18390107 NR Description: putative protein NP_196765.1 [Sorghum bicolor]
  misc_feature (90)..(358): Homolog of NCBI NO: 40743456 NR Description: hypothetical protein AN5486.2 [Aspergillus
  misc_feature (76)..(361): Homolog of NCBI NO: 19115066 NR Description: putative amidohydrolase [Schizosaccharomyces
  misc_feature (85)..(358): Homolog of NCBI NO: 12963555 NR Description: Nit protein 2 [Mus musculus]
  misc_feature (78)..(360): Homolog of NCBI NO: 34868007 NR Description: similar to Nit protein 2 [Rattus norvegicus]
  misc_feature (85)..(358): Homolog of NCBI NO: 18088311 NR Description: Nit protein 2 [Homo sapiens]
  misc_feature (85)..(358): Homolog of NCBI NO: 9910460 NR Description: Nit protein 2 [Homo sapiens]
  misc_feature (63)..(369): Homolog of NCBI NO: 11357420 NR Description: hypothetical protein F14F18.210 - Arabidopsis
  misc_feature (1)..(369): Homolog of NCBI NO: 22326744 NR Description: expressed protein [Arabidopsis thaliana]
MKSAISSSLFFNSKNLLNPNPLSRFISLKSNFLPKLSPRSITSHTLKLPSSSTSALRSISSSMASSFNPEQARVPSALPLPAPPLTKFNIGLCQLSVTSDKKRNISHAKKAIEEAASKGAKLVLLPEIWNSPYSNDSFPVYAEEIDAGGDASPSTAMLSEVSKRLKITIIGGSIPERVGDRLYNTCCVFGSDGELKAKHRKIHLFDIDIPGKITFMESKTLTAGETPTIVDTDVGRIGIGICYDIRFQELAMIYAARGAHLLCYPGAFNMTTGPLHWELLQRARATDNQLYVATCSPARDSGAGYTAWGHSTLVGPFGEVLATTEHEEAIIIAEIDYSILEQRRTSLPLNRQRRGDLYQLVDVQRLDSK

SEQ ID NO: 37700 - protein, 307 aa, Arabidopsis thaliana
  peptide (1)..(307): Ceres Seq. ID no. 13509123
  misc_feature (255)..(285): Homolog of NCBI NO: 18390107 NR Description: putative protein NP_196765.1 [Sorghum bicolor]
  misc_feature (1)..(227): Homolog of NCBI NO: 18390107 NR Description: putative protein NP_196765.1 [Sorghum bicolor]
  misc_feature (28)..(296): Homolog of NCBI NO: 40743456 NR Description: hypothetical protein AN5486.2 [Aspergillus
  misc_feature (14)..(299): Homolog of NCBI NO: 19115066 NR Description: putative amidohydrolase [Schizosaccharomyces
  misc_feature (23)..(296): Homolog of NCBI NO: 12963555 NR Description: Nit protein 2 [Mus musculus]
  misc_feature (16)..(298): Homolog of NCBI NO: 34868007 NR Description: similar to Nit protein 2 [Rattus norvegicus]
  misc_feature (23)..(296): Homolog of NCBI NO: 18088311 NR Description: Nit protein 2 [Homo sapiens]
  misc_feature (23)..(296): Homolog of NCBI NO: 9910460 NR Description: Nit protein 2 [Homo sapiens]
  misc_feature (1)..(307): Homolog of NCBI NO: 11357420 NR Description: hypothetical protein F14F18.210 - Arabidopsis
  misc_feature (1)..(307): Homolog of NCBI NO: 22326744 NR Description: expressed protein [Arabidopsis thaliana]
MASSFNPEQARVPSALPLPAPPLTKFNIGLCQLSVTSDKKRNISHAKKAIEEAASKGAKLVLLPEIWNSPYSNDSFPVYAEEIDAGGDASPSTAMLSEVSKRLKITIIGGSIPERVGDRLYNTCCVFGSDGELKAKHRKIHLFDIDIPGKITFMESKTLTAGETPTIVDTDVGRIGIGICYDIRFQELAMIYAARGAHLLCYPGAFNMTTGPLHWELLQRARATDNQLYVATCSPARDSGAGYTAWGHSTLVGPFGEVLATTEHEEAIIIAEIDYSILEQRRTSLPLNRQRRGDLYQLVDVQRLDSK

SEQ ID NO: 37701 - DNA, 1758 bp, Arabidopsis thaliana
  misc_feature (1)..(1758): Ceres Seq. ID no. 13580639
  misc_feature: MA Experiment ID: 20000180 Result: Up-regulated in Transcription
  misc_feature: MA Experiment 20000180 PARAMETER Experiment Name: At_Germinating_Seeds_P Parameter: Age (hr) Value: 24 vs. 0
  misc_feature: MA Experiment 20000180 PARAMETER Experiment Name: At_Germinating_Seeds_P Parameter: Tissue Value: Germinating Seeds
  misc_feature: MA Experiment ID: 20000184 Result: Down-regulated in Transcription
  misc_feature: MA Experiment 20000184 PARAMETER Experiment Name: At_Shoots__P Parameter: Age (day) Value: 7
  misc_feature: MA Experiment 20000184 PARAMETER Experiment Name: At_Shoots__P Parameter: Tissue Value: Shoots vs. Whole Plant
  misc_feature: MA Experiment ID: 20000227 Result: Down-regulated in Transcription
  misc_feature: MA Experiment 20000227 PARAMETER Experiment Name: At_Root-Tips-vs-Tops_P Parameter: Tissue Value: Root Tips vs. Root Tops
  misc_feature: MA Experiment ID: 20000264 Result: Up-regulated in Transcription
  misc_feature: MA Experiment 20000264 PARAMETER Experiment Name: At_Open_Flower_P Parameter: Age (day) Value: 21
  misc_feature: MA Experiment 20000264 PARAMETER Experiment Name: At_Open_Flower_P Parameter: Plant Line Value: WS
  misc_feature: MA Experiment 20000264 PARAMETER Experiment Name: At_Open_Flower_P Parameter: Tissue Value: Open Flower vs. Whole Plant
  misc_feature: MA Experiment ID: 20000265 Result: Down-regulated in Transcription
  misc_feature: MA Experiment 20000265 PARAMETER Experiment Name: At_Open_Flower_P Parameter: Age (day) Value: 21
  misc_feature: MA Experiment 20000265 PARAMETER Experiment Name: At_Open_Flower_P Parameter: Plant Line Value: WS
  misc_feature: MA Experiment 20000265 PARAMETER Experiment Name: At_Open_Flower_P Parameter: Tissue Value: Closed Flower vs. Whole Plant
  misc_feature: MA Experiment ID: 20000438 Result: Down-regulated in Transcription
  misc_feature: MA Experiment 20000438 PARAMETER Experiment Name: At_Shoots__P Parameter: Age (day) Value: 14
  misc_feature: MA Experiment 20000438 PARAMETER Experiment Name: At_Shoots__P Parameter: Tissue Value: Shoots vs. Whole Plant
  misc_feature: MA Experiment ID: 20000452 Result: Up-regulated in Transcription
  misc_feature: MA Experiment 20000452 PARAMETER Experiment Name: At_CS6879_Shoots-Roots_P Parameter: Age (day) Value: 14
  misc_feature: MA Experiment 20000452 PARAMETER Experiment Name: At_CS6879_Shoots-Roots_P Parameter: Organism Value: A. thaliana
  misc_feature: MA Experiment 20000452 PARAMETER Experiment Name: At_CS6879_Shoots-Roots_P Parameter: Plant Line Value: CS6879 vs. WS
  misc_feature: MA Experiment 20000452 PARAMETER Experiment Name: At_CS6879_Shoots-Roots_P Parameter: Tissue Value: Shoots
  misc_feature: MA Experiment ID: 20000453 Result: Up-regulated in Transcription
  misc_feature: MA Experiment 20000453 PARAMETER Experiment Name: At_100uM_ABA_P Parameter: Age (day) Value: 15
  misc_feature: MA Experiment 20000453 PARAMETER Experiment Name: At_100uM_ABA_P Parameter: Organism Value: A. thaliana
  misc_feature: MA Experiment 20000453 PARAMETER Experiment Name: At_100uM_ABA_P Parameter: Plant Line Value: WS
  misc_feature: MA Experiment 20000453 PARAMETER Experiment Name: At_100uM_ABA_P Parameter: Timepoint (hr) Value: 24
  misc_feature: MA Experiment 20000453 PARAMETER Experiment Name: At_100uM_ABA_P Parameter: Tissue Value: Aerial
  misc_feature: MA Experiment 20000453 PARAMETER Experiment Name: At_100uM_ABA_P Parameter: Treatment Value: 100uM ABA vs. No Treatment
  misc_feature: MA Experiment ID: 20000495 Result: Up-regulated in Transcription
  misc_feature: MA Experiment 20000495 PARAMETER Experiment Name: At_Guard_Cells_P Parameter: Harvest Date Value: 8/2/2002
  misc_feature: MA Experiment 20000495 PARAMETER Experiment Name: At_Guard_Cells_P Parameter: Organism Value: A. thaliana
  misc_feature: MA Experiment 20000495 PARAMETER Experiment Name: At_Guard_Cells_P Parameter: Tissue Value: Guard Cells vs. Leaves
  misc_feature: MA Experiment ID: 20000709 Result: Down-regulated in Transcription
  misc_feature: MA Experiment 20000709 PARAMETER Experiment Name: At_15mM_NH4NO3_L-to-H_P Parameter: Age (hr) Value: 14
  misc_feature: MA Experiment 20000709 PARAMETER Experiment Name: At_15mM_NH4NO3_L-to-H_P Parameter: Organism Value: A. thaliana
  misc_feature: MA Experiment 20000709 PARAMETER Experiment Name: At_15mM_NH4NO3_L-to-H_P Parameter: Plant Line Value: WS
  misc_feature: MA Experiment 20000709 PARAMETER Experiment Name: At_15mM_NH4NO3_L-to-H_P Parameter: Timepoint (hr) Value: 4
  misc_feature: MA Experiment 20000709 PARAMETER Experiment Name: At_15mM_NH4NO3_L-to-H_P Parameter: Tissue Value: Aerial
  misc_feature: MA Experiment 20000709 PARAMETER Experiment Name: At_15mM_NH4NO3_L-to-H_P Parameter: Treatment Value: 15mM NH4NO3 vs. 30mM Mannitol
  misc_feature: MA Experiment ID: 20000794 Result: Up-regulated in Transcription
  misc_feature: MA Experiment 20000794 PARAMETER Experiment Name: At_Petals_P Parameter: Age (day) Value: 23-25 days
  misc_feature: MA Experiment 20000794 PARAMETER Experiment Name: At_Petals_P Parameter: Plant Line Value: WS
  misc_feature: MA Experiment 20000794 PARAMETER Experiment Name: At_Petals_P Parameter: Tissue Value: Petals vs. Whole plant
  misc_feature: MA Experiment ID: 20001458 Result: Down-regulated in Transcription
  misc_feature: MA Experiment 20001458 PARAMETER Experiment Name: At_50mM_NH4NO3_L-to-H_P Parameter: Age (day) Value: Undefined
  misc_feature: MA Experiment 20001458 PARAMETER Experiment Name: At_50mM_NH4NO3_L-to-H_P Parameter: Organism Value: Undefined
  misc_feature: MA Experiment 20001458 PARAMETER Experiment Name: At_50mM_NH4NO3_L-to-H_P Parameter: Plant Line Value: Undefined
  misc_feature: MA Experiment 20001458 PARAMETER Experiment Name: At_50mM_NH4NO3_L-to-H_P Parameter: Timepoint (hr) Value: 2
  misc_feature: MA Experiment 20001458 PARAMETER Experiment Name: At_50mM_NH4NO3_L-to-H_P Parameter: Tissue Value: Siliques
  misc_feature: MA Experiment 20001458 PARAMETER Experiment Name: At_50mM_NH4NO3_L-to-H_P Parameter: Treatment Value: 50mM NH4NO3 vs. 100mM Manitol
  misc_feature: MA Experiment ID: 20001503 Result: Up-regulated in Transcription
  misc_feature: MA Experiment 20001503 PARAMETER Experiment Name: At_Far-red-enriched_P Parameter: Age (day) Value: 7
  misc_feature: MA Experiment 20001503 PARAMETER Experiment Name: At_Far-red-enriched_P Parameter: Light Value: Far-red enriched vs. White
  misc_feature: MA Experiment 20001503 PARAMETER Experiment Name: At_Far-red-enriched_P Parameter: Organism Value: A. thaliana
  misc_feature: MA Experiment 20001503 PARAMETER Experiment Name: At_Far-red-enriched_P Parameter: Plant Line Value: Columbia
  misc_feature: MA Experiment 20001503 PARAMETER Experiment Name: At_Far-red-enriched_P Parameter: Timepoint (day) Value: 3
  misc_feature: MA Experiment 20001503 PARAMETER Experiment Name: At_Far-red-enriched_P Parameter: Tissue Value: Whole Plant
  misc_feature: MA Experiment ID: 20001556 Result: Down-regulated in Transcription
  misc_feature: MA Experiment 20001556 PARAMETER Experiment Name: At_Drought_Soil_Dry_P Parameter: Age (day) Value: 26
  misc_feature: MA Experiment 20001556 PARAMETER Experiment Name: At_Drought_Soil_Dry_P Parameter: Organism Value: A. thaliana
  misc_feature: MA Experiment 20001556 PARAMETER Experiment Name: At_Drought_Soil_Dry_P Parameter: Plant Line Value: WS
  misc_feature: MA Experiment 20001556 PARAMETER Experiment Name: At_Drought_Soil_Dry_P Parameter: Post Timepoint (hr) Value: None
  misc_feature: MA Experiment 20001556 PARAMETER Experiment Name: At_Drought_Soil_Dry_P Parameter: Post-Treatment Value: None
  misc_feature: MA Experiment 20001556 PARAMETER Experiment Name: At_Drought_Soil_Dry_P Parameter: Timepoint (day) Value: 12
  misc_feature: MA Experiment 20001556 PARAMETER Experiment Name: At_Drought_Soil_Dry_P Parameter: Treatment Value: Drought vs. No Drought
  misc_feature: MA Experiment ID: 20001557 Result: Down-regulated in Transcription
  misc_feature: MA Experiment 20001557 PARAMETER Experiment Name: At_Drought_Soil_Dry_P Parameter: Age (day) Value: 27
  misc_feature: MA Experiment 20001557 PARAMETER Experiment Name: At_Drought_Soil_Dry_P Parameter: Organism Value: A. thaliana
  misc_feature: MA Experiment 20001557 PARAMETER Experiment Name: At_Drought_Soil_Dry_P Parameter: Plant Line Value: WS
  misc_feature: MA Experiment 20001557 PARAMETER Experiment Name: At_Drought_Soil_Dry_P Parameter: Post Timepoint (hr) Value: 3
  misc_feature: MA Experiment 20001557 PARAMETER Experiment Name: At_Drought_Soil_Dry_P Parameter: Post-Treatment Value: Re-Water vs. No Drought
  misc_feature: MA Experiment 20001557 PARAMETER Experiment Name: At_Drought_Soil_Dry_P Parameter: Timepoint (day) Value: 13
  misc_feature: MA Experiment 20001557 PARAMETER Experiment Name: At_Drought_Soil_Dry_P Parameter: Treatment Value: Drought vs. No Drought
  misc_feature: MA Experiment ID: 20001558 Result: Down-regulated in Transcription
  misc_feature: MA Experiment 20001558 PARAMETER Experiment Name: At_Drought_Soil_Dry_P Parameter: Age (day) Value: 27
  misc_feature: MA Experiment 20001558 PARAMETER Experiment Name: At_Drought_Soil_Dry_P Parameter: Organism Value: A. thaliana
  misc_feature: MA Experiment 20001558 PARAMETER Experiment Name: At_Drought_Soil_Dry_P Parameter: Plant Line Value: WS
  misc_feature: MA Experiment 20001558 PARAMETER Experiment Name: At_Drought_Soil_Dry_P Parameter: Post Timepoint (hr) Value: 6
  misc_feature: MA Experiment 20001558 PARAMETER Experiment Name: At_Drought_Soil_Dry_P Parameter: Post-Treatment Value: Re-Water vs. No Drought
  misc_feature: MA Experiment 20001558 PARAMETER Experiment Name: At_Drought_Soil_Dry_P Parameter: Timepoint (day) Value: 13
  misc_feature: MA Experiment 20001558 PARAMETER Experiment Name: At_Drought_Soil_Dry_P Parameter: Treatment Value: Drought vs. No Drought
  misc_feature: MA Experiment ID: 20001757 Result: Down-regulated in Transcription
  misc_feature: MA Experiment 20001757 PARAMETER Experiment Name: At_50mM_NH4NO3_L-to-H_P Parameter: Timepoint (hr) Value: 6
  misc_feature: MA Experiment 20001757 PARAMETER Experiment Name: At_50mM_NH4NO3_L-to-H_P Parameter: Tissue Value: Leaf
  misc_feature: MA Experiment 20001757 PARAMETER Experiment Name: At_50mM_NH4NO3_L-to-H_P Parameter: Treatment Value: 50mM NH4NO3 vs 100mM Mannitol
  misc_feature: MA Experiment ID: 20001773 Result: Up-regulated in Transcription
  misc_feature: MA Experiment 20001773 PARAMETER Experiment Name: At_Far-red-enriched-adult_P Parameter: Age (day) Value: 30
  misc_feature: MA Experiment 20001773 PARAMETER Experiment Name: At_Far-red-enriched-adult_P Parameter: Light Value: Far-red enriched vs. White
  misc_feature: MA Experiment 20001773 PARAMETER Experiment Name: At_Far-red-enriched-adult_P Parameter: Organism Value: A. thaliana
  misc_feature: MA Experiment 20001773 PARAMETER Experiment Name: At_Far-red-enriched-adult_P Parameter: Plant Line Value: Columbia
  misc_feature: MA Experiment 20001773 PARAMETER Experiment Name: At_Far-red-enriched-adult_P Parameter: Timepoint (hr) Value: 48
  misc_feature: MA Experiment 20001773 PARAMETER Experiment Name: At_Far-red-enriched-adult_P Parameter: Tissue Value: Aerial
  misc_feature: MA Experiment ID: 20001911 Result: Down-regulated in Transcription
  misc_feature: MA Experiment 20001911 PARAMETER Experiment Name: At_Drought_Reproduction_P Parameter: Age (day) Value: 40
  misc_feature: MA Experiment 20001911 PARAMETER Experiment Name: At_Drought_Reproduction_P Parameter: Organism Value: A. thaliana
  misc_feature: MA Experiment 20001911 PARAMETER Experiment Name: At_Drought_Reproduction_P Parameter: Plant Line Value: WS
  misc_feature: MA Experiment 20001911 PARAMETER Experiment Name: At_Drought_Reproduction_P Parameter: Timepoint (day) Value: 10
  misc_feature: MA Experiment 20001911 PARAMETER Experiment Name: At_Drought_Reproduction_P Parameter: Tissue Value: Flowers
  misc_feature: MA Experiment 20001911 PARAMETER Experiment Name: At_Drought_Reproduction_P Parameter: Treatment Value: Drought vs. No Drought
aaagcttaacaacctccactagagactttcttgagcaaaaaagattggttataaaggaccaaccattgtcatgttattgagtgtcatttttgtgagggagagaattaagagagcaaaatgagcataaataggaatctgttgaatatcataataatcctttgtatatgtctcaatttgggttgtaacgatggagctcaagaaagagagactgattctcatactatccaagtcagctctctcctcccttcatcatcatcatcttgtgttctttctcccagagcgtctactacaaagtcttcactgcacgtgacgcatagacacggcacgtgttcgcgtctaaacaatggcaaggccacgagtccagaccatgtcgagatcctaagactcgaccaggctcgcgtaaactcaatccactcaaaactatcgaagaaactcgcaacagatcacgtcagtgaaagcaagtcaacggatctaccggctaaagacggaagcacactcggttcaggtaactacatcgtgacggtcggcctcgggacaccaaagaacgatctatcactaatcttcgacactggaagcgatttaacgtggactcagtgtcagccatgtgttcgaacttgctatgaccagaaggaaccaatctttaacccttctaagtctacttcttactacaacgtatcctgctcatcggctgcgtgtggttctctctcttctgctacaggaaacgccggaagctgttcggcttcgaattgcatctacggtattcaatacggcgatcaatcgttctccgtcggatttctcgccaaggagaagtttacactaacgaactccgacgtatttgacggcgtttatttcggttgcggcgagaacaaccaaggacttttcaccggtgtcgccggacttctcggtcttggtcgtgacaagctttcgtttccgtcgcagacggcaacggcttacaataagatcttctcttactgcctcccttcctccgctagctacaccggacatctcacattcggatccgccggaatctccagatccgttaaattcacaccaatttcaaccatcactgatggaacttccttctacggccttaatatcgtcgcaatcaccgtcggcggtcagaaattgccgattccttcaactgtattctctactccgggagctttaatcgattccggcaccgttatcactcgtctcccgccgaaagcctacgcggcgttaagaagctcgttcaaggcgaagatgtcaaagtatccgaccacgtcgggcgtctcgatcttggacacgtgtttcgatctcagcgggtttaagacggtgactatcccgaaagtggcgttctctttcagcggtggcgccgtcgtggagcttggttcgaaagggatattttacgtgtttaagatatctcaggtttgtctggcgtttgcagggaatagcgatgacagtaacgctgccatctttggaaacgttcagcagcaaacgctagaagttgtgtatgatggtgcgggtgggcgggtcgggtttgctccaaacgggtgtagttaagttagttaatgaaaaacagaacggggtaaattttaaatttatggatttggcacaaattagctttatccttaatcaagtgtgtaatttgggtaaagatcggaattcgtgatggtctttgaagtaattgtatagtaataagtttgtgtgcatgatacaacaattacaagaacaaactgtttattgtaaaattttattccaatacaactatacaagatg

SEQ ID NO: 37702 - protein, 474 aa, Arabidopsis thaliana
  peptide (1)..(474): Ceres Seq. ID no. 13580640
  misc_feature (87)..(471): Pfam Name: Eukaryotic aspartyl protease Pfam Description: Eukaryotic aspartyl protease
  misc_feature (87)..(471): Pfam Name: Eukaryotic aspartyl protease Pfam Description: Eukaryotic aspartyl protease
  misc_feature (60)..(473): Homolog of NCBI NO: 34912520 NR Description: chloroplast nucleoid DNA-binding protein
  misc_feature (54)..(473): Homolog of NCBI NO: 25406599 NR Description: probable aspartyl proteinase, 105611-106921
  misc_feature (1)..(473): Homolog of NCBI NO: 18412482 NR Description: aspartyl protease -related [Arabidopsis thaliana]
  misc_feature (1)..(473): Homolog of NCBI NO: 21595063 NR Description: putative aspartyl protease [Arabidopsis thaliana]
  misc_feature (30)..(474): Homolog of NCBI NO: 24430421 NR Description: 41 kD chloroplast nucleoid DNA binding protein
  misc_feature (60)..(473): Homolog of NCBI NO: 34912520 NR Description: chloroplast nucleoid DNA-binding protein
  misc_feature (1)..(473): Homolog of NCBI NO: 18412482 NR Description: aspartyl protease -related [Arabidopsis thaliana]
  misc_feature (30)..(474): Homolog of NCBI NO: 24430421 NR Description: 41 kD chloroplast nucleoid DNA binding protein
  misc_feature (1)..(474): Homolog of NCBI NO: 22326716 NR Description: nucleoid DNA-binding protein cnd41 - like protein
  misc_feature (59)..(474): Homolog of NCBI NO: 11358588 NR Description: nucleoid DNA-binding protein cnd41-like protein -
  misc_feature (1)..(473): Homolog of NCBI NO: 24417232 NR Description: unknown [Arabidopsis thaliana]
  misc_feature (1)..(473): Homolog of NCBI NO: 15238250 NR Description: nucleoid DNA-binding protein cnd41 - like protein
  misc_feature (12)..(474): Homolog of NCBI NO: 7489168 NR Description: nucleoid DNA-binding protein cnd41, chloroplast -
  misc_feature (1)..(473): Homolog of NCBI NO: 21595063 NR Description: putative aspartyl protease [Arabidopsis thaliana]
  misc_feature (54)..(473): Homolog of NCBI NO: 25406599 NR Description: probable aspartyl proteinase, 105611-106921
  misc_feature (12)..(474): Homolog of NCBI NO: 7489168 NR Description: nucleoid DNA-binding protein cnd41, chloroplast -
  misc_feature (1)..(473): Homolog of NCBI NO: 15238250 NR Description: nucleoid DNA-binding protein cnd41 - like protein
  misc_feature (1)..(473): Homolog of NCBI NO: 24417232 NR Description: unknown [Arabidopsis thaliana]
  misc_feature (59)..(474): Homolog of NCBI NO: 11358588 NR Description: nucleoid DNA-binding protein cnd41-like protein -
  misc_feature (1)..(474): Homolog of NCBI NO: 22326716 NR Description: nucleoid DNA-binding protein cnd41 - like protein
MSINRNLLNIIIILCICLNLGCNDGAQERETDSHTIQVSSLLPSSSSSCVLSPRASTTKSSLHVTHRHGTCSRLNNGKATSPDHVEILRLDQARVNSIHSKLSKKLATDHVSESKSTDLPAKDGSTLGSGNYIVTVGLGTPKNDLSLIFDTGSDLTWTQCQPCVRTCYDQKEPIFNPSKSTSYYNVSCSSAACGSLSSATGNAGSCSASNCIYGIQYGDQSFSVGFLAKEKFTLTNSDVFDGVYFGCGENNQGLFTGVAGLLGLGRDKLSFPSQTATAYNKIFSYCLPSSASYTGHLTFGSAGISRSVKFTPISTITDGTSFYGLNIVAITVGGQKLPIPSTVFSTPGALIDSGTVITRLPPKAYAALRSSFKAKMSKYPTTSGVSILDTCFDLSGFKTVTIPKVAFSFSGGAVVELGSKGIFYVFKISQVCLAFAGNSDDSNAAIFGNVQQQTLEVVYDGAGGRVGFAPNGCS

SEQ ID NO: 37703 - DNA, 1120 bp, Arabidopsis thaliana
  misc_feature (1)..(1120): Ceres Seq. ID no. 12466478
  misc_feature: MA Experiment ID: 108462 Result: Up-regulated in Transcription
  misc_feature: MA Experiment 108462 PARAMETER Experiment Name: At_Germinating_Seeds_cDNA_P Parameter: Age (day) Value: 2 vs. 0
  misc_feature: MA Experiment 108462 PARAMETER Experiment Name: At_Germinating_Seeds_cDNA_P Parameter: Tissue Value: Germinating Seeds
  misc_feature: MA Experiment ID: 108573 Result: Up-regulated in Transcription
  misc_feature: MA Experiment 108573 PARAMETER Experiment Name: At_Drought_cDNA_P Parameter: Timepoint (hr) Value: 6
  misc_feature: MA Experiment 108573 PARAMETER Experiment Name: At_Drought_cDNA_P Parameter: Tissue Value: Aerial
  misc_feature: MA Experiment 108573 PARAMETER Experiment Name: At_Drought_cDNA_P Parameter: Treatment Value: Drought vs. No Drought
  misc_feature: MA Experiment ID: 20000113 Result: Down-regulated in Transcription
  misc_feature: MA Experiment 20000113 PARAMETER Experiment Name: At_42deg_Heat_cDNA_P Parameter: Temperature (deg C) Value: 42 vs. 22
  misc_feature: MA Experiment 20000113 PARAMETER Experiment Name: At_42deg_Heat_cDNA_P Parameter: Timepoint (hr) Value: 8
  misc_feature: MA Experiment 20000113 PARAMETER Experiment Name: At_42deg_Heat_cDNA_P Parameter: Tissue Value: Aerial
  misc_feature: MA Experiment ID: 20000173 Result: Down-regulated in Transcription
  misc_feature: MA Experiment 20000173 PARAMETER Experiment Name: At_42deg_Heat_P Parameter: Age (day) Value: 14
  misc_feature: MA Experiment 20000173 PARAMETER Experiment Name: At_42deg_Heat_P Parameter: Organism Value: A. thaliana
  misc_feature: MA Experiment 20000173 PARAMETER Experiment Name: At_42deg_Heat_P Parameter: Plant Line Value: WS
  misc_feature: MA Experiment 20000173 PARAMETER Experiment Name: At_42deg_Heat_P Parameter: Temperature (deg C) Value: 42 vs. 22
  misc_feature: MA Experiment 20000173 PARAMETER Experiment Name: At_42deg_Heat_P Parameter: Timepoint (hr) Value: 6
  misc_feature: MA Experiment 20000173 PARAMETER Experiment Name: At_42deg_Heat_P Parameter: Tissue Value: Aerial
  misc_feature: MA Experiment ID: 20000180 Result: Up-regulated in Transcription
  misc_feature: MA Experiment 20000180 PARAMETER Experiment Name: At_Germinating_Seeds_P Parameter: Age (hr) Value: 24 vs. 0
  misc_feature: MA Experiment 20000180 PARAMETER Experiment Name: At_Germinating_Seeds_P Parameter: Tissue Value: Germinating Seeds
  misc_feature: MA Experiment ID: 20000184 Result: Up-regulated in Transcription
  misc_feature: MA Experiment 20000184 PARAMETER Experiment Name: At_Shoots__P Parameter: Age (day) Value: 7
  misc_feature: MA Experiment 20000184 PARAMETER Experiment Name: At_Shoots__P Parameter: Tissue Value: Shoots vs. Whole Plant
  misc_feature: MA Experiment ID: 20001905 Result: Down-regulated in Transcription
  misc_feature: MA Experiment 20001905 PARAMETER Experiment Name: At_Drought_Reproduction_P Parameter: Age (day) Value: 40
  misc_feature: MA Experiment 20001905 PARAMETER Experiment Name: At_Drought_Reproduction_P Parameter: Organism Value: A. thaliana
  misc_feature: MA Experiment 20001905 PARAMETER Experiment Name: At_Drought_Reproduction_P Parameter: Plant Line Value: WS
  misc_feature: MA Experiment 20001905 PARAMETER Experiment Name: At_Drought_Reproduction_P Parameter: Timepoint (day) Value: 10
  misc_feature: MA Experiment 20001905 PARAMETER Experiment Name: At_Drought_Reproduction_P Parameter: Tissue Value: Rosettes
  misc_feature: MA Experiment 20001905 PARAMETER Experiment Name: At_Drought_Reproduction_P Parameter: Treatment Value: Drought vs. No Drought
aatcatttgcagaagaaaaataaaaaaaaaaaacagagaaaaggagatatggaatcaatcggagtccttatgatgtgccccatgtcctcctacctcgagaacgagcttgagaagcgcttcaaccttcttcgcttctggacttctccggagaaatccgtcctcctagaaactcatcggaactccatccgcgccgtcgttgggaatgcttctgccggcgccgatgctcagctcatcagcgatctgcccaaccttgagattgtatccagcttcagcgtcgggctcgacaagatcgatttggggaaatgcaaagaaaaagggatccgcgtcaccaacacccccgacgttctcaccgaagacgtcgcagatctcgccatcgggcttatcctggctctccttcgacggctgtgtgagtgcgatcgctatgtaaggagcggaaaatggaagcaaggtgaattccaactcactaccaagtttagtggaaaatccgtggggatcattggtctaggtagaattgggactgccatcgcaaagagggctgaagcctttagctgcccaatcaattactactcaagaaccattaagcctgatgtcgcctacaagtattatccgacggtggttgaccttgctcaaaactcagacatcctcgtcgtcgcatgcccgttgaccgagcagaccagacacattgtggaccggcaggtcatggatgcattaggagctaagggcgtcctcataaacattggccgtggaccacatgttgatgagcaagagcttattaaagctctaacagaaggccgcctaggtggggctgcccttgatgtgtttgagcaggagcctcacgtgcccgaggagctctttggccttgagaatgtagttctcctccctcacgttgggagtggcactgtggaaacacggaatgccatggccgatcttgtcgtgggtaacttggaagcgcacttttctgggaaatcacttctgactccggtcgtctgagtcatgtgacacatttgggatttggtttcacttcatttgaaaggtttttatgttaacgaactcatgaaaagggtaatttctcttccaaaagaaagttgcactgtcgtatataaggaacggatttgaacac

SEQ ID NO: 37704 - protein, 329 aa, Arabidopsis thaliana
  peptide (1)..(329): Ceres Seq. ID no. 12466479
  misc_feature (20)..(114): Pfam Name: D-isomer specific 2-hydroxyacid dehydrogenase, Pfam Description: D-isomer specific 2-hydroxyacid dehydrogenase,
  misc_feature (22)..(328): Homolog of NCBI NO: 38345308 NR Description: OSJNBb0085F13.13 [Oryza sativa (japonica
  misc_feature (33)..(329): Homolog of NCBI NO: 22979887 NR Description: hypothetical protein [Ralstonia metallidurans]
  misc_feature (20)..(328): Homolog of NCBI NO: 33594414 NR Description: putative D-isomer specific 2-hydroxyacid
  misc_feature (20)..(328): Homolog of NCBI NO: 33600977 NR Description: putative D-isomer specific 2-hydroxyacid
  misc_feature (20)..(328): Homolog of NCBI NO: 33597133 NR Description: putative D-isomer specific 2-hydroxyacid
  misc_feature (18)..(328): Homolog of NCBI NO: 23011804 NR Description: hypothetical protein [Magnetospirillum
  misc_feature (22)..(328): Homolog of NCBI NO: 15222015 NR Description: hypothetical protein; protein id: At1g12550.1
  misc_feature (22)..(329): Homolog of NCBI NO: 15890302 NR Description: AGR_L_379p [Agrobacterium tumefaciens]
  misc_feature (17)..(329): Homolog of NCBI NO: 34904262 NR Description: putative Caulobacter crescentus D-isomer specific
  misc_feature (17)..(329): Homolog of NCBI NO: 15220005 NR Description: putative D-isomer specific 2-hydroxyacid
NHLQKKNKKKKQRKGDMESIGVLMMCPMSSYLENELEKRFNLLRFWTSPEKSVLLETHRNSIRAVVGNASAGADAQLISDLPNLEIVSSFSVGLDKIDLGKCKEKGIRVTNTPDVLTEDVADLAIGLILALLRRLCECDRYVRSGKWKQGEFQLTTKFSGKSVGIIGLGRIGTAIAKRAEAFSCPINYYSRTIKPDVAYKYYPTVVDLAQNSDILVVACPLTEQTRHIVDRQVMDALGAKGVLINIGRGPHVDEQELIKALTEGRLGGAALDVFEQEPHVPEELFGLENVVLLPHVGSGTVETRNAMADLVVGNLEAHFSGKSLLTPVV

SEQ ID NO: 37705 - protein, 313 aa, Arabidopsis thaliana
  peptide (1)..(313): Ceres Seq. ID no. 12466480
  misc_feature (4)..(98): Pfam Name: D-isomer specific 2-hydroxyacid dehydrogenase, Pfam Description: D-isomer specific 2-hydroxyacid dehydrogenase,
  misc_feature (6)..(312): Homolog of NCBI NO: 38345308 NR Description: OSJNBb0085F13.13 [Oryza sativa (japonica
  misc_feature (17)..(313): Homolog of NCBI NO: 22979887 NR Description: hypothetical protein [Ralstonia metallidurans]
  misc_feature (4)..(312): Homolog of NCBI NO: 33594414 NR Description: putative D-isomer specific 2-hydroxyacid
  misc_feature (4)..(312): Homolog of NCBI NO: 33600977 NR Description: putative D-isomer specific 2-hydroxyacid
  misc_feature (4)..(312): Homolog of NCBI NO: 33597133 NR Description: putative D-isomer specific 2-hydroxyacid
  misc_feature (2)..(312): Homolog of NCBI NO: 23011804 NR Description: hypothetical protein [Magnetospirillum
  misc_feature (6)..(312): Homolog of NCBI NO: 15222015 NR Description: hypothetical protein; protein id: At1g12550.1
  misc_feature (6)..(313): Homolog of NCBI NO: 15890302 NR Description: AGR_L_379p [Agrobacterium tumefaciens]
  misc_feature (1)..(313): Homolog of NCBI NO: 34904262 NR Description: putative Caulobacter crescentus D-isomer specific
  misc_feature (1)..(313): Homolog of NCBI NO: 15220005 NR Description: putative D-isomer specific 2-hydroxyacid
MESIGVLMMCPMSSYLENELEKRFNLLRFWTSPEKSVLLETHRNSIRAVVGNASAGADAQLISDLPNLEIVSSFSVGLDKIDLGKCKEKGIRVTNTPDVLTEDVADLAIGLILALLRRLCECDRYVRSGKWKQGEFQLTTKFSGKSVGIIGLGRIGTAIAKRAEAFSCPINYYSRTIKPDVAYKYYPTVVDLAQNSDILVVACPLTEQTRHIVDRQVMDALGAKGVLINIGRGPHVDEQELIKALTEGRLGGAALDVFEQEPHVPEELFGLENVVLLPHVGSGTVETRNAMADLVVGNLEAHFSGKSLLTPVV

SEQ ID NO: 37706 - protein, 306 aa, Arabidopsis thaliana
  peptide (1)..(306): Ceres Seq. ID no. 12466481
  misc_feature (1)..(91): Pfam Name: D-isomer specific 2-hydroxyacid dehydrogenase, Pfam Description: D-isomer specific 2-hydroxyacid dehydrogenase,
  misc_feature (1)..(305): Homolog of NCBI NO: 38345308 NR Description: OSJNBb0085F13.13 [Oryza sativa (japonica
  misc_feature (10)..(306): Homolog of NCBI NO: 22979887 NR Description: hypothetical protein [Ralstonia metallidurans]
  misc_feature (1)..(305): Homolog of NCBI NO: 33594414 NR Description: putative D-isomer specific 2-hydroxyacid
  misc_feature (1)..(305): Homolog of NCBI NO: 33600977 NR Description: putative D-isomer specific 2-hydroxyacid
  misc_feature (1)..(305): Homolog of NCBI NO: 33597133 NR Description: putative D-isomer specific 2-hydroxyacid
  misc_feature (1)..(305): Homolog of NCBI NO: 23011804 NR Description: hypothetical protein [Magnetospirillum
  misc_feature (1)..(305): Homolog of NCBI NO: 15222015 NR Description: hypothetical protein; protein id: At1g12550.1
  misc_feature (1)..(306): Homolog of NCBI NO: 15890302 NR Description: AGR_L_379p [Agrobacterium tumefaciens]
  misc_feature (1)..(306): Homolog of NCBI NO: 34904262 NR Description: putative Caulobacter crescentus D-isomer specific
  misc_feature (1)..(306): Homolog of NCBI NO: 15220005 NR Description: putative D-isomer specific 2-hydroxyacid
MMCPMSSYLENELEKRFNLLRFWTSPEKSVLLETHRNSIRAVVGNASAGADAQLISDLPNLEIVSSFSVGLDKIDLGKCKEKGIRVTNTPDVLTEDVADLAIGLILALLRRLCECDRYVRSGKWKQGEFQLTTKFSGKSVGIIGLGRIGTAIAKRAEAFSCPINYYSRTIKPDVAYKYYPTVVDLAQNSDILVVACPLTEQTRHIVDRQVMDALGAKGVLINIGRGPHVDEQELIKALTEGRLGGAALDVFEQEPHVPEELFGLENVVLLPHVGSGTVETRNAMADLVVGNLEAHFSGKSLLTPVV

SEQ ID NO: 37707 - DNA, 766 bp, Arabidopsis thaliana
  misc_feature (1)..(766): Ceres Seq. ID no. 13489647
  misc_feature: MA Experiment ID: 108461 Result: Down-regulated in Transcription
  misc_feature: MA Experiment 108461 PARAMETER Experiment Name: At_Germinating_Seeds_cDNA_P Parameter: Age (day) Value: 1 vs. 0
  misc_feature: MA Experiment 108461 PARAMETER Experiment Name: At_Germinating_Seeds_cDNA_P Parameter: Tissue Value: Germinating Seeds
  misc_feature: MA Experiment ID: 108462 Result: Down-regulated in Transcription
  misc_feature: MA Experiment 108462 PARAMETER Experiment Name: At_Germinating_Seeds_cDNA_P Parameter: Age (day) Value: 2 vs. 0
  misc_feature: MA Experiment 108462 PARAMETER Experiment Name: At_Germinating_Seeds_cDNA_P Parameter: Tissue Value: Germinating Seeds
  misc_feature: MA Experiment ID: 108463 Result: Down-regulated in Transcription
  misc_feature: MA Experiment 108463 PARAMETER Experiment Name: At_Germinating_Seeds_cDNA_P Parameter: Age (day) Value: 3 vs. 0
  misc_feature: MA Experiment 108463 PARAMETER Experiment Name: At_Germinating_Seeds_cDNA_P Parameter: Tissue Value: Germinating Seeds
  misc_feature: MA Experiment ID: 108464 Result: Down-regulated in Transcription
  misc_feature: MA Experiment 108464 PARAMETER Experiment Name: At_Germinating_Seeds_cDNA_P Parameter: Age (day) Value: 4 vs. 0
  misc_feature: MA Experiment 108464 PARAMETER Experiment Name: At_Germinating_Seeds_cDNA_P Parameter: Tissue Value: Germinating Seeds
  misc_feature: MA Experiment ID: 108573 Result: Up-regulated in Transcription
  misc_feature: MA Experiment 108573 PARAMETER Experiment Name: At_Drought_cDNA_P Parameter: Timepoint (hr) Value: 6
  misc_feature: MA Experiment 108573 PARAMETER Experiment Name: At_Drought_cDNA_P Parameter: Tissue Value: Aerial
  misc_feature: MA Experiment 108573 PARAMETER Experiment Name: At_Drought_cDNA_P Parameter: Treatment Value: Drought vs. No Drought
  misc_feature: MA Experiment ID: 108579 Result: Down-regulated in Transcription
  misc_feature: MA Experiment 108579 PARAMETER Experiment Name: At_4deg_Cold_cDNA_P Parameter: Temperature (deg C) Value: 4 vs. 22
  misc_feature: MA Experiment 108579 PARAMETER Experiment Name: At_4deg_Cold_cDNA_P Parameter: Timepoint (hr) Value: 6
  misc_feature: MA Experiment 108579 PARAMETER Experiment Name: At_4deg_Cold_cDNA_P Parameter: Tissue Value: Aerial
  misc_feature: MA Experiment ID: 108585 Result: Up-regulated in Transcription
  misc_feature: MA Experiment 108585 PARAMETER Experiment Name: At_5mM_NaNP_cDNA_P Parameter: Timepoint (hr) Value: 6
  misc_feature: MA Experiment 108585 PARAMETER Experiment Name: At_5mM_NaNP_cDNA_P Parameter: Tissue Value: Aerial
  misc_feature: MA Experiment 108585 PARAMETER Experiment Name: At_5mM_NaNP_cDNA_P Parameter: Treatment Value: null
  misc_feature: MA Experiment ID: 20000087 Result: Up-regulated in Transcription
  misc_feature: MA Experiment 20000087 PARAMETER Experiment Name: At_100uM_ABA_Mutants_cDNA_P Parameter: Plant Line Value: WS
  misc_feature: MA Experiment 20000087 PARAMETER Experiment Name: At_100uM_ABA_Mutants_cDNA_P Parameter: Timepoint (hr) Value: 6
  misc_feature: MA Experiment 20000087 PARAMETER Experiment Name: At_100uM_ABA_Mutants_cDNA_P Parameter: Tissue Value: Aerial
  misc_feature: MA Experiment 20000087 PARAMETER Experiment Name: At_100uM_ABA_Mutants_cDNA_P Parameter: Treatment Value: 100uM ABA vs. No Treatment
  misc_feature: MA Experiment ID: 20000111 Result: Down-regulated in Transcription
  misc_feature: MA Experiment 20000111 PARAMETER Experiment Name: At_42deg_Heat_cDNA_P Parameter: Temperature (deg C) Value: 42 vs. 22
  misc_feature: MA Experiment 20000111 PARAMETER Experiment Name: At_42deg_Heat_cDNA_P Parameter: Timepoint (hr) Value: 6
  misc_feature: MA Experiment 20000111 PARAMETER Experiment Name: At_42deg_Heat_cDNA_P Parameter: Tissue Value: Aerial
  misc_feature: MA Experiment ID: 20000224 Result: Down-regulated in Transcription
  misc_feature: MA Experiment ID: 20000437 Result: Up-regulated in Transcription
  misc_feature: MA Experiment 20000437 PARAMETER Experiment Name: At_Drought_P Parameter: Age (day) Value: 8
  misc_feature: MA Experiment 20000437 PARAMETER Experiment Name: At_Drought_P Parameter: Organism Value: A. thaliana
  misc_feature: MA Experiment 20000437 PARAMETER Experiment Name: At_Drought_P Parameter: Plant Line Value: WS
  misc_feature: MA Experiment 20000437 PARAMETER Experiment Name: At_Drought_P Parameter: Timepoint (hr) Value: 24
  misc_feature: MA Experiment 20000437 PARAMETER Experiment Name: At_Drought_P Parameter: Tissue Value: Whole Plant
  misc_feature: MA Experiment 20000437 PARAMETER Experiment Name: At_Drought_P Parameter: Treatment Value: Drought vs. No Drought
  misc_feature: MA Experiment ID: 20001905 Result: Up-regulated in Transcription
  misc_feature: MA Experiment 20001905 PARAMETER Experiment Name: At_Drought_Reproduction_P Parameter: Age (day) Value: 40
  misc_feature: MA Experiment 20001905 PARAMETER Experiment Name: At_Drought_Reproduction_P Parameter: Organism Value: A. thaliana
  misc_feature: MA Experiment 20001905 PARAMETER Experiment Name: At_Drought_Reproduction_P Parameter: Plant Line Value: WS
  misc_feature: MA Experiment 20001905 PARAMETER Experiment Name: At_Drought_Reproduction_P Parameter: Timepoint (day) Value: 10
  misc_feature: MA Experiment 20001905 PARAMETER Experiment Name: At_Drought_Reproduction_P Parameter: Tissue Value: Rosettes
  misc_feature: MA Experiment 20001905 PARAMETER Experiment Name: At_Drought_Reproduction_P Parameter: Treatment Value: Drought vs. No Drought
ctctgaaacttttgccttgcttgcttgcccagaaagtcgccgagaaagttaaaagtagaacggcggaggaaaaaaaaacgaagaggaagaggagagatggagtcgcagaagaagatagctcatgagatcggaggtatgaagaacgatgctcttcgctttggtcttcacggcgttaagagcgatatccttagatctcatcctctcgaaacggcttacgaatctgggaagcaatcacaagaagaaatgaagaggagagtgatcacgcatacttatggagctgctcttcctttgaagatggatcttgatagacaaatcctttctcggtttcagagacctcctggaccaattccttcatcaatgcttggccttgaagtctacacaggagctctagataattttggttttgaggattacttgaatgatcctcgcgaatccgagacgctgaaaccagtagactttcaccacgggatggaagttcggcttggtctctccaaaggcccagcttccccaagtttcatgtagtcaccaccatcaaagtatttccttcgtcaggtctcatatgctttttaatctgagtaagatcatgttatgaatttccaccagccctaaaagaatctacttgttgtttgatctcttctctatactgtgtctcctttgctctgaacatgataaaacatatgaactgtgtttcagttcttatctctctcagttcacaatttgttggacttgcttagttatttaaataagattatgctcctatttcatt

SEQ ID NO: 37708 - protein, 141 aa, Arabidopsis thaliana
  peptide (1)..(141): Ceres Seq. ID no. 13489648
  misc_feature (3)..(132): Pfam Name: Proteasome maturation factor UMP1 Pfam Description: Proteasome maturation factor UMP1
  misc_feature (16)..(131): Homolog of NCBI NO: 27691986 NR Description: similar to hypothetical protein HSPC014
  misc_feature (63)..(108): Homolog of NCBI NO: 15221634 NR Description: hypothetical protein [Arabidopsis thaliana]
  misc_feature (96)..(141): Homolog of NCBI NO: 2996128 NR Description: hypothetical protein [Picea mariana]
  misc_feature (96)..(141): Homolog of NCBI NO: 2996132 NR Description: hypothetical protein [Picea mariana]
  misc_feature (96)..(141): Homolog of NCBI NO: 2996130 NR Description: hypothetical protein [Picea mariana]
  misc_feature (95)..(141): Homolog of NCBI NO: 6049098 NR Description: unknown [Picea abies]
  misc_feature (4)..(141): Homolog of NCBI NO: 25493097 NR Description: hypothetical protein [imported] - Picea mariana
  misc_feature (1)..(141): Homolog of NCBI NO: 9828633 NR Description: F1N21.7 [Arabidopsis thaliana]
  misc_feature (1)..(141): Homolog of NCBI NO: 18408726 NR Description: expressed protein [Arabidopsis thaliana]
  misc_feature (1)..(141): Homolog of NCBI NO: 15240969 NR Description: expressed protein [Arabidopsis thaliana]
MESQKKIAHEIGGMKNDALRFGLHGVKSDILRSHPLETAYESGKQSQEEMKRRVITHTYGAALPLKMDLDRQILSRFQRPPGPIPSSMLGLEVYTGALDNFGFEDYLNDPRESETLKPVDFHHGMEVRLGLSKGPASPSFM

SEQ ID NO: 37709 - protein, 128 aa, Arabidopsis thaliana
  peptide (1)..(128): Ceres Seq. ID no. 13489649
  misc_feature (1)..(119): Pfam Name: Proteasome maturation factor UMP1 Pfam Description: Proteasome maturation factor UMP1
  misc_feature (3)..(118): Homolog of NCBI NO: 27691986 NR Description: similar to hypothetical protein HSPC014
  misc_feature (50)..(95): Homolog of NCBI NO: 15221634 NR Description: hypothetical protein [Arabidopsis thaliana]
  misc_feature (83)..(128): Homolog of NCBI NO: 2996128 NR Description: hypothetical protein [Picea mariana]
  misc_feature (83)..(128): Homolog of NCBI NO: 2996132 NR Description: hypothetical protein [Picea mariana]
  misc_feature (83)..(128): Homolog of NCBI NO: 2996130 NR Description: hypothetical protein [Picea mariana]
  misc_feature (82)..(128): Homolog of NCBI NO: 6049098 NR Description: unknown [Picea abies]
  misc_feature (1)..(128): Homolog of NCBI NO: 25493097 NR Description: hypothetical protein [imported] - Picea mariana
  misc_feature (1)..(128): Homolog of NCBI NO: 9828633 NR Description: F1N21.7 [Arabidopsis thaliana]
  misc_feature (1)..(128): Homolog of NCBI NO: 18408726 NR Description: expressed protein [Arabidopsis thaliana]
  misc_feature (1)..(128): Homolog of NCBI NO: 15240969 NR Description: expressed protein [Arabidopsis thaliana]
MKNDALRFGLHGVKSDILRSHPLETAYESGKQSQEEMKRRVITHTYGAALPLKMDLDRQILSRFQRPPGPIPSSMLGLEVYTGALDNFGFEDYLNDPRESETLKPVDFHHGMEVRLGLSKGPASPSFM

SEQ ID NO: 37710 - protein, 92 aa, Arabidopsis thaliana
  peptide (1)..(92): Ceres Seq. ID no. 13489650
  misc_feature (1)..(83): Pfam Name: Proteasome maturation factor UMP1 Pfam Description: Proteasome maturation factor UMP1
  misc_feature (1)..(82): Homolog of NCBI NO: 27691986 NR Description: similar to hypothetical protein HSPC014
  misc_feature (14)..(59): Homolog of NCBI NO: 15221634 NR Description: hypothetical protein [Arabidopsis thaliana]
  misc_feature (47)..(92): Homolog of NCBI NO: 2996128 NR Description: hypothetical protein [Picea mariana]
  misc_feature (47)..(92): Homolog of NCBI NO: 2996132 NR Description: hypothetical protein [Picea mariana]
  misc_feature (47)..(92): Homolog of NCBI NO: 2996130 NR Description: hypothetical protein [Picea mariana]
  misc_feature (46)..(92): Homolog of NCBI NO: 6049098 NR Description: unknown [Picea abies]
  misc_feature (1)..(92): Homolog of NCBI NO: 25493097 NR Description: hypothetical protein [imported] - Picea mariana
  misc_feature (1)..(92): Homolog of NCBI NO: 9828633 NR Description: F1N21.7 [Arabidopsis thaliana]
  misc_feature (1)..(92): Homolog of NCBI NO: 18408726 NR Description: expressed protein [Arabidopsis thaliana]
  misc_feature (1)..(92): Homolog of NCBI NO: 15240969 NR Description: expressed protein [Arabidopsis thaliana]
MKRRVITHTYGAALPLKMDLDRQILSRFQRPPGPIPSSMLGLEVYTGALDNFGFEDYLNDPRESETLKPVDFHHGMEVRLGLSKGPASPSFM

SEQ ID NO: 37711 - DNA, 1148 bp, Arabidopsis thaliana
  misc_feature (1)..(1148): Ceres Seq. ID no. 12577151
  misc_feature: MA Experiment ID: 108595 Result: Up-regulated in Transcription
  misc_feature: MA Experiment 108595 PARAMETER Experiment Name: At_Ler-pi_Ovule_cDNA_P Parameter: Plant Line Value: null
  misc_feature: MA Experiment ID: 20000184 Result: Down-regulated in Transcription
  misc_feature: MA Experiment 20000184 PARAMETER Experiment Name: At_Shoots__P Parameter: Age (day) Value: 7
  misc_feature: MA Experiment 20000184 PARAMETER Experiment Name: At_Shoots__P Parameter: Tissue Value: Shoots vs. Whole Plant
atcgtcgataaagcaaaaaatcaaatcaagcttcttcttcgatcttcttcttcgatcttcttcctctcgtcaggtttcgtgtggttcgttctaatcgcgttgtattctttctccaaggaagatggctctaaaggaacagctagataaattcaacaaacagcaagtgaaatgccaatctactctttcgagcattgcttcttccagagaaagaacgagttcttcgaggcagaatgtgcctttgcctgcggcaatcacgcagaagaagcctgatgcagctcctgtcaagttttcaagcgataccgagcgacttcagaacattaacaacattagaaaagctcctgttggagctcaaatcaagcgtgtcattgatcttctctatgagagaaggctagccttgacgccagagcaaataaatgaatggtgtcatgtagatatgcatgctaataaggctgtttttgatagtttaaggaagaatccgaaagcacattatgatggaagaaggttctcttataaggctacgcacgatgttaatgataagaaccagcttctttcattggtgagaaaataccttgatgggattgcggtggttgatctcaaagacgcttaccctaatgtaatggaggatttgaaggctctgagtgcttcaggggacatctacttgctatcaaattcacaagaggacattgcatacccaaatgatttcaagtgtgagattaaggttgatgacgaatttaaagctctattccgtgacataaacatcccgaacgacatgctggacgtggagaaggagctgctgaaaatcggtttgaagccggcgacaaacactgcagagaggagagctgctgcacagacgcatggcatatcgaataaaccaaaggataagaagaagaagaaacaagagatcagcaagagaaccaaactcaccaatgcccatcttcccgagcttttccagaaccttaacggcagcagttcccggaactgaacctcataaatggatgatcatgcggttctaaattcatattgagcctgaattttcttgtaattgtaataattgttacaatctttagtttacaaattacaatgattctcatgtattctcacgacatttgctagaaatatagaataaacacatttgggagttgggtctt

SEQ ID NO: 37712 - protein, 286 aa, Arabidopsis thaliana; identical to SEQ ID NO: 22985
  peptide (1)..(286): Ceres Seq. ID no. 12577152
  misc_feature (59)..(281): Homolog of NCBI NO: 19074285 NR Description: TRANSCRIPTION INITIATION FACTOR TFIIE BETA
  misc_feature (1)..(280): Homolog of NCBI NO: 37534050 NR Description: putative Transcription initiation factor IIE,
  misc_feature (1)..(276): Homolog of NCBI NO: 39545898 NR Description: TFIIE-beta 1 [Arabidopsis thaliana]
  misc_feature (1)..(278): Homolog of NCBI NO: 15233477 NR Description: putative protein; protein id: At4g21010.1
  misc_feature (1)..(286): Homolog of NCBI NO: 15235379 NR Description: putative protein

SEQ ID NO: 37713 - protein, 182 aa, Arabidopsis thaliana; identical to SEQ ID NO: 22986
  peptide (1)..(182): Ceres Seq. ID no. 12577153
  misc_feature (1)..(177): Homolog of NCBI NO: 19074285 NR Description: TRANSCRIPTION INITIATION FACTOR TFIIE BETA
  misc_feature (1)..(176): Homolog of NCBI NO: 37534050 NR Description: putative Transcription initiation factor IIE,
  misc_feature (1)..(172): Homolog of NCBI NO: 39545898 NR Description: TFIIE-beta 1 [Arabidopsis thaliana]
  misc_feature (1)..(174): Homolog of NCBI NO: 15233477 NR Description: putative protein; protein id: At4g21010.1
  misc_feature (1)..(182): Homolog of NCBI NO: 15235379 NR Description: putative protein

SEQ ID NO: 37714 - DNA, 1093 bp, Arabidopsis thaliana
  misc_feature (1)..(1093): Ceres Seq. ID no. 13509083
  misc_feature: MA Experiment ID: 108434 Result: Down-regulated in Transcription
  misc_feature: MA Experiment 108434 PARAMETER Experiment Name: At_Root_Tips_cDNA_P Parameter: Tissue Value: Root Tips
  misc_feature: MA Experiment ID: 108435 Result: Down-regulated in Transcription
  misc_feature: MA Experiment 108435 PARAMETER Experiment Name: At_stm_Mutants_cDNA_P Parameter: Plant Line Value: wt Landsburg vs stm
  misc_feature: MA Experiment 108435 PARAMETER Experiment Name: At_stm_Mutants_cDNA_P Parameter: Tissue Value: Shoot Apical Meristem Region
  misc_feature: MA Experiment ID: 108501 Result: Down-regulated in Transcription
  misc_feature: MA Experiment 108501 PARAMETER Experiment Name: At_ap2_floral_buds_cDNA_P Parameter: Plant Line Value: ap2 (Ler.)
  misc_feature: MA Experiment 108501 PARAMETER Experiment Name: At_ap2_floral_buds_cDNA_P Parameter: Tissue Value: Closed Flower
  misc_feature: MA Experiment ID: 108561 Result: Up-regulated in Transcription
  misc_feature: MA Experiment 108561 PARAMETER Experiment Name: At_100uM_ABA_cDNA_P Parameter: Timepoint (hr) Value: 6
  misc_feature: MA Experiment 108561 PARAMETER Experiment Name: At_100uM_ABA_cDNA_P Parameter: Tissue Value: Aerial
  misc_feature: MA Experiment 108561 PARAMETER Experiment Name: At_100uM_ABA_cDNA_P Parameter: Treatment Value: 100uM ABA vs. No Treatment
  misc_feature: MA Experiment ID: 108573 Result: Up-regulated in Transcription
  misc_feature: MA Experiment 108573 PARAMETER Experiment Name: At_Drought_cDNA_P Parameter: Timepoint (hr) Value: 6
  misc_feature: MA Experiment 108573 PARAMETER Experiment Name: At_Drought_cDNA_P Parameter: Tissue Value: Aerial
  misc_feature: MA Experiment 108573 PARAMETER Experiment Name: At_Drought_cDNA_P Parameter: Treatment Value: Drought vs. No Drought
  misc_feature: MA Experiment ID: 108585 Result: Up-regulated in Transcription
  misc_feature: MA Experiment 108585 PARAMETER Experiment Name: At_5mM_NaNP_cDNA_P Parameter: Timepoint (hr) Value: 6
  misc_feature: MA Experiment 108585 PARAMETER Experiment Name: At_5mM_NaNP_cDNA_P Parameter: Tissue Value: Aerial
  misc_feature: MA Experiment 108585 PARAMETER Experiment Name: At_5mM_NaNP_cDNA_P Parameter: Treatment Value: null
  misc_feature: MA Experiment ID: 108595 Result: Down-regulated in Transcription
  misc_feature: MA Experiment 108595 PARAMETER Experiment Name: At_Ler-pi_Ovule_cDNA_P Parameter: Plant Line Value: null
  misc_feature: MA Experiment ID: 20000069 Result: Up-regulated in Transcription
  misc_feature: MA Experiment 20000069 PARAMETER Experiment Name: At_100uM_ABA_Mutants_cDNA_P Parameter: Plant Line Value: CS23
  misc_feature: MA Experiment 20000069 PARAMETER Experiment Name: At_100uM_ABA_Mutants_cDNA_P Parameter: Timepoint (hr) Value: 6
  misc_feature: MA Experiment 20000069 PARAMETER Experiment Name: At_100uM_ABA_Mutants_cDNA_P Parameter: Tissue Value: Aerial
  misc_feature: MA Experiment 20000069 PARAMETER Experiment Name: At_100uM_ABA_Mutants_cDNA_P Parameter: Treatment Value: 100uM ABA vs. No Treatment
  misc_feature: MA Experiment ID: 20000070 Result: Up-regulated in Transcription
  misc_feature: MA Experiment 20000070 PARAMETER Experiment Name: At_100uM_ABA_Mutants_cDNA_P Parameter: Plant Line Value: CS24
  misc_feature: MA Experiment 20000070 PARAMETER Experiment Name: At_100uM_ABA_Mutants_cDNA_P Parameter: Timepoint (hr) Value: 6
  misc_feature: MA Experiment 20000070 PARAMETER Experiment Name: At_100uM_ABA_Mutants_cDNA_P Parameter: Tissue Value: Aerial
  misc_feature: MA Experiment 20000070 PARAMETER Experiment Name: At_100uM_ABA_Mutants_cDNA_P Parameter: Treatment Value: 100uM ABA vs. No Treatment
  misc_feature: MA Experiment ID: 20000071 Result: Up-regulated in Transcription
  misc_feature: MA Experiment 20000071 PARAMETER Experiment Name: At_100uM_ABA_Mutants_cDNA_P Parameter: Plant Line Value: CS8104
  misc_feature: MA Experiment 20000071 PARAMETER Experiment Name: At_100uM_ABA_Mutants_cDNA_P Parameter: Timepoint (hr) Value: 6
  misc_feature: MA Experiment 20000071 PARAMETER Experiment Name: At_100uM_ABA_Mutants_cDNA_P Parameter: Tissue Value: Aerial
  misc_feature: MA Experiment 20000071 PARAMETER Experiment Name: At_100uM_ABA_Mutants_cDNA_P Parameter: Treatment Value: 100uM ABA vs. No Treatment
  misc_feature: MA Experiment ID: 20000072 Result: Up-regulated in Transcription
  misc_feature: MA Experiment 20000072 PARAMETER Experiment Name: At_100uM_ABA_Mutants_cDNA_P Parameter: Plant Line Value: CS8105
  misc_feature: MA Experiment 20000072 PARAMETER Experiment Name: At_100uM_ABA_Mutants_cDNA_P Parameter: Timepoint (hr) Value: 6
  misc_feature: MA Experiment 20000072 PARAMETER Experiment Name: At_100uM_ABA_Mutants_cDNA_P Parameter: Tissue Value: Aerial
  misc_feature: MA Experiment 20000072 PARAMETER Experiment Name: At_100uM_ABA_Mutants_cDNA_P Parameter: Treatment Value: 100uM ABA vs. No Treatment
  misc_feature: MA Experiment ID: 20000086 Result: Up-regulated in Transcription
  misc_feature: MA Experiment 20000086 PARAMETER Experiment Name: At_100uM_ABA_Mutants_cDNA_P Parameter: Plant Line Value: CS22
  misc_feature: MA Experiment 20000086 PARAMETER Experiment Name: At_100uM_ABA_Mutants_cDNA_P Parameter: Timepoint (hr) Value: 6
  misc_feature: MA Experiment 20000086 PARAMETER Experiment Name: At_100uM_ABA_Mutants_cDNA_P Parameter: Tissue Value: Aerial
  misc_feature: MA Experiment 20000086 PARAMETER Experiment Name: At_100uM_ABA_Mutants_cDNA_P Parameter: Treatment Value: 100uM ABA vs. No Treatment
  misc_feature: MA Experiment ID: 20000087 Result: Up-regulated in Transcription
  misc_feature: MA Experiment 20000087 PARAMETER Experiment Name: At_100uM_ABA_Mutants_cDNA_P Parameter: Plant Line Value: WS
  misc_feature: MA Experiment 20000087 PARAMETER Experiment Name: At_100uM_ABA_Mutants_cDNA_P Parameter: Timepoint (hr) Value: 6
  misc_feature: MA Experiment 20000087 PARAMETER Experiment Name: At_100uM_ABA_Mutants_cDNA_P Parameter: Tissue Value: Aerial
  misc_feature: MA Experiment 20000087 PARAMETER Experiment Name: At_100uM_ABA_Mutants_cDNA_P Parameter: Treatment Value: 100uM ABA vs. No Treatment
  misc_feature: MA Experiment ID: 20000088 Result: Up-regulated in Transcription
  misc_feature: MA Experiment 20000088 PARAMETER Experiment Name: At_100uM_ABA_Mutants_cDNA_P Parameter: Plant Line Value: Landsberg
  misc_feature: MA Experiment 20000088 PARAMETER Experiment Name: At_100uM_ABA_Mutants_cDNA_P Parameter: Timepoint (hr) Value: 6
  misc_feature: MA Experiment 20000088 PARAMETER Experiment Name: At_100uM_ABA_Mutants_cDNA_P Parameter: Tissue Value: Aerial
  misc_feature: MA Experiment 20000088 PARAMETER Experiment Name: At_100uM_ABA_Mutants_cDNA_P Parameter: Treatment Value: 100uM ABA vs. No Treatment
  misc_feature: MA Experiment ID: 20000117 Result: Up-regulated in Transcription
  misc_feature: MA Experiment 20000117 PARAMETER Experiment Name: At_100uM_ABA_Mutants_cDNA_P Parameter: Plant Line Value: Columbia
  misc_feature: MA Experiment 20000117 PARAMETER Experiment Name: At_100uM_ABA_Mutants_cDNA_P Parameter: Timepoint (hr) Value: 6
  misc_feature: MA Experiment 20000117 PARAMETER Experiment Name: At_100uM_ABA_Mutants_cDNA_P Parameter: Tissue Value: Aerial
  misc_feature: MA Experiment 20000117 PARAMETER Experiment Name: At_100uM_ABA_Mutants_cDNA_P Parameter: Treatment Value: 100uM ABA vs. No Treatment
  misc_feature: MA Experiment ID: 20000169 Result: Up-regulated in Transcription
  misc_feature: MA Experiment 20000169 PARAMETER Experiment Name: At_100uM_ABA_P Parameter: Age (day) Value: 14
  misc_feature: MA Experiment 20000169 PARAMETER Experiment Name: At_100uM_ABA_P Parameter: Organism Value: A. thaliana
  misc_feature: MA Experiment 20000169 PARAMETER Experiment Name: At_100uM_ABA_P Parameter: Plant Line Value: WS
  misc_feature: MA Experiment 20000169 PARAMETER Experiment Name: At_100uM_ABA_P Parameter: Timepoint (hr) Value: 6
  misc_feature: MA Experiment 20000169 PARAMETER Experiment Name: At_100uM_ABA_P Parameter: Tissue Value: Aerial
  misc_feature: MA Experiment 20000169 PARAMETER Experiment Name: At_100uM_ABA_P Parameter: Treatment Value: 100uM ABA vs. No Treatment
  misc_feature: MA Experiment ID: 20000184 Result: Down-regulated in Transcription
  misc_feature: MA Experiment 20000184 PARAMETER Experiment Name: At_Shoots__P Parameter: Age (day) Value: 7
  misc_feature: MA Experiment 20000184 PARAMETER Experiment Name: At_Shoots__P Parameter: Tissue Value: Shoots vs. Whole Plant
  misc_feature: MA Experiment ID: 20000185 Result: Down-regulated in Transcription
  misc_feature: MA Experiment 20000185 PARAMETER Experiment Name: At_Roots__P Parameter: Age (day) Value: 7 vs. 21
  misc_feature: MA Experiment 20000185 PARAMETER Experiment Name: At_Roots__P Parameter: Organism Value: A. thaliana
  misc_feature: MA Experiment 20000185 PARAMETER Experiment Name: At_Roots__P Parameter: Tissue Value: Roots vs. Whole Plant
  misc_feature: MA Experiment ID: 20000234 Result: Down-regulated in Transcription
  misc_feature: MA Experiment 20000234 PARAMETER Experiment Name: At_Siliques_P Parameter: Age (day) Value: 21
  misc_feature: MA Experiment 20000234 PARAMETER Experiment Name: At_Siliques_P Parameter: Organism Value: A. thaliana
  misc_feature: MA Experiment 20000234 PARAMETER Experiment Name: At_Siliques_P Parameter: Plant Line Value: WS
  misc_feature: MA Experiment 20000234 PARAMETER Experiment Name: At_Siliques_P Parameter: Tissue Value: Less Than 5mm Siliques vs. Whole Plant
  misc_feature: MA Experiment ID: 20000235 Result: Down-regulated in Transcription
  misc_feature: MA Experiment 20000235 PARAMETER Experiment Name: At_Siliques_P Parameter: Age (day) Value: 21
  misc_feature: MA Experiment 20000235 PARAMETER Experiment Name: At_Siliques_P Parameter: Organism Value: A. thaliana
  misc_feature: MA Experiment 20000235 PARAMETER Experiment Name: At_Siliques_P Parameter: Plant Line Value: WS
  misc_feature: MA Experiment 20000235 PARAMETER Experiment Name: At_Siliques_P Parameter: Tissue Value: 5-10mm Siliques vs. Whole Plant
  misc_feature: MA Experiment ID: 20000439 Result: Down-regulated in Transcription
  misc_feature: MA Experiment 20000439 PARAMETER Experiment Name: At_Roots__P Parameter: Age (day) Value: 14 vs. 21
  misc_feature: MA Experiment 20000439 PARAMETER Experiment Name: At_Roots__P Parameter: Organism Value: A. thaliana
  misc_feature: MA Experiment 20000439 PARAMETER Experiment Name: At_Roots__P Parameter: Tissue Value: Roots vs. Whole Plant
  misc_feature: MA Experiment ID: 20000496 Result: Down-regulated in Transcription
  misc_feature: MA Experiment 20000496 PARAMETER Experiment Name: At_Guard_Cells_P Parameter: Harvest Date Value: 7/19/2002
  misc_feature: MA Experiment 20000496 PARAMETER Experiment Name: At_Guard_Cells_P Parameter: Organism Value: Canola
  misc_feature: MA Experiment 20000496 PARAMETER Experiment Name: At_Guard_Cells_P Parameter: Tissue Value: Guard Cells vs. Leaves
  misc_feature: MA Experiment ID: 20000794 Result: Up-regulated in Transcription
  misc_feature: MA Experiment 20000794 PARAMETER Experiment Name: At_Petals_P Parameter: Age (day) Value: 23-25 days
  misc_feature: MA Experiment 20000794 PARAMETER Experiment Name: At_Petals_P Parameter: Plant Line Value: WS
  misc_feature: MA Experiment 20000794 PARAMETER Experiment Name: At_Petals_P Parameter: Tissue Value: Petals vs. Whole plant
  misc_feature: MA Experiment ID: 20001557 Result: Down-regulated in Transcription
  misc_feature: MA Experiment 20001557 PARAMETER Experiment Name: At_Drought_Soil_Dry_P Parameter: Age (day) Value: 27
  misc_feature: MA Experiment 20001557 PARAMETER Experiment Name: At_Drought_Soil_Dry_P Parameter: Organism Value: A. thaliana
  misc_feature: MA Experiment 20001557 PARAMETER Experiment Name: At_Drought_Soil_Dry_P Parameter: Plant Line Value: WS
  misc_feature: MA Experiment 20001557 PARAMETER Experiment Name: At_Drought_Soil_Dry_P Parameter: Post Timepoint (hr) Value: 3
  misc_feature: MA Experiment 20001557 PARAMETER Experiment Name: At_Drought_Soil_Dry_P Parameter: Post-Treatment Value: Re-Water vs. No Drought
  misc_feature: MA Experiment 20001557 PARAMETER Experiment Name: At_Drought_Soil_Dry_P Parameter: Timepoint (day) Value: 13
  misc_feature: MA Experiment 20001557 PARAMETER Experiment Name: At_Drought_Soil_Dry_P Parameter: Treatment Value: Drought vs. No Drought
  misc_feature: MA Experiment ID: 20001558 Result: Down-regulated in Transcription
  misc_feature: MA Experiment 20001558 PARAMETER Experiment Name: At_Drought_Soil_Dry_P Parameter: Age (day) Value: 27
  misc_feature: MA Experiment 20001558 PARAMETER Experiment Name: At_Drought_Soil_Dry_P Parameter: Organism Value: A. thaliana
  misc_feature: MA Experiment 20001558 PARAMETER Experiment Name: At_Drought_Soil_Dry_P Parameter: Plant Line Value: WS
  misc_feature: MA Experiment 20001558 PARAMETER Experiment Name: At_Drought_Soil_Dry_P Parameter: Post Timepoint (hr) Value: 6
  misc_feature: MA Experiment 20001558 PARAMETER Experiment Name: At_Drought_Soil_Dry_P Parameter: Post-Treatment Value: Re-Water vs. No Drought
  misc_feature: MA Experiment 20001558 PARAMETER Experiment Name: At_Drought_Soil_Dry_P Parameter: Timepoint (day) Value: 13
  misc_feature: MA Experiment 20001558 PARAMETER Experiment Name: At_Drought_Soil_Dry_P Parameter: Treatment Value: Drought vs. No Drought
  misc_feature: MA Experiment ID: 20001757 Result: Down-regulated in Transcription
  misc_feature: MA Experiment 20001757 PARAMETER Experiment Name: At_50mM_NH4NO3_L-to-H_P Parameter: Timepoint (hr) Value: 6
  misc_feature: MA Experiment 20001757 PARAMETER Experiment Name: At_50mM_NH4NO3_L-to-H_P Parameter: Tissue Value: Leaf
  misc_feature: MA Experiment 20001757 PARAMETER Experiment Name: At_50mM_NH4NO3_L-to-H_P Parameter: Treatment Value: 50mM NH4NO3 vs 100mM Mannitol
gttagctgcgaaacaagatgctgttacagtcatagaagtcttatgcgtacacgactccgatttcaaaatctgaacggaatataaactctcgacgacgaaaatctcaaaatccccaaaatctcctccaactccgagttatggctacatgttccctcttaccaccaccgtctttttctccgcgccggcgattctgtagtttttctcacaatcgccggtctctaccttcaatattcagtttcaacaaagagcgtgtctcacgaagagtcttctgtagctccaaagagaacgatataaacagagatcggaatcagtctacaggaattcaagtctacggcgaaatcgagaggttattaacagagactgtaaaaaattctcagagtagctccggtggatcctctgattggtcagaagttgagggagcatgggtgctgaaaccaagaaactcgaaaccgaagatggtttgttcatttcattggcggtatatttgtcggtgcagcaccacagcttacttatcgattgtttctcgagagattagcggagaagagawgattttgttccaaaaccagaagaaacaagacgccttataagatcctactatggaayctctaggaatctgttgataaaattcgaggatgattcaatagatgaaacatcaatcctagctcaggtgcttggtgtggaatcatccataagctcaaagctagacatgtctatccgtacactgcccggagatcacggtctccctctgcaacaggctcttccggatgttccaccaggaatggcagaagcggtgaatcgaggaagtgagtttttagcgaatattgctgtcgggactccgagggaatctatggctaaagaggttggaggttcgctgggaatggactcgaagatccttcgtgctgacatgtccaaagatcttgcgcagctcgttgatgcaatcacttcttggatgatttcaaatatgggtccaaagcttctgagaccataatgttttctcatgtacacaaaacatacaaaaatctattaacacagggcgattgcatactatttaatgtaatgtaactgtatatattataacatgaagagtttggtc

SEQ ID NO: 37715 - protein, 149 aa, Arabidopsis thaliana
  peptide (1)..(149): Ceres Seq. ID no. 15222823
  misc_feature (8)..(111): Homolog of NCBI NO: 38347589 NR Description: OSJNBa0042I15.2 [Oryza sativa (japonica
  misc_feature (1)..(111): Homolog of NCBI NO: 15238825 NR Description: expressed protein [Arabidopsis thaliana]
  misc_feature (137)..(137): Xaa is any aa, unknown or other
MATCSLLPPPSFSPRRRFCSFSHNRRSLPSIFSFNKERVSRRVFCSSKENDINRDRNQSTGIQVYGEIERLLTETVKNSQSSSGGSSDWSEVEGAWVLKPRNSKPKMVCSFHWRYICRCSTTAYLSIVSREISGEEXILFQNQKKQDAL

SEQ ID NO: 37716 - protein, 93 aa, Arabidopsis thaliana
  peptide (1)..(93): Ceres Seq. ID no. 15222824
  misc_feature (1)..(18): Homolog of NCBI NO: 23039808 NR Description: hypothetical protein [Trichodesmium erythraeum
  misc_feature (1)..(16): Homolog of NCBI NO: 16329812 NR Description: hypothetical protein [Synechocystis sp. PCC 6803]
  misc_feature (1)..(16): Homolog of NCBI NO: 17228580 NR Description: hypothetical protein [Nostoc sp. PCC 7120]
  misc_feature (1)..(18): Homolog of NCBI NO: 22300018 NR Description: ORF_ID:tll2476~hypothetical protein
  misc_feature (1)..(80): Homolog of NCBI NO: 38569178 NR Description: OJ000315_02.20 [Oryza sativa (japonica
  misc_feature (1)..(92): Homolog of NCBI NO: 38347589 NR Description: OSJNBa0042I15.2 [Oryza sativa (japonica
  misc_feature (1)..(93): Homolog of NCBI NO: 15238825 NR Description: expressed protein [Arabidopsis thaliana]
MSIRTLPGDHGLPLQQALPDVPPGMAEAVNRGSEFLANIAVGTPRESMAKEVGGSLGMDSKILRADMSKDLAQLVDAITSWMISNMGPKLLRP

SEQ ID NO: 37717 - DNA, 864 bp, Arabidopsis thaliana
  misc_feature (1)..(864): Ceres Seq. ID no. 13509088
  misc_feature: MA Experiment ID: 20000185 Result: Down-regulated in Transcription
  misc_feature: MA Experiment 20000185 PARAMETER Experiment Name: At_Roots__P Parameter: Age (day) Value: 7 vs. 21
  misc_feature: MA Experiment 20000185 PARAMETER Experiment Name: At_Roots__P Parameter: Organism Value: A. thaliana
  misc_feature: MA Experiment 20000185 PARAMETER Experiment Name: At_Roots__P Parameter: Tissue Value: Roots vs. Whole Plant
  misc_feature: MA Experiment ID: 20000436 Result: Down-regulated in Transcription
  misc_feature: MA Experiment 20000436 PARAMETER Experiment Name: At_Drought_P Parameter: Age (day) Value: 7
  misc_feature: MA Experiment 20000436 PARAMETER Experiment Name: At_Drought_P Parameter: Organism Value: A. thaliana
  misc_feature: MA Experiment 20000436 PARAMETER Experiment Name: At_Drought_P Parameter: Plant Line Value: WS
  misc_feature: MA Experiment 20000436 PARAMETER Experiment Name: At_Drought_P Parameter: Timepoint (hr) Value: 12
  misc_feature: MA Experiment 20000436 PARAMETER Experiment Name: At_Drought_P Parameter: Tissue Value: Whole Plant
  misc_feature: MA Experiment 20000436 PARAMETER Experiment Name: At_Drought_P Parameter: Treatment Value: Drought vs. No Drought
  misc_feature: MA Experiment ID: 20000437 Result: Down-regulated in Transcription
  misc_feature: MA Experiment 20000437 PARAMETER Experiment Name: At_Drought_P Parameter: Age (day) Value: 8
  misc_feature: MA Experiment 20000437 PARAMETER Experiment Name: At_Drought_P Parameter: Organism Value: A. thaliana
  misc_feature: MA Experiment 20000437 PARAMETER Experiment Name: At_Drought_P Parameter: Plant Line Value: WS
  misc_feature: MA Experiment 20000437 PARAMETER Experiment Name: At_Drought_P Parameter: Timepoint (hr) Value: 24
  misc_feature: MA Experiment 20000437 PARAMETER Experiment Name: At_Drought_P Parameter: Tissue Value: Whole Plant
  misc_feature: MA Experiment 20000437 PARAMETER Experiment Name: At_Drought_P Parameter: Treatment Value: Drought vs. No Drought
  misc_feature: MA Experiment ID: 20000439 Result: Down-regulated in Transcription
  misc_feature: MA Experiment 20000439 PARAMETER Experiment Name: At_Roots__P Parameter: Age (day) Value: 14 vs. 21
  misc_feature: MA Experiment 20000439 PARAMETER Experiment Name: At_Roots__P Parameter: Organism Value: A. thaliana
  misc_feature: MA Experiment 20000439 PARAMETER Experiment Name: At_Roots__P Parameter: Tissue Value: Roots vs. Whole Plant
  misc_feature: MA Experiment ID: 20001757 Result: Up-regulated in Transcription
  misc_feature: MA Experiment 20001757 PARAMETER Experiment Name: At_50mM_NH4NO3_L-to-H_P Parameter: Timepoint (hr) Value: 6
  misc_feature: MA Experiment 20001757 PARAMETER Experiment Name: At_50mM_NH4NO3_L-to-H_P Parameter: Tissue Value: Leaf
  misc_feature: MA Experiment 20001757 PARAMETER Experiment Name: At_50mM_NH4NO3_L-to-H_P Parameter: Treatment Value: 50mM NH4NO3 vs 100mM Mannitol
  misc_feature: MA Experiment ID: 20001905 Result: Down-regulated in Transcription
  misc_feature: MA Experiment 20001905 PARAMETER Experiment Name: At_Drought_Reproduction_P Parameter: Age (day) Value: 40
  misc_feature: MA Experiment 20001905 PARAMETER Experiment Name: At_Drought_Reproduction_P Parameter: Organism Value: A. thaliana
  misc_feature: MA Experiment 20001905 PARAMETER Experiment Name: At_Drought_Reproduction_P Parameter: Plant Line Value: WS
  misc_feature: MA Experiment 20001905 PARAMETER Experiment Name: At_Drought_Reproduction_P Parameter: Timepoint (day) Value: 10
  misc_feature: MA Experiment 20001905 PARAMETER Experiment Name: At_Drought_Reproduction_P Parameter: Tissue Value: Rosettes
  misc_feature: MA Experiment 20001905 PARAMETER Experiment Name: At_Drought_Reproduction_P Parameter: Treatment Value: Drought vs. No Drought
  misc_feature: MA Experiment ID: 20001906 Result: Down-regulated in Transcription
  misc_feature: MA Experiment 20001906 PARAMETER Experiment Name: At_Drought_Reproduction_P Parameter: Age (day) Value: 35
  misc_feature: MA Experiment 20001906 PARAMETER Experiment Name: At_Drought_Reproduction_P Parameter: Organism Value: A. thaliana
  misc_feature: MA Experiment 20001906 PARAMETER Experiment Name: At_Drought_Reproduction_P Parameter: Plant Line Value: WS
  misc_feature: MA Experiment 20001906 PARAMETER Experiment Name: At_Drought_Reproduction_P Parameter: Timepoint (day) Value: 5
  misc_feature: MA Experiment 20001906 PARAMETER Experiment Name: At_Drought_Reproduction_P Parameter: Tissue Value: Siliques
  misc_feature: MA Experiment 20001906 PARAMETER Experiment Name: At_Drought_Reproduction_P Parameter: Treatment Value: Drought vs. No Drought
  misc_feature: MA Experiment ID: 20001911 Result: Down-regulated in Transcription
  misc_feature: MA Experiment 20001911 PARAMETER Experiment Name: At_Drought_Reproduction_P Parameter: Age (day) Value: 40
  misc_feature: MA Experiment 20001911 PARAMETER Experiment Name: At_Drought_Reproduction_P Parameter: Organism Value: A. thaliana
  misc_feature: MA Experiment 20001911 PARAMETER Experiment Name: At_Drought_Reproduction_P Parameter: Plant Line Value: WS
  misc_feature: MA Experiment 20001911 PARAMETER Experiment Name: At_Drought_Reproduction_P Parameter: Timepoint (day) Value: 10
  misc_feature: MA Experiment 20001911 PARAMETER Experiment Name: At_Drought_Reproduction_P Parameter: Tissue Value: Flowers
  misc_feature: MA Experiment 20001911 PARAMETER Experiment Name: At_Drought_Reproduction_P Parameter: Treatment Value: Drought vs. No Drought
tctgttgttgattcgcaaaggcgaagattatccatcttctcagttactcctactggaaccaaaagctcagaaccttaaaacatggagtctctatctcttcccgttctaaatcctctgttagcttctggttctaatctttttagaaaccagcactcgaggatgacctcttcaatggtatcttcacttaaatcccccattggaggcacatcgctctccactgttcgtcgctttggagtaggtgttgttaggatgcaagctgttgatgaagatattgatttgaagcaaatgagagacatagctgctgctaaaaagcgttgggatggtttgttaagggaaggaaaagtgaagcttcttacaccaagagaagcaggctatgctatttctctttcaaacaaacctctccttgatgttcgtccctctagcgagcgcaacaaggcatggattaaaggctccacttgggttcctatcttcgacaatgatgacaaccttgacgctggaactctttccaaaaaagtcactagttttgctatggggggatggtggagtggagcacctacactatcttttaataggtatgtctgcgagaggtatgagaatctgttctgggtacaaggtggtttagaatctgctcaagacgaggatctagtgacagaaggtgtccaacccttgaagcttgctggtattggaggtttttcagagttcctcggttggacagaccagcaaagagctcaagctgcgaaagaaggttgggggtaccgtttggtatatactgctcgtctgtttggagttgttctggctgctgatgctttgttcgttggggctcagcaactaggccattatattcaggagttaagaggccattag

SEQ ID NO: 37718 - protein, 260 aa, Arabidopsis thaliana
  peptide (1)..(260): Ceres Seq. ID no. 13509089
  misc_feature (1)..(260): Homolog of NCBI NO: 15233950 NR Description: expressed protein [Arabidopsis thaliana]
MESLSLPVLNPLLASGSNLFRNQHSRMTSSMVSSLKSPIGGTSLSTVRRFGVGVVRMQAVDEDIDLKQMRDIAAAKKRWDGLLREGKVKLLTPREAGYAISLSNKPLLDVRPSSERNKAWIKGSTWVPIFDNDDNLDAGTLSKKVTSFAMGGWWSGAPTLSFNRYVCERYENLFWVQGGLESAQDEDLVTEGVQPLKLAGIGGFSEFLGWTDQQRAQAAKEGWGYRLVYTARLFGVVLAADALFVGAQQLGHYIQELRGH

SEQ ID NO: 37719 - protein, 234 aa, Arabidopsis thaliana
  peptide (1)..(234): Ceres Seq. ID no. 13509090
  misc_feature (1)..(234): Homolog of NCBI NO: 15233950 NR Description: expressed protein [Arabidopsis thaliana]
MTSSMVSSLKSPIGGTSLSTVRRFGVGVVRMQAVDEDIDLKQMRDIAAAKKRWDGLLREGKVKLLTPREAGYAISLSNKPLLDVRPSSERNKAWIKGSTWVPIFDNDDNLDAGTLSKKVTSFAMGGWWSGAPTLSFNRYVCERYENLFWVQGGLESAQDEDLVTEGVQPLKLAGIGGFSEFLGWTDQQRAQAAKEGWGYRLVYTARLFGVVLAADALFVGAQQLGHYIQELRGH

SEQ ID NO: 37720 - protein, 230 aa, Arabidopsis thaliana
  peptide (1)..(230): Ceres Seq. ID no. 13509091
  misc_feature (1)..(230): Homolog of NCBI NO: 15233950 NR Description: expressed protein [Arabidopsis thaliana]
MVSSLKSPIGGTSLSTVRRFGVGVVRMQAVDEDIDLKQMRDIAAAKKRWDGLLREGKVKLLTPREAGYAISLSNKPLLDVRPSSERNKAWIKGSTWVPIFDNDDNLDAGTLSKKVTSFAMGGWWSGAPTLSFNRYVCERYENLFWVQGGLESAQDEDLVTEGVQPLKLAGIGGFSEFLGWTDQQRAQAAKEGWGYRLVYTARLFGVVLAADALFVGAQQLGHYIQELRGH

SEQ ID NO: 37721 - DNA, 1808 bp, Arabidopsis thaliana
  misc_feature (1)..(1808): Ceres Seq. ID no. 13509124
  misc_feature: MA Experiment ID: 20000315 Result: Down-regulated in Transcription
  misc_feature: MA Experiment 20000315 PARAMETER Experiment Name: At_14day_Shoots-Roots_Sub_P Parameter: Age (day) Value: 14
  misc_feature: MA Experiment 20000315 PARAMETER Experiment Name: At_14day_Shoots-Roots_Sub_P Parameter: Organism Value: A. thaliana
  misc_feature: MA Experiment 20000315 PARAMETER Experiment Name: At_14day_Shoots-Roots_Sub_P Parameter: Plant Line Value: WS
  misc_feature: MA Experiment 20000315 PARAMETER Experiment Name: At_14day_Shoots-Roots_Sub_P Parameter: Tissue Value: Shoots vs. Whole Plant
  misc_feature: MA Experiment ID: 20000327 Result: Down-regulated in Transcription
  misc_feature: MA Experiment 20000327 PARAMETER Experiment Name: At_42deg_Heat_Sub_P Parameter: Age (day) Value: 14
  misc_feature: MA Experiment 20000327 PARAMETER Experiment Name: At_42deg_Heat_Sub_P Parameter: Organism Value: A. thaliana
  misc_feature: MA Experiment 20000327 PARAMETER Experiment Name: At_42deg_Heat_Sub_P Parameter: Plant Line Value: WS
  misc_feature: MA Experiment 20000327 PARAMETER Experiment Name: At_42deg_Heat_Sub_P Parameter: Temperature (deg C) Value: 42 vs. 22
  misc_feature: MA Experiment 20000327 PARAMETER Experiment Name: At_42deg_Heat_Sub_P Parameter: Timepoint (hr) Value: 1
  misc_feature: MA Experiment 20000327 PARAMETER Experiment Name: At_42deg_Heat_Sub_P Parameter: Tissue Value: Aerial
  misc_feature: MA Experiment ID: 20000347 Result: Up-regulated in Transcription
  misc_feature: MA Experiment 20000347 PARAMETER Experiment Name: At_2mM_SA_Sub_P Parameter: Age (day) Value: 14
  misc_feature: MA Experiment 20000347 PARAMETER Experiment Name: At_2mM_SA_Sub_P Parameter: Organism Value: A. thaliana
  misc_feature: MA Experiment 20000347 PARAMETER Experiment Name: At_2mM_SA_Sub_P Parameter: Plant Line Value: WS
  misc_feature: MA Experiment 20000347 PARAMETER Experiment Name: At_2mM_SA_Sub_P Parameter: Timepoint (hr) Value: 6
  misc_feature: MA Experiment 20000347 PARAMETER Experiment Name: At_2mM_SA_Sub_P Parameter: Tissue Value: Aerial
  misc_feature: MA Experiment 20000347 PARAMETER Experiment Name: At_2mM_SA_Sub_P Parameter: Treatment Value: 2mM SA vs. No Treatment
aaaaaaattaatcttcttctacactccaaaaattcaagacctttcagagacaaaaacgtgaaacaacacaacttcgatgaaagccgccgttttccgtaacgaagacggagacgaggaggaggaagaagaagaagaagaagaagtctgtaatgttttcgacggcggcgaggtagagtctaagagaaacaacgaaaccaaaaacctcaaaggatttttcacttctttgcttttgatggaggagcacgagaagcaagaccaggaagctcgtaacgctgcttctcgccgtgaaatgtctgattttcaatctaattaccggaaaagagctagaactatgtccgattactactccgatctcaacgattactacgctgatgctgaggaaagtggagatatcaatctgaagaagtcacgcgtctcacgcgccgtcgcttccgttgctgttgctgctgcttcggagattgaggcggagagcagtgagataaccggatccggatcggttcgtggtaccggttcgggtcagcaaagacggttatgggttaaagatcggagcagagcttggtgggaagagtgtagccgattggattatccagaagaagatttcaaaaaagcgtttcgaatgtctaaatcaacgtttgagttaatctgcgatgagcttaattcagcggttgctaaagaagacaccgcgttaagaaacgcgattccagtgcgtcagcgagtcgcggtttgtatatggagattagccaccggtgagccacttcgtcttgtctccaagaagtttggtttaggaatctcaacttgtcacaagcttgttcttgaggtatgtaaagctattaaggacgttttaatgcctaagtatcttcaatggccagatgatgaatctcttagaaacattagagaacgtttcgaatcggtttcgggtattccaaacgttgttggctctatgtatactactcacattccgattatagctcctaagattagtgtagcctcttatttcaataagaggcatactgagaggaaccagaagacgtcgtattcgattacaattcaagccgttgtgaacccgaaaggtgtttttactgacttgtgcatcggatggcccgggtcaatgccggatgataaggtgttagagaagtcattgttgtatcaaagagctaacaatggaggtttgttgaaggggatgtgggttgctggtggaccgggtcatccgttgttggactgggttttggttccgtatacgcaacagaacttgacgtggacgcagcatgcgtttaatgagaagatgagcgaagtgcagggagtggctaaggaagcgtttgggaggttgaaagggcggtgggcgtgtctgcagaaacggactgaagtgaagctgcaggatttgcctaccgttttgggtgcttgttgtgtgcttcacaacatatgtgaaatgagagaggagaagatggagccagagctgatggttgaagtgattgatgatgaggttttgcctgaaaacgtattgagatcggttaatgcgatgaaggctagagatactatctcacataatctattgcatcacggcctcgcgggtacttctttcctataaaggataatggaaatgttcttttaatttccttctatatgataaactaaacttactttgattctttggtttatgcataatgtattattgtacctttagatcacagatgttatatgaggcaatagaagaaaattaaattatatacacatactatacatttatttccagtctcttttgatgagtgttagacatgaatgtataataagctcaatgagattttcattcg

SEQ ID NO: 37722 - protein, 502 aa, Arabidopsis thaliana
  peptide (1)..(502): Ceres Seq. ID no. 13509125
  misc_feature (161)..(448): Homolog of NCBI NO: 34908114 NR Description: P0031D11.14 [Oryza sativa (japonica
  misc_feature (173)..(488): Homolog of NCBI NO: 25553597 NR Description: OJ1656_E11.28 [Oryza sativa (japonica
  misc_feature (161)..(448): Homolog of NCBI NO: 18412695 NR Description: expressed protein [Arabidopsis thaliana]
  misc_feature (157)..(459): Homolog of NCBI NO: 15233248 NR Description: expressed protein [Arabidopsis thaliana]
  misc_feature (101)..(501): Homolog of NCBI NO: 34906342 NR Description: unnamed protein product [Oryza sativa (japonica
  misc_feature (6)..(502): Homolog of NCBI NO: 30688449 NR Description: expressed protein [Arabidopsis thaliana]
  misc_feature (6)..(502): Homolog of NCBI NO: 7452044 NR Description: hypothetical protein F27B13.20 - Arabidopsis
  misc_feature (6)..(502): Homolog of NCBI NO: 21592524 NR Description: unknown [Arabidopsis thaliana]
  misc_feature (29)..(501): Homolog of NCBI NO: 21902022 NR Description: B1097D05.23 [Oryza sativa (japonica
  misc_feature (1)..(502): Homolog of NCBI NO: 15239835 NR Description: expressed protein [Arabidopsis thaliana]
MKAAVFRNEDGDEEEEEEEEEEVCNVFDGGEVESKRNNETKNLKGFFTSLLLMEEHEKQDQEARNAASRREMSDFQSNYRKRARTMSDYYSDLNDYYADAEESGDINLKKSRVSRAVASVAVAAASEIEAESSEITGSGSVRGTGSGQQRRLWVKDRSRAWWEECSRLDYPEEDFKKAFRMSKSTFELICDELNSAVAKEDTALRNAIPVRQRVAVCIWRLATGEPLRLVSKKFGLGISTCHKLVLEVCKAIKDVLMPKYLQWPDDESLRNIRERFESVSGIPNVVGSMYTTHIPIIAPKISVASYFNKRHTERNQKTSYSITIQAVVNPKGVFTDLCIGWPGSMPDDKVLEKSLLYQRANNGGLLKGMWVAGGPGHPLLDWVLVPYTQQNLTWTQHAFNEKMSEVQGVAKEAFGRLKGRWACLQKRTEVKLQDLPTVLGACCVLHNICEMREEKMEPELMVEVIDDEVLPENVLRSVNAMKARDTISHNLLHHGLAGTSFL

SEQ ID NO: 37723 - protein, 450 aa, Arabidopsis thaliana
  peptide (1)..(450): Ceres Seq. ID no. 13509126
  misc_feature (109)..(396): Homolog of NCBI NO: 34908114 NR Description: P0031D11.14 [Oryza sativa (japonica
  misc_feature (121)..(436): Homolog of NCBI NO: 25553597 NR Description: OJ1656_E11.28 [Oryza sativa (japonica
  misc_feature (109)..(396): Homolog of NCBI NO: 18412695 NR Description: expressed protein [Arabidopsis thaliana]
  misc_feature (105)..(407): Homolog of NCBI NO: 15233248 NR Description: expressed protein [Arabidopsis thaliana]
  misc_feature (49)..(449): Homolog of NCBI NO: 34906342 NR Description: unnamed protein product [Oryza sativa (japonica
  misc_feature (1)..(450): Homolog of NCBI NO: 30688449 NR Description: expressed protein [Arabidopsis thaliana]
  misc_feature (1)..(450): Homolog of NCBI NO: 7452044 NR Description: hypothetical protein F27B13.20 - Arabidopsis
  misc_feature (1)..(450): Homolog of NCBI NO: 21592524 NR Description: unknown [Arabidopsis thaliana]
  misc_feature (1)..(449): Homolog of NCBI NO: 21902022 NR Description: B1097D05.23 [Oryza sativa (japonica
  misc_feature (1)..(450): Homolog of NCBI NO: 15239835 NR Description: expressed protein [Arabidopsis thaliana]
MEEHEKQDQEARNAASRREMSDFQSNYRKRARTMSDYYSDLNDYYADAEESGDINLKKSRVSRAVASVAVAAASEIEAESSEITGSGSVRGTGSGQQRRLWVKDRSRAWWEECSRLDYPEEDFKKAFRMSKSTFELICDELNSAVAKEDTALRNAIPVRQRVAVCIWRLATGEPLRLVSKKFGLGISTCHKLVLEVCKAIKDVLMPKYLQWPDDESLRNIRERFESVSGIPNVVGSMYTTHIPIIAPKISVASYFNKRHTERNQKTSYSITIQAVVNPKGVFTDLCIGWPGSMPDDKVLEKSLLYQRANNGGLLKGMWVAGGPGHPLLDWVLVPYTQQNLTWTQHAFNEKMSEVQGVAKEAFGRLKGRWACLQKRTEVKLQDLPTVLGACCVLHNICEMREEKMEPELMVEVIDDEVLPENVLRSVNAMKARDTISHNLLHHGLAGTSFL

SEQ ID NO: 37724 - protein, 431 aa, Arabidopsis thaliana
  peptide (1)..(431): Ceres Seq. ID no. 13509127
  misc_feature (90)..(377): Homolog of NCBI NO: 34908114 NR Description: P0031D11.14 [Oryza sativa (japonica
  misc_feature (102)..(417): Homolog of NCBI NO: 25553597 NR Description: OJ1656_E11.28 [Oryza sativa (japonica
  misc_feature (90)..(377): Homolog of NCBI NO: 18412695 NR Description: expressed protein [Arabidopsis thaliana]
  misc_feature (86)..(388): Homolog of NCBI NO: 15233248 NR Description: expressed protein [Arabidopsis thaliana]
  misc_feature (30)..(430): Homolog of NCBI NO: 34906342 NR Description: unnamed protein product [Oryza sativa (japonica
  misc_feature (1)..(431): Homolog of NCBI NO: 30688449 NR Description: expressed protein [Arabidopsis thaliana]
  misc_feature (1)..(431): Homolog of NCBI NO: 7452044 NR Description: hypothetical protein F27B13.20 - Arabidopsis
  misc_feature (1)..(431): Homolog of NCBI NO: 21592524 NR Description: unknown [Arabidopsis thaliana]
  misc_feature (1)..(430): Homolog of NCBI NO: 21902022 NR Description: B1097D05.23 [Oryza sativa (japonica
  misc_feature (1)..(431): Homolog of NCBI NO: 15239835 NR Description: expressed protein [Arabidopsis thaliana]
MSDFQSNYRKRARTMSDYYSDLNDYYADAEESGDINLKKSRVSRAVASVAVAAASEIEAESSEITGSGSVRGTGSGQQRRLWVKDRSRAWWEECSRLDYPEEDFKKAFRMSKSTFELICDELNSAVAKEDTALRNAIPVRQRVAVCIWRLATGEPLRLVSKKFGLGISTCHKLVLEVCKAIKDVLMPKYLQWPDDESLRNIRERFESVSGIPNVVGSMYTTHIPIIAPKISVASYFNKRHTERNQKTSYSITIQAVVNPKGVFTDLCIGWPGSMPDDKVLEKSLLYQRANNGGLLKGMWVAGGPGHPLLDWVLVPYTQQNLTWTQHAFNEKMSEVQGVAKEAFGRLKGRWACLQKRTEVKLQDLPTVLGACCVLHNICEMREEKMEPELMVEVIDDEVLPENVLRSVNAMKARDTISHNLLHHGLAGTSFL

SEQ ID NO: 37725 - DNA, 939 bp, Arabidopsis thaliana
  misc_feature (1)..(939): Ceres Seq. ID no. 12390589
  misc_feature: MA Experiment ID: 108434 Result: Down-regulated in Transcription
  misc_feature: MA Experiment 108434 PARAMETER Experiment Name: At_Root_Tips_cDNA_P Parameter: Tissue Value: Root Tips
  misc_feature: MA Experiment ID: 108435 Result: Down-regulated in Transcription
  misc_feature: MA Experiment 108435 PARAMETER Experiment Name: At_stm_Mutants_cDNA_P Parameter: Plant Line Value: wt Landsburg vs stm
  misc_feature: MA Experiment 108435 PARAMETER Experiment Name: At_stm_Mutants_cDNA_P Parameter: Tissue Value: Shoot Apical Meristem Region
  misc_feature: MA Experiment ID: 108462 Result: Up-regulated in Transcription
  misc_feature: MA Experiment 108462 PARAMETER Experiment Name: At_Germinating_Seeds_cDNA_P Parameter: Age (day) Value: 2 vs. 0
  misc_feature: MA Experiment 108462 PARAMETER Experiment Name: At_Germinating_Seeds_cDNA_P Parameter: Tissue Value: Germinating Seeds
  misc_feature: MA Experiment ID: 108463 Result: Up-regulated in Transcription
  misc_feature: MA Experiment 108463 PARAMETER Experiment Name: At_Germinating_Seeds_cDNA_P Parameter: Age (day) Value: 3 vs. 0
  misc_feature: MA Experiment 108463 PARAMETER Experiment Name: At_Germinating_Seeds_cDNA_P Parameter: Tissue Value: Germinating Seeds
  misc_feature: MA Experiment ID: 108464 Result: Up-regulated in Transcription
  misc_feature: MA Experiment 108464 PARAMETER Experiment Name: At_Germinating_Seeds_cDNA_P Parameter: Age (day) Value: 4 vs. 0
  misc_feature: MA Experiment 108464 PARAMETER Experiment Name: At_Germinating_Seeds_cDNA_P Parameter: Tissue Value: Germinating Seeds
  misc_feature: MA Experiment ID: 108573 Result: Up-regulated in Transcription
  misc_feature: MA Experiment 108573 PARAMETER Experiment Name: At_Drought_cDNA_P Parameter: Timepoint (hr) Value: 6
  misc_feature: MA Experiment 108573 PARAMETER Experiment Name: At_Drought_cDNA_P Parameter: Tissue Value: Aerial
  misc_feature: MA Experiment 108573 PARAMETER Experiment Name: At_Drought_cDNA_P Parameter: Treatment Value: Drought vs. No Drought
  misc_feature: MA Experiment ID: 108585 Result: Up-regulated in Transcription
  misc_feature: MA Experiment 108585 PARAMETER Experiment Name: At_5mM_NaNP_cDNA_P Parameter: Timepoint (hr) Value: 6
  misc_feature: MA Experiment 108585 PARAMETER Experiment Name: At_5mM_NaNP_cDNA_P Parameter: Tissue Value: Aerial
  misc_feature: MA Experiment 108585 PARAMETER Experiment Name: At_5mM_NaNP_cDNA_P Parameter: Treatment Value: null
  misc_feature: MA Experiment ID: 108595 Result: Down-regulated in Transcription
  misc_feature: MA Experiment 108595 PARAMETER Experiment Name: At_Ler-pi_Ovule_cDNA_P Parameter: Plant Line Value: null
  misc_feature: MA Experiment ID: 20000113 Result: Up-regulated in Transcription
  misc_feature: MA Experiment 20000113 PARAMETER Experiment Name: At_42deg_Heat_cDNA_P Parameter: Temperature (deg C) Value: 42 vs. 22
  misc_feature: MA Experiment 20000113 PARAMETER Experiment Name: At_42deg_Heat_cDNA_P Parameter: Timepoint (hr) Value: 8
  misc_feature: MA Experiment 20000113 PARAMETER Experiment Name: At_42deg_Heat_cDNA_P Parameter: Tissue Value: Aerial
  misc_feature: MA Experiment ID: 20000173 Result: Up-regulated in Transcription
  misc_feature: MA Experiment 20000173 PARAMETER Experiment Name: At_42deg_Heat_P Parameter: Age (day) Value: 14
  misc_feature: MA Experiment 20000173 PARAMETER Experiment Name: At_42deg_Heat_P Parameter: Organism Value: A. thaliana
  misc_feature: MA Experiment 20000173 PARAMETER Experiment Name: At_42deg_Heat_P Parameter: Plant Line Value: WS
  misc_feature: MA Experiment 20000173 PARAMETER Experiment Name: At_42deg_Heat_P Parameter: Temperature (deg C) Value: 42 vs. 22
  misc_feature: MA Experiment 20000173 PARAMETER Experiment Name: At_42deg_Heat_P Parameter: Timepoint (hr) Value: 6
  misc_feature: MA Experiment 20000173 PARAMETER Experiment Name: At_42deg_Heat_P Parameter: Tissue Value: Aerial
  misc_feature: MA Experiment ID: 20000179 Result: Up-regulated in Transcription
  misc_feature: MA Experiment 20000179 PARAMETER Experiment Name: At_Germinating_Seeds_P Parameter: Age (hr) Value: 6 vs. 0
  misc_feature: MA Experiment 20000179 PARAMETER Experiment Name: At_Germinating_Seeds_P Parameter: Tissue Value: Germinating Seeds
  misc_feature: MA Experiment ID: 20000180 Result: Up-regulated in Transcription
  misc_feature: MA Experiment 20000180 PARAMETER Experiment Name: At_Germinating_Seeds_P Parameter: Age (hr) Value: 24 vs. 0
  misc_feature: MA Experiment 20000180 PARAMETER Experiment Name: At_Germinating_Seeds_P Parameter: Tissue Value: Germinating Seeds
  misc_feature: MA Experiment ID: 20000184 Result: Up-regulated in Transcription
  misc_feature: MA Experiment 20000184 PARAMETER Experiment Name: At_Shoots__P Parameter: Age (day) Value: 7
  misc_feature: MA Experiment 20000184 PARAMETER Experiment Name: At_Shoots__P Parameter: Tissue Value: Shoots vs. Whole Plant
  misc_feature: MA Experiment ID: 20000185 Result: Down-regulated in Transcription
  misc_feature: MA Experiment 20000185 PARAMETER Experiment Name: At_Roots__P Parameter: Age (day) Value: 7 vs. 21
  misc_feature: MA Experiment 20000185 PARAMETER Experiment Name: At_Roots__P Parameter: Organism Value: A. thaliana
  misc_feature: MA Experiment 20000185 PARAMETER Experiment Name: At_Roots__P Parameter: Tissue Value: Roots vs. Whole Plant
  misc_feature: MA Experiment ID: 20000437 Result: Up-regulated in Transcription
  misc_feature: MA Experiment 20000437 PARAMETER Experiment Name: At_Drought_P Parameter: Age (day) Value: 8
  misc_feature: MA Experiment 20000437 PARAMETER Experiment Name: At_Drought_P Parameter: Organism Value: A. thaliana
  misc_feature: MA Experiment 20000437 PARAMETER Experiment Name: At_Drought_P Parameter: Plant Line Value: WS
  misc_feature: MA Experiment 20000437 PARAMETER Experiment Name: At_Drought_P Parameter: Timepoint (hr) Value: 24
  misc_feature: MA Experiment 20000437 PARAMETER Experiment Name: At_Drought_P Parameter: Tissue Value: Whole Plant
  misc_feature: MA Experiment 20000437 PARAMETER Experiment Name: At_Drought_P Parameter: Treatment Value: Drought vs. No Drought
  misc_feature: MA Experiment ID: 20000438 Result: Up-regulated in Transcription
  misc_feature: MA Experiment 20000438 PARAMETER Experiment Name: At_Shoots__P Parameter: Age (day) Value: 14
  misc_feature: MA Experiment 20000438 PARAMETER Experiment Name: At_Shoots__P Parameter: Tissue Value: Shoots vs. Whole Plant
  misc_feature: MA Experiment ID: 20000439 Result: Down-regulated in Transcription
  misc_feature: MA Experiment 20000439 PARAMETER Experiment Name: At_Roots__P Parameter: Age (day) Value: 14 vs. 21
  misc_feature: MA Experiment 20000439 PARAMETER Experiment Name: At_Roots__P Parameter: Organism Value: A. thaliana
  misc_feature: MA Experiment 20000439 PARAMETER Experiment Name: At_Roots__P Parameter: Tissue Value: Roots vs. Whole Plant
  misc_feature: MA Experiment ID: 20001248 Result: Down-regulated in Transcription
  misc_feature: MA Experiment 20001248 PARAMETER Experiment Name: At_Far-red-induction_P Parameter: Age (day) Value: 7
  misc_feature: MA Experiment 20001248 PARAMETER Experiment Name: At_Far-red-induction_P Parameter: Light Value: Far-red vs. White
  misc_feature: MA Experiment 20001248 PARAMETER Experiment Name: At_Far-red-induction_P Parameter: Organism Value: A. thaliana
  misc_feature: MA Experiment 20001248 PARAMETER Experiment Name: At_Far-red-induction_P Parameter: Plant Line Value: Columbia
  misc_feature: MA Experiment 20001248 PARAMETER Experiment Name: At_Far-red-induction_P Parameter: Timepoint (hr) Value: 4
  misc_feature: MA Experiment 20001248 PARAMETER Experiment Name: At_Far-red-induction_P Parameter: Tissue Value: Whole Plant
  misc_feature: MA Experiment ID: 20001905 Result: Up-regulated in Transcription
  misc_feature: MA Experiment 20001905 PARAMETER Experiment Name: At_Drought_Reproduction_P Parameter: Age (day) Value: 40
  misc_feature: MA Experiment 20001905 PARAMETER Experiment Name: At_Drought_Reproduction_P Parameter: Organism Value: A. thaliana
  misc_feature: MA Experiment 20001905 PARAMETER Experiment Name: At_Drought_Reproduction_P Parameter: Plant Line Value: WS
  misc_feature: MA Experiment 20001905 PARAMETER Experiment Name: At_Drought_Reproduction_P Parameter: Timepoint (day) Value: 10
  misc_feature: MA Experiment 20001905 PARAMETER Experiment Name: At_Drought_Reproduction_P Parameter: Tissue Value: Rosettes
  misc_feature: MA Experiment 20001905 PARAMETER Experiment Name: At_Drought_Reproduction_P Parameter: Treatment Value: Drought vs. No Drought
ataacaaaccagggtcagggttttatcttccatattcttttcccactgattcttacaatcgatctaagggaatctacgaactgtttggtaatttctggtgggaaaagtcttgatcttgctgtttggtttggagtaatggtgagtgcttggtttgttgttggctcaccggtgatggactcttcgagcagtccatgtttatgtctggatgctcacacgacgggtaccatcaggaggaagaagatccttggcaaagcaagaaatctggaattaggaagctctttcactggctcacgcattgtttttaggctttctccgaagcgtgtatcgagaattgcgaatcgaaagagcaaaaagctcttgattgtgaatgaggatgttgctggtaattacgacgataccttcggtgatgtacaaaagcaaattgttaattattttacatacaaagctgtgaggacggttcttcatcagctgtacgaaatgaatcctcctcaatacacttggttctataatcatatcataacaaacagaccgacggatggcaaacgtttcctccgtgccctcggcaaggagagtcaggagcttgcagaaagagtgatgatcacgcgtcttcacttgtatggcaaatggatcaagaaatgcgaccatgggaagatataccaggaaatatcggatgaaaacttggcgttgatgcgtgaacgcctgatggagaccgtgatatggccttccgatgacacaaactcaaggtaataggctgaagaagacagcgcacaccacagcacaacatttgctttgtcaatttgcttctcagtttttaggacttcgagttttttagtttgattacatattactatagtgaaagagcagtgtgtatatgatgtctattcttggcatgtactatatgatattaggggcaaaaaacaacacccttcttgtgctcct

SEQ ID NO: 37726 - protein, 248 aa, Arabidopsis thaliana
  peptide (1)..(248): Ceres Seq. ID no. 12390590
  misc_feature (139)..(205): Pfam Name: RbcX protein Pfam Description: RbcX protein
  misc_feature (136)..(205): Homolog of NCBI NO: 2463298 NR Description: putative [Nostoc commune]
  misc_feature (136)..(205): Homolog of NCBI NO: 541323 NR Description: hypothetical 15.2K protein - Anabaena sp
  misc_feature (136)..(205): Homolog of NCBI NO: 2126547 NR Description: rbcX protein - Anabaena sp
  misc_feature (136)..(205): Homolog of NCBI NO: 2463391 NR Description: putative [Planktothrix rubescens]
  misc_feature (136)..(205): Homolog of NCBI NO: 2463339 NR Description: putative [Planktothrix agardhii]
  misc_feature (139)..(205): Homolog of NCBI NO: 22299048 NR Description: ORF_ID:tll1505~hypothetical protein
  misc_feature (136)..(205): Homolog of NCBI NO: 23040626 NR Description: hypothetical protein [Trichodesmium erythraeum
  misc_feature (106)..(247): Homolog of NCBI NO: 33146778 NR Description: unknown protein [Oryza sativa (japonica
  misc_feature (83)..(247): Homolog of NCBI NO: 30103018 NR Description: unknown protein [Oryza sativa (japonica
  misc_feature (46)..(248): Homolog of NCBI NO: 18420050 NR Description: Expressed protein
ITNQGQGFIFHILFPLILTIDLRESTNCLVISGGKSLDLAVWFGVMVSAWFVVGSPVMDSSSSPCLCLDAHTTGTIRRKKILGKARNLELGSSFTGSRIVFRLSPKRVSRIANRKSKKLLIVNEDVAGNYDDTFGDVQKQIVNYFTYKAVRTVLHQLYEMNPPQYTWFYNHIITNRPTDGKRFLRALGKESQELAERVMITRLHLYGKWIKKCDHGKIYQEISDENLALMRERLMETVIWPSDDTNSR

SEQ ID NO: 37727 - protein, 203 aa, Arabidopsis thaliana
  peptide (1)..(203): Ceres Seq. ID no. 12390591
  misc_feature (94)..(160): Pfam Name: RbcX protein Pfam Description: RbcX protein
  misc_feature (91)..(160): Homolog of NCBI NO: 2463298 NR Description: putative [Nostoc commune]
  misc_feature (91)..(160): Homolog of NCBI NO: 541323 NR Description: hypothetical 15.2K protein - Anabaena sp
  misc_feature (91)..(160): Homolog of NCBI NO: 2126547 NR Description: rbcX protein - Anabaena sp
  misc_feature (91)..(160): Homolog of NCBI NO: 2463391 NR Description: putative [Planktothrix rubescens]
  misc_feature (91)..(160): Homolog of NCBI NO: 2463339 NR Description: putative [Planktothrix agardhii]
  misc_feature (94)..(160): Homolog of NCBI NO: 22299048 NR Description: ORF_ID:tll1505~hypothetical protein
  misc_feature (91)..(160): Homolog of NCBI NO: 23040626 NR Description: hypothetical protein [Trichodesmium erythraeum
  misc_feature (61)..(202): Homolog of NCBI NO: 33146778 NR Description: unknown protein [Oryza sativa (japonica
  misc_feature (38)..(202): Homolog of NCBI NO: 30103018 NR Description: unknown protein [Oryza sativa (japonica
  misc_feature (1)..(203): Homolog of NCBI NO: 18420050 NR Description: Expressed protein
MVSAWFVVGSPVMDSSSSPCLCLDAHTTGTIRRKKILGKARNLELGSSFTGSRIVFRLSPKRVSRIANRKSKKLLIVNEDVAGNYDDTFGDVQKQIVNYFTYKAVRTVLHQLYEMNPPQYTWFYNHIITNRPTDGKRFLRALGKESQELAERVMITRLHLYGKWIKKCDHGKIYQEISDENLALMRERLMETVIWPSDDTNSR

SEQ ID NO: 37728 - protein, 191 aa, Arabidopsis thaliana
  peptide (1)..(191): Ceres Seq. ID no. 12390592
  misc_feature (82)..(148): Pfam Name: RbcX protein Pfam Description: RbcX protein
  misc_feature (79)..(148): Homolog of NCBI NO: 2463319 NR Description: putative [Nostoc sp.]
  misc_feature (79)..(148): Homolog of NCBI NO: 541323 NR Description: hypothetical 15.2K protein - Anabaena sp
  misc_feature (79)..(148): Homolog of NCBI NO: 2126547 NR Description: rbcX protein - Anabaena sp
  misc_feature (79)..(148): Homolog of NCBI NO: 2463391 NR Description: putative [Planktothrix rubescens]
  misc_feature (79)..(148): Homolog of NCBI NO: 2463339 NR Description: putative [Planktothrix agardhii]
  misc_feature (82)..(148): Homolog of NCBI NO: 22299048 NR Description: ORF_ID:tll1505~hypothetical protein
  misc_feature (79)..(148): Homolog of NCBI NO: 23040626 NR Description: hypothetical protein [Trichodesmium erythraeum
  misc_feature (49)..(190): Homolog of NCBI NO: 33146778 NR Description: unknown protein [Oryza sativa (japonica
  misc_feature (26)..(190): Homolog of NCBI NO: 30103018 NR Description: unknown protein [Oryza sativa (japonica
  misc_feature (1)..(191): Homolog of NCBI NO: 18420050 NR Description: Expressed protein
MDSSSSPCLCLDAHTTGTIRRKKILGKARNLELGSSFTGSRIVFRLSPKRVSRIANRKSKKLLIVNEDVAGNYDDTFGDVQKQIVNYFTYKAVRTVLHQLYEMNPPQYTWFYNHIITNRPTDGKRFLRALGKESQELAERVMITRLHLYGKWIKKCDHGKIYQEISDENLALMRERLMETVIWPSDDTNSR

SEQ ID NO: 37729 - DNA, 1413 bp, Arabidopsis thaliana
  misc_feature (1)..(1413): Ceres Seq. ID no. 13509128
  misc_feature: MA Experiment ID: 20000173 Result: Down-regulated in Transcription
  misc_feature: MA Experiment 20000173 PARAMETER Experiment Name: At_42deg_Heat_P Parameter: Age (day) Value: 14
  misc_feature: MA Experiment 20000173 PARAMETER Experiment Name: At_42deg_Heat_P Parameter: Organism Value: A. thaliana
  misc_feature: MA Experiment 20000173 PARAMETER Experiment Name: At_42deg_Heat_P Parameter: Plant Line Value: WS
  misc_feature: MA Experiment 20000173 PARAMETER Experiment Name: At_42deg_Heat_P Parameter: Temperature (deg C) Value: 42 vs. 22
  misc_feature: MA Experiment 20000173 PARAMETER Experiment Name: At_42deg_Heat_P Parameter: Timepoint (hr) Value: 6
  misc_feature: MA Experiment 20000173 PARAMETER Experiment Name: At_42deg_Heat_P Parameter: Tissue Value: Aerial
  misc_feature: MA Experiment ID: 20000437 Result: Down-regulated in Transcription
  misc_feature: MA Experiment 20000437 PARAMETER Experiment Name: At_Drought_P Parameter: Age (day) Value: 8
  misc_feature: MA Experiment 20000437 PARAMETER Experiment Name: At_Drought_P Parameter: Organism Value: A. thaliana
  misc_feature: MA Experiment 20000437 PARAMETER Experiment Name: At_Drought_P Parameter: Plant Line Value: WS
  misc_feature: MA Experiment 20000437 PARAMETER Experiment Name: At_Drought_P Parameter: Timepoint (hr) Value: 24
  misc_feature: MA Experiment 20000437 PARAMETER Experiment Name: At_Drought_P Parameter: Tissue Value: Whole Plant
  misc_feature: MA Experiment 20000437 PARAMETER Experiment Name: At_Drought_P Parameter: Treatment Value: Drought vs. No Drought
  misc_feature: MA Experiment ID: 20001451 Result: Down-regulated in Transcription
  misc_feature: MA Experiment 20001451 PARAMETER Experiment Name: At_Far-red-induction_P Parameter: Age (day) Value: 7
  misc_feature: MA Experiment 20001451 PARAMETER Experiment Name: At_Far-red-induction_P Parameter: Light Value: Far-red vs. White
  misc_feature: MA Experiment 20001451 PARAMETER Experiment Name: At_Far-red-induction_P Parameter: Organism Value: A. thaliana
  misc_feature: MA Experiment 20001451 PARAMETER Experiment Name: At_Far-red-induction_P Parameter: Plant Line Value: Columbia
  misc_feature: MA Experiment 20001451 PARAMETER Experiment Name: At_Far-red-induction_P Parameter: Timepoint (hr) Value: 24
  misc_feature: MA Experiment 20001451 PARAMETER Experiment Name: At_Far-red-induction_P Parameter: Tissue Value: Whole Plant
gcagtgtgttttcttacagcgaagagccccaaagagaagaacaaaatttcgaaaatagagaaagagaagaagttgacgatggattcaaaggcgaagcagatgattctttcagctctctgcaaacacttctctttggatcctgaaccttttgtgggcggagcgggtgaaagtgatatcaagacactttattctaatgtattgaaggcatctggaaaggaagtatctgcacaaaacaacgatgttttgaagtggctagattttgcggaaggtttctcttcagattcaaaggattggttttcagctcttgaaaagttgaatttagagttagctaccaagtcagtgctcttgggaaacggattgacgccatcggcagctgatgttgctgtgttttcagctctgcattcttcagtgcttggcctctcagattcagacaaggagaaagtaccacatgtcataagatgggtgaattacatccagaataaagaagagttgtcgacattatttgcaccaatacctgtgaagctaccagaatttagcttcgaggtaccaaaacctgccattaaggtggaaacaaattctaattcaaaaaaagctgcagaaggtgtaaagcctgttgacaagccagatgtgcagccgcagctgggcacaaagaaaactgagccagaggaaccaaagaaaaatgcagcaaaagagaaggatgccaaaaaggaaaagaagaagcctgctgaaccagaaccagctaagaaagaggcagagcttagtgtcagtttgcttaacattcaggttggtctaattcgtaaagcatggaagcacccatcggcggatagtttgctggtggaagaaatagatgtcggggaggataaagtgagacaagtagttagtggcttagcaaagttctgcagtcctgaggatctaacgaaccgcctcgttgcactcatcacaaatgtcaaacctggaaagctaagagatgtaatgtcacaaggactggttctttgtgcttcaagtgaagatcactcggtggtagagccgttgctaccacctgctggtgctaaaccaggagagcgtgtttcattttcagggattgaaggaaagccagaagatgtactgaacccaaaaaagaagcaactagagaagataacaccgggtctctacactgatgaaaatggcgtagccacatacaaaggcatacaattcatgacctcggctggaccttgcacttccagcatccccaaggcgaccatcaagtagtaaactcagttgatacttctctcctctactctagcgtttttctttgatattcgcaaactcagttggaaaaagaaaagatgttctttttgtcacaattcgaattaatctaaaaactttcttcttattagctttttgacaaacatcattgtttcaatttccgttttg

SEQ ID NO: 37730 - protein, 415 aa, Arabidopsis thaliana
  peptide (1)..(415): Ceres Seq. ID no. 13509129
  misc_feature (260)..(355): Pfam Name: Putative tRNA binding domain Pfam Description: Putative tRNA binding domain
  misc_feature (222)..(405): Homolog of NCBI NO: 34860578 NR Description: endothelial monocyte activating polypeptide 2
  misc_feature (215)..(405): Homolog of NCBI NO: 1082350 NR Description: endothelial monocyte-activating protein II
  misc_feature (175)..(405): Homolog of NCBI NO: 26352830 NR Description: unnamed protein product [Mus musculus]
  misc_feature (211)..(415): Homolog of NCBI NO: 12230649 NR Description: Probable methionyl-tRNA synthetase
  misc_feature (161)..(410): Homolog of NCBI NO: 28302254 NR Description: Similar to small inducible cytokine subfamily E,
  misc_feature (227)..(415): Homolog of NCBI NO: 15236350 NR Description: methionyl-tRNA synthetase - like protein
  misc_feature (81)..(394): Homolog of NCBI NO: 19115568 NR Description: putative Cofactor for methionyl-and glutamyl-tRNA and G4 quadruplex nucleic acid binding protein by similarity to
  misc_feature (188)..(415): Homolog of NCBI NO: 34907808 NR Description: similar to methionyl-tRNA synthetase
  misc_feature (27)..(415): Homolog of NCBI NO: 18405465 NR Description: methionyl-tRNA synthetase -related [Arabidopsis
  misc_feature (1)..(415): Homolog of NCBI NO: 25408718 NR Description: probable methionyl-tRNA synthetase
AVCFLTAKSPKEKNKISKIEKEKKLTMDSKAKQMILSALCKHFSLDPEPFVGGAGESDIKTLYSNVLKASGKEVSAQNNDVLKWLDFAEGFSSDSKDWFSALEKLNLELATKSVLLGNGLTPSAADVAVFSALHSSVLGLSDSDKEKVPHVIRWVNYIQNKEELSTLFAPIPVKLPEFSFEVPKPAIKVETNSNSKKAAEGVKPVDKPDVQPQLGTKKTEPEEPKKNAAKEKDAKKEKKKPAEPEPAKKEAELSVSLLNIQVGLIRKAWKHPSADSLLVEEIDVGEDKVRQVVSGLAKFCSPEDLTNRLVALITNVKPGKLRDVMSQGLVLCASSEDHSVVEPLLPPAGAKPGERVSFSGIEGKPEDVLNPKKKQLEKITPGLYTDENGVATYKGIQFMTSAGPCTSSIPKATIK

SEQ ID NO: 37731 - protein, 389 aa, Arabidopsis thaliana
  peptide (1)..(389): Ceres Seq. ID no. 13509130
  misc_feature (234)..(329): Pfam Name: Putative tRNA binding domain Pfam Description: Putative tRNA binding domain
  misc_feature (196)..(379): Homolog of NCBI NO: 34860578 NR Description: endothelial monocyte activating polypeptide 2
  misc_feature (189)..(379): Homolog of NCBI NO: 1082350 NR Description: endothelial monocyte-activating protein II
  misc_feature (149)..(379): Homolog of NCBI NO: 26352830 NR Description: unnamed protein product [Mus musculus]
  misc_feature (185)..(389): Homolog of NCBI NO: 12230649 NR Description: Probable methionyl-tRNA synthetase
  misc_feature (135)..(384): Homolog of NCBI NO: 28302254 NR Description: Similar to small inducible cytokine subfamily E,
  misc_feature (201)..(389): Homolog of NCBI NO: 15236350 NR Description: methionyl-tRNA synthetase - like protein
  misc_feature (55)..(368): Homolog of NCBI NO: 19115568 NR Description: putative Cofactor for methionyl-and glutamyl-tRNA and G4 quadruplex nucleic acid binding protein by similarity to
  misc_feature (162)..(389): Homolog of NCBI NO: 34907808 NR Description: similar to methionyl-tRNA synthetase
  misc_feature (1)..(389): Homolog of NCBI NO: 18405465 NR Description: methionyl-tRNA synthetase -related [Arabidopsis
  misc_feature (1)..(389): Homolog of NCBI NO: 25408718 NR Description: probable methionyl-tRNA synthetase
MDSKAKQMILSALCKHFSLDPEPFVGGAGESDIKTLYSNVLKASGKEVSAQNNDVLKWLDFAEGFSSDSKDWFSALEKLNLELATKSVLLGNGLTPSAADVAVFSALHSSVLGLSDSDKEKVPHVIRWVNYIQNKEELSTLFAPIPVKLPEFSFEVPKPAIKVETNSNSKKAAEGVKPVDKPDVQPQLGTKKTEPEEPKKNAAKEKDAKKEKKKPAEPEPAKKEAELSVSLLNIQVGLIRKAWKHPSADSLLVEEIDVGEDKVRQVVSGLAKFCSPEDLTNRLVALITNVKPGKLRDVMSQGLVLCASSEDHSVVEPLLPPAGAKPGERVSFSGIEGKPEDVLNPKKKQLEKITPGLYTDENGVATYKGIQFMTSAGPCTSSIPKATIK

SEQ ID NO: 37732 - protein, 382 aa, Arabidopsis thaliana
  peptide (1)..(382): Ceres Seq. ID no. 13509131
  misc_feature (227)..(322): Pfam Name: Putative tRNA binding domain Pfam Description: Putative tRNA binding domain
  misc_feature (189)..(372): Homolog of NCBI NO: 34860578 NR Description: endothelial monocyte activating polypeptide 2
  misc_feature (182)..(372): Homolog of NCBI NO: 1082350 NR Description: endothelial monocyte-activating protein II
  misc_feature (142)..(372): Homolog of NCBI NO: 26352830 NR Description: unnamed protein product [Mus musculus]
  misc_feature (178)..(382): Homolog of NCBI NO: 12230649 NR Description: Probable methionyl-tRNA synthetase
  misc_feature (128)..(377): Homolog of NCBI NO: 28302254 NR Description: Similar to small inducible cytokine subfamily E,
  misc_feature (194)..(382): Homolog of NCBI NO: 15236350 NR Description: methionyl-tRNA synthetase - like protein
  misc_feature (48)..(361): Homolog of NCBI NO: 19115568 NR Description: putative Cofactor for methionyl-and glutamyl-tRNA and G4 quadruplex nucleic acid binding protein by similarity to
  misc_feature (155)..(382): Homolog of NCBI NO: 34907808 NR Description: similar to methionyl-tRNA synthetase
  misc_feature (1)..(382): Homolog of NCBI NO: 18405465 NR Description: methionyl-tRNA synthetase -related [Arabidopsis
  misc_feature (1)..(382): Homolog of NCBI NO: 25408718 NR Description: probable methionyl-tRNA synthetase
MILSALCKHFSLDPEPFVGGAGESDIKTLYSNVLKASGKEVSAQNNDVLKWLDFAEGFSSDSKDWFSALEKLNLELATKSVLLGNGLTPSAADVAVFSALHSSVLGLSDSDKEKVPHVIRWVNYIQNKEELSTLFAPIPVKLPEFSFEVPKPAIKVETNSNSKKAAEGVKPVDKPDVQPQLGTKKTEPEEPKKNAAKEKDAKKEKKKPAEPEPAKKEAELSVSLLNIQVGLIRKAWKHPSADSLLVEEIDVGEDKVRQVVSGLAKFCSPEDLTNRLVALITNVKPGKLRDVMSQGLVLCASSEDHSVVEPLLPPAGAKPGERVSFSGIEGKPEDVLNPKKKQLEKITPGLYTDENGVATYKGIQFMTSAGPCTSSIPKATIK

SEQ ID NO: 37733 - DNA, 981 bp, Arabidopsis thaliana
  misc_feature (1)..(981): Ceres Seq. ID no. 12337818
  misc_feature: MA Experiment ID: 108435 Result: Up-regulated in Transcription
  misc_feature: MA Experiment 108435 PARAMETER Experiment Name: At_stm_Mutants_cDNA_P Parameter: Plant Line Value: wt Landsburg vs stm
  misc_feature: MA Experiment 108435 PARAMETER Experiment Name: At_stm_Mutants_cDNA_P Parameter: Tissue Value: Shoot Apical Meristem Region
  misc_feature: MA Experiment ID: 108461 Result: Up-regulated in Transcription
  misc_feature: MA Experiment 108461 PARAMETER Experiment Name: At_Germinating_Seeds_cDNA_P Parameter: Age (day) Value: 1 vs. 0
  misc_feature: MA Experiment 108461 PARAMETER Experiment Name: At_Germinating_Seeds_cDNA_P Parameter: Tissue Value: Germinating Seeds
  misc_feature: MA Experiment ID: 108462 Result: Up-regulated in Transcription
  misc_feature: MA Experiment 108462 PARAMETER Experiment Name: At_Germinating_Seeds_cDNA_P Parameter: Age (day) Value: 2 vs. 0
  misc_feature: MA Experiment 108462 PARAMETER Experiment Name: At_Germinating_Seeds_cDNA_P Parameter: Tissue Value: Germinating Seeds
  misc_feature: MA Experiment ID: 108463 Result: Up-regulated in Transcription
  misc_feature: MA Experiment 108463 PARAMETER Experiment Name: At_Germinating_Seeds_cDNA_P Parameter: Age (day) Value: 3 vs. 0
  misc_feature: MA Experiment 108463 PARAMETER Experiment Name: At_Germinating_Seeds_cDNA_P Parameter: Tissue Value: Germinating Seeds
  misc_feature: MA Experiment ID: 108488 Result: Up-regulated in Transcription
  misc_feature: MA Experiment ID: 108595 Result: Up-regulated in Transcription
  misc_feature: MA Experiment 108595 PARAMETER Experiment Name: At_Ler-pi_Ovule_cDNA_P Parameter: Plant Line Value: null
  misc_feature: MA Experiment ID: 20000111 Result: Down-regulated in Transcription
  misc_feature: MA Experiment 20000111 PARAMETER Experiment Name: At_42deg_Heat_cDNA_P Parameter: Temperature (deg C) Value: 42 vs. 22
  misc_feature: MA Experiment 20000111 PARAMETER Experiment Name: At_42deg_Heat_cDNA_P Parameter: Timepoint (hr) Value: 6
  misc_feature: MA Experiment 20000111 PARAMETER Experiment Name: At_42deg_Heat_cDNA_P Parameter: Tissue Value: Aerial
  misc_feature: MA Experiment ID: 20000113 Result: Down-regulated in Transcription
  misc_feature: MA Experiment 20000113 PARAMETER Experiment Name: At_42deg_Heat_cDNA_P Parameter: Temperature (deg C) Value: 42 vs. 22
  misc_feature: MA Experiment 20000113 PARAMETER Experiment Name: At_42deg_Heat_cDNA_P Parameter: Timepoint (hr) Value: 8
  misc_feature: MA Experiment 20000113 PARAMETER Experiment Name: At_42deg_Heat_cDNA_P Parameter: Tissue Value: Aerial
  misc_feature: MA Experiment ID: 20000180 Result: Up-regulated in Transcription
  misc_feature: MA Experiment 20000180 PARAMETER Experiment Name: At_Germinating_Seeds_P Parameter: Age (hr) Value: 24 vs. 0
  misc_feature: MA Experiment 20000180 PARAMETER Experiment Name: At_Germinating_Seeds_P Parameter: Tissue Value: Germinating Seeds
  misc_feature: MA Experiment ID: 20000234 Result: Up-regulated in Transcription
  misc_feature: MA Experiment 20000234 PARAMETER Experiment Name: At_Siliques_P Parameter: Age (day) Value: 21
  misc_feature: MA Experiment 20000234 PARAMETER Experiment Name: At_Siliques_P Parameter: Organism Value: A. thaliana
  misc_feature: MA Experiment 20000234 PARAMETER Experiment Name: At_Siliques_P Parameter: Plant Line Value: WS
  misc_feature: MA Experiment 20000234 PARAMETER Experiment Name: At_Siliques_P Parameter: Tissue Value: Less Than 5mm Siliques vs. Whole Plant
  misc_feature: MA Experiment ID: 20000264 Result: Up-regulated in Transcription
  misc_feature: MA Experiment 20000264 PARAMETER Experiment Name: At_Open_Flower_P Parameter: Age (day) Value: 21
  misc_feature: MA Experiment 20000264 PARAMETER Experiment Name: At_Open_Flower_P Parameter: Plant Line Value: WS
  misc_feature: MA Experiment 20000264 PARAMETER Experiment Name: At_Open_Flower_P Parameter: Tissue Value: Open Flower vs. Whole Plant
  misc_feature: MA Experiment ID: 20000265 Result: Up-regulated in Transcription
  misc_feature: MA Experiment 20000265 PARAMETER Experiment Name: At_Open_Flower_P Parameter: Age (day) Value: 21
  misc_feature: MA Experiment 20000265 PARAMETER Experiment Name: At_Open_Flower_P Parameter: Plant Line Value: WS
  misc_feature: MA Experiment 20000265 PARAMETER Experiment Name: At_Open_Flower_P Parameter: Tissue Value: Closed Flower vs. Whole Plant
  misc_feature: MA Experiment ID: 20001557 Result: Down-regulated in Transcription
  misc_feature: MA Experiment 20001557 PARAMETER Experiment Name: At_Drought_Soil_Dry_P Parameter: Age (day) Value: 27
  misc_feature: MA Experiment 20001557 PARAMETER Experiment Name: At_Drought_Soil_Dry_P Parameter: Organism Value: A. thaliana
  misc_feature: MA Experiment 20001557 PARAMETER Experiment Name: At_Drought_Soil_Dry_P Parameter: Plant Line Value: WS
  misc_feature: MA Experiment 20001557 PARAMETER Experiment Name: At_Drought_Soil_Dry_P Parameter: Post Timepoint (hr) Value: 3
  misc_feature: MA Experiment 20001557 PARAMETER Experiment Name: At_Drought_Soil_Dry_P Parameter: Post-Treatment Value: Re-Water vs. No Drought
  misc_feature: MA Experiment 20001557 PARAMETER Experiment Name: At_Drought_Soil_Dry_P Parameter: Timepoint (day) Value: 13
  misc_feature: MA Experiment 20001557 PARAMETER Experiment Name: At_Drought_Soil_Dry_P Parameter: Treatment Value: Drought vs. No Drought
  misc_feature: MA Experiment ID: 20001558 Result: Down-regulated in Transcription
  misc_feature: MA Experiment 20001558 PARAMETER Experiment Name: At_Drought_Soil_Dry_P Parameter: Age (day) Value: 27
  misc_feature: MA Experiment 20001558 PARAMETER Experiment Name: At_Drought_Soil_Dry_P Parameter: Organism Value: A. thaliana
  misc_feature: MA Experiment 20001558 PARAMETER Experiment Name: At_Drought_Soil_Dry_P Parameter: Plant Line Value: WS
  misc_feature: MA Experiment 20001558 PARAMETER Experiment Name: At_Drought_Soil_Dry_P Parameter: Post Timepoint (hr) Value: 6
  misc_feature: MA Experiment 20001558 PARAMETER Experiment Name: At_Drought_Soil_Dry_P Parameter: Post-Treatment Value: Re-Water vs. No Drought
  misc_feature: MA Experiment 20001558 PARAMETER Experiment Name: At_Drought_Soil_Dry_P Parameter: Timepoint (day) Value: 13
  misc_feature: MA Experiment 20001558 PARAMETER Experiment Name: At_Drought_Soil_Dry_P Parameter: Treatment Value: Drought vs. No Drought
atcacgatcaaaaatgccatagtacataaagtatccattaaaacgtagatctagtctcttcacaacacttcaactaataacgcaaaaatcagtttctctttgagtaagtgtttactacaattaaactaactcaggcaagtctatgatcatggcttcttctgctgctgcatcgatctctatgataactctaaggaacctctctcgcaatcatcaatctcaccaaagcactcttctcggtttctctagatccttccataaccaaaggatctcatctaacagtccaggtctctccacacgagcaagatccaccacttcctccactggaggtttcttcagaaccatttgcagcagcagcagcaacgacaactccagaccaactaagatccaagagcttaacgtctacgagttcaacgaaggtgatcgaaactccagcggttttaaaactagggaaaaaaccagatcagctttgtctcggagatcttgtccccttcacaaacaaactctacacaggagatctcacaaaacgcataggaatcaccgcaggtctctgcgttttgatccaacacgttccagagaagaaaggtgatcgctttgaagcttcttacagtttctacttcggagattacggtcacatatcagttcaaggaccttatctcacttacgaggatacgtttcttgctatcaccggtggctccggcgtgtttgaaggagcttacggacaggtcaagcttcgtcagcttgtgtatcctacgaagctgttttacactttttacttgaaaggtgttgctgctgatttaccggtggagcttaccgggaaacatgttgagccgtaaggaagtgaaaccggcggctgaagctcaggcgactcagcccggcgctacgatcgctaactttactaattgaaatctaaatctttgtgggtgtctttgtcatggatcttattgggctgttgttcattgtgtttacattttaataatgggc

SEQ ID NO: 37734 - protein, 147 aa, Arabidopsis thaliana
  peptide (1)..(147): Ceres Seq. ID no. 12337819
  misc_feature (7)..(109): Homolog of NCBI NO: 23956574 NR Description: allene oxide cyclase [Solanum tuberosum]
  misc_feature (6)..(109): Homolog of NCBI NO: 40644132 NR Description: allene oxide cyclase [Medicago truncatula]
  misc_feature (10)..(96): Homolog of NCBI NO: 15320414 NR Description: ERD12 protein [Arabidopsis thaliana]
  misc_feature (3)..(96): Homolog of NCBI NO: 15230874 NR Description: hypothetical protein; protein id: At3g25760.1
  misc_feature (3)..(96): Homolog of NCBI NO: 18404656 NR Description: expressed protein
  misc_feature (3)..(96): Homolog of NCBI NO: 18404658 NR Description: expressed protein
  misc_feature (1)..(96): Homolog of NCBI NO: 15222241 NR Description: allene oxide cyclase, putative
MIMASSAAASISMITLRNLSRNHQSHQSTLLGFSRSFHNQRISSNSPGLSTRARSTTSSTGGFFRTICSSSSNDNSRPTKIQELNVYEFNEGDRNSSGFKTREKTRSALSRRSCPLHKQTLHRRSHKTHRNHRRSLRFDPTRSREER

SEQ ID NO: 37735 - protein, 145 aa, Arabidopsis thaliana
  peptide (1)..(145): Ceres Seq. ID no. 12337820
  misc_feature (5)..(107): Homolog of NCBI NO: 23956574 NR Description: allene oxide cyclase [Solanum tuberosum]
  misc_feature (4)..(107): Homolog of NCBI NO: 40644132 NR Description: allene oxide cyclase [Medicago truncatula]
  misc_feature (8)..(94): Homolog of NCBI NO: 15320414 NR Description: ERD12 protein [Arabidopsis thaliana]
  misc_feature (1)..(94): Homolog of NCBI NO: 15230874 NR Description: hypothetical protein; protein id: At3g25760.1
  misc_feature (1)..(94): Homolog of NCBI NO: 18404656 NR Description: expressed protein
  misc_feature (1)..(94): Homolog of NCBI NO: 18404658 NR Description: expressed protein
  misc_feature (1)..(94): Homolog of NCBI NO: 15222241 NR Description: allene oxide cyclase, putative
MASSAAASISMITLRNLSRNHQSHQSTLLGFSRSFHNQRISSNSPGLSTRARSTTSSTGGFFRTICSSSSNDNSRPTKIQELNVYEFNEGDRNSSGFKTREKTRSALSRRSCPLHKQTLHRRSHKTHRNHRRSLRFDPTRSREER

SEQ ID NO: 37736 - protein, 135 aa, Arabidopsis thaliana
  peptide (1)..(135): Ceres Seq. ID no. 12337821
  misc_feature (1)..(97): Homolog of NCBI NO: 23956574 NR Description: allene oxide cyclase [Solanum tuberosum]
  misc_feature (1)..(97): Homolog of NCBI NO: 40644132 NR Description: allene oxide cyclase [Medicago truncatula]
  misc_feature (1)..(84): Homolog of NCBI NO: 15320414 NR Description: ERD12 protein [Arabidopsis thaliana]
  misc_feature (1)..(84): Homolog of NCBI NO: 15230874 NR Description: hypothetical protein; protein id: At3g25760.1
  misc_feature (1)..(84): Homolog of NCBI NO: 18404656 NR Description: expressed protein
  misc_feature (1)..(84): Homolog of NCBI NO: 18404658 NR Description: expressed protein
  misc_feature (1)..(84): Homolog of NCBI NO: 15222241 NR Description: allene oxide cyclase, putative
MITLRNLSRNHQSHQSTLLGFSRSFHNQRISSNSPGLSTRARSTTSSTGGFFRTICSSSSNDNSRPTKIQELNVYEFNEGDRNSSGFKTREKTRSALSRRSCPLHKQTLHRRSHKTHRNHRRSLRFDPTRSREER

SEQ ID NO: 37737 - DNA, 1011 bp, Arabidopsis thaliana
  misc_feature (1)..(1011): Ceres Seq. ID no. 12738934
  misc_feature: MA Experiment ID: 108434 Result: Up-regulated in Transcription
  misc_feature: MA Experiment 108434 PARAMETER Experiment Name: At_Root_Tips_cDNA_P Parameter: Tissue Value: Root Tips
  misc_feature: MA Experiment ID: 108461 Result: Up-regulated in Transcription
  misc_feature: MA Experiment 108461 PARAMETER Experiment Name: At_Germinating_Seeds_cDNA_P Parameter: Age (day) Value: 1 vs. 0
  misc_feature: MA Experiment 108461 PARAMETER Experiment Name: At_Germinating_Seeds_cDNA_P Parameter: Tissue Value: Germinating Seeds
  misc_feature: MA Experiment ID: 20000112 Result: Up-regulated in Transcription
  misc_feature: MA Experiment 20000112 PARAMETER Experiment Name: At_42deg_Heat_cDNA_P Parameter: Temperature (deg C) Value: 42 vs. 22
  misc_feature: MA Experiment 20000112 PARAMETER Experiment Name: At_42deg_Heat_cDNA_P Parameter: Timepoint (hr) Value: 2
  misc_feature: MA Experiment 20000112 PARAMETER Experiment Name: At_42deg_Heat_cDNA_P Parameter: Tissue Value: Aerial
  misc_feature: MA Experiment ID: 20000179 Result: Up-regulated in Transcription
  misc_feature: MA Experiment 20000179 PARAMETER Experiment Name: At_Germinating_Seeds_P Parameter: Age (hr) Value: 6 vs. 0
  misc_feature: MA Experiment 20000179 PARAMETER Experiment Name: At_Germinating_Seeds_P Parameter: Tissue Value: Germinating Seeds
  misc_feature: MA Experiment ID: 20000184 Result: Up-regulated in Transcription
  misc_feature: MA Experiment 20000184 PARAMETER Experiment Name: At_Shoots__P Parameter: Age (day) Value: 7
  misc_feature: MA Experiment 20000184 PARAMETER Experiment Name: At_Shoots__P Parameter: Tissue Value: Shoots vs. Whole Plant
  misc_feature: MA Experiment ID: 20000234 Result: Up-regulated in Transcription
  misc_feature: MA Experiment 20000234 PARAMETER Experiment Name: At_Siliques_P Parameter: Age (day) Value: 21
  misc_feature: MA Experiment 20000234 PARAMETER Experiment Name: At_Siliques_P Parameter: Organism Value: A. thaliana
  misc_feature: MA Experiment 20000234 PARAMETER Experiment Name: At_Siliques_P Parameter: Plant Line Value: WS
  misc_feature: MA Experiment 20000234 PARAMETER Experiment Name: At_Siliques_P Parameter: Tissue Value: Less Than 5mm Siliques vs. Whole Plant
  misc_feature: MA Experiment ID: 20001558 Result: Up-regulated in Transcription
  misc_feature: MA Experiment 20001558 PARAMETER Experiment Name: At_Drought_Soil_Dry_P Parameter: Age (day) Value: 27
  misc_feature: MA Experiment 20001558 PARAMETER Experiment Name: At_Drought_Soil_Dry_P Parameter: Organism Value: A. thaliana
  misc_feature: MA Experiment 20001558 PARAMETER Experiment Name: At_Drought_Soil_Dry_P Parameter: Plant Line Value: WS
  misc_feature: MA Experiment 20001558 PARAMETER Experiment Name: At_Drought_Soil_Dry_P Parameter: Post Timepoint (hr) Value: 6
  misc_feature: MA Experiment 20001558 PARAMETER Experiment Name: At_Drought_Soil_Dry_P Parameter: Post-Treatment Value: Re-Water vs. No Drought
  misc_feature: MA Experiment 20001558 PARAMETER Experiment Name: At_Drought_Soil_Dry_P Parameter: Timepoint (day) Value: 13
  misc_feature: MA Experiment 20001558 PARAMETER Experiment Name: At_Drought_Soil_Dry_P Parameter: Treatment Value: Drought vs. No Drought
  misc_feature: MA Experiment ID: 20001560 Result: Up-regulated in Transcription
  misc_feature: MA Experiment 20001560 PARAMETER Experiment Name: At_Drought_Soil_Dry_P Parameter: Age (day) Value: 28
  misc_feature: MA Experiment 20001560 PARAMETER Experiment Name: At_Drought_Soil_Dry_P Parameter: Organism Value: A. thaliana
  misc_feature: MA Experiment 20001560 PARAMETER Experiment Name: At_Drought_Soil_Dry_P Parameter: Plant Line Value: WS
  misc_feature: MA Experiment 20001560 PARAMETER Experiment Name: At_Drought_Soil_Dry_P Parameter: Post Timepoint (hr) Value: None
  misc_feature: MA Experiment 20001560 PARAMETER Experiment Name: At_Drought_Soil_Dry_P Parameter: Post-Treatment Value: None
  misc_feature: MA Experiment 20001560 PARAMETER Experiment Name: At_Drought_Soil_Dry_P Parameter: Timepoint (day) Value: 14
  misc_feature: MA Experiment 20001560 PARAMETER Experiment Name: At_Drought_Soil_Dry_P Parameter: Treatment Value: Drought vs. No Drought
ctgtttctttttgcttccttagacttctccgtcgattaacccttgccgagggtcatttttttttcttgaattttttcaccaagtgttcgttcacggcattgcttgtcctccagtatgagtatctccggtgctgcagttggttcaggcagaaatttaagaagagcggtagagtttgggaaaactcatgtggttaggcctaaagggaaacatcaagcaactattgtctggttacatgggcttggggacaatggctcgagctggtcccagcttttggagacccttccccttccaaatatcaaatggatttgcccgactgctccttctcaaccaataagtttatttggtggttttccctccacagcttggtttgatgttgtggacatcaatgaagatggacctgatgatatggaaggattggatgtggctgctgcacatgttgcaaatctgttgtcgaatgagcctgctgacattaaattaggtgttggaggattcagcatgggtgcggcgacatctctatattctgcaacttgttttgctctcggtaaatatggaaatggcaatccataccctatcaatttaagcgcaatcataggcttaagcggctggcttccttgtgcaaagacattggctggcaaactagaagaggaacagatcaagaaccgagctgcatcgttacccattgttgtctgtcatggaaaagctgatgatgtggtaccgttcaagtttggggagaaatcttcacaggctttgctttcaaatgggtttaagaaggtgaccttcaaaccttacagtgcacttggtcaccacacaatcccacaggagttggatgagttgtgcgcatggttgacatccacgctcagcctcgaaggttgatacttcctatgatgtagctttctgatgaaaacccttcaactcttgagagtttgattgaattggatgtttcaggatttcacaatgttttcattggaatatttgtgtaagacacattcgtctagtagcaaatcttctccc

SEQ ID NO: 37738 - protein, 252 aa, Arabidopsis thaliana
  peptide (1)..(252): Ceres Seq. ID no. 12738935
  misc_feature (20)..(248): Pfam Name: Phospholipase/Carboxylesterase Pfam Description: Phospholipase/Carboxylesterase
  misc_feature (85)..(251): Homolog of NCBI NO: 34912598 NR Description: P0046B10.16 [Oryza sativa (japonica
  misc_feature (102)..(252): Homolog of NCBI NO: 28932772 NR Description: FPh1 [Gossypium hirsutum]
  misc_feature (196)..(225): Homolog of NCBI NO: 5903036 NR Description: F6D8.5 [Arabidopsis thaliana]
  misc_feature (1)..(182): Homolog of NCBI NO: 5903036 NR Description: F6D8.5 [Arabidopsis thaliana]
  misc_feature (196)..(252): Homolog of NCBI NO: 15219072 NR Description: unknown protein; protein id: At1g52700.1
  misc_feature (1)..(182): Homolog of NCBI NO: 15219072 NR Description: unknown protein; protein id: At1g52700.1
  misc_feature (1)..(252): Homolog of NCBI NO: 15232645 NR Description: putative lysophospholipase; protein id:
  misc_feature (1)..(250): Homolog of NCBI NO: 29409364 NR Description: biostress-resistance-related protein [Triticum
  misc_feature (1)..(250): Homolog of NCBI NO: 34910274 NR Description: OSJNBa0089K24.24 [Oryza sativa (japonica
  misc_feature (1)..(252): Homolog of NCBI NO: 15241251 NR Description: putative protein
MSISGAAVGSGRNLRRAVEFGKTHVVRPKGKHQATIVWLHGLGDNGSSWSQLLETLPLPNIKWICPTAPSQPISLFGGFPSTAWFDVVDINEDGPDDMEGLDVAAAHVANLLSNEPADIKLGVGGFSMGAATSLYSATCFALGKYGNGNPYPINLSAIIGLSGWLPCAKTLAGKLEEEQIKNRAASLPIVVCHGKADDVVPFKFGEKSSQALLSNGFKKVTFKPYSALGHHTIPQELDELCAWLTSTLSLEG

SEQ ID NO: 37739 - protein, 155 aa, Arabidopsis thaliana
  peptide (1)..(155): Ceres Seq. ID no. 12738936
  misc_feature (1)..(151): Pfam Name: Phospholipase/Carboxylesterase Pfam Description: Phospholipase/Carboxylesterase
  misc_feature (1)..(154): Homolog of NCBI NO: 34912598 NR Description: P0046B10.16 [Oryza sativa (japonica
  misc_feature (5)..(155): Homolog of NCBI NO: 28932772 NR Description: FPh1 [Gossypium hirsutum]
  misc_feature (99)..(128): Homolog of NCBI NO: 5903036 NR Description: F6D8.5 [Arabidopsis thaliana]
  misc_feature (1)..(85): Homolog of NCBI NO: 5903036 NR Description: F6D8.5 [Arabidopsis thaliana]
  misc_feature (99)..(155): Homolog of NCBI NO: 15219072 NR Description: unknown protein; protein id: At1g52700.1
  misc_feature (1)..(85): Homolog of NCBI NO: 15219072 NR Description: unknown protein; protein id: At1g52700.1
  misc_feature (1)..(155): Homolog of NCBI NO: 15232645 NR Description: putative lysophospholipase; protein id:
  misc_feature (1)..(153): Homolog of NCBI NO: 29409364 NR Description: biostress-resistance-related protein [Triticum
  misc_feature (1)..(153): Homolog of NCBI NO: 34910274 NR Description: OSJNBa0089K24.24 [Oryza sativa (japonica
  misc_feature (1)..(155): Homolog of NCBI NO: 15241251 NR Description: putative protein
MEGLDVAAAHVANLLSNEPADIKLGVGGFSMGAATSLYSATCFALGKYGNGNPYPINLSAIIGLSGWLPCAKTLAGKLEEEQIKNRAASLPIVVCHGKADDVVPFKFGEKSSQALLSNGFKKVTFKPYSALGHHTIPQELDELCAWLTSTLSLEG

SEQ ID NO: 37740 - DNA, 1420 bp, Arabidopsis thaliana; identical to SEQ ID NO: 29119
  misc_feature (1)..(1420): Ceres Seq. ID no. 12602555
  misc_feature: MA Experiment ID: 108461 Result: Down-regulated in Transcription
  misc_feature: MA Experiment 108461 PARAMETER Experiment Name: At_Germinating_Seeds_cDNA_P Parameter: Age (day) Value: 1 vs. 0
  misc_feature: MA Experiment 108461 PARAMETER Experiment Name: At_Germinating_Seeds_cDNA_P Parameter: Tissue Value: Germinating Seeds
  misc_feature: MA Experiment ID: 108462 Result: Down-regulated in Transcription
  misc_feature: MA Experiment 108462 PARAMETER Experiment Name: At_Germinating_Seeds_cDNA_P Parameter: Age (day) Value: 2 vs. 0
  misc_feature: MA Experiment 108462 PARAMETER Experiment Name: At_Germinating_Seeds_cDNA_P Parameter: Tissue Value: Germinating Seeds
  misc_feature: MA Experiment ID: 108463 Result: Down-regulated in Transcription
  misc_feature: MA Experiment 108463 PARAMETER Experiment Name: At_Germinating_Seeds_cDNA_P Parameter: Age (day) Value: 3 vs. 0
  misc_feature: MA Experiment 108463 PARAMETER Experiment Name: At_Germinating_Seeds_cDNA_P Parameter: Tissue Value: Germinating Seeds
  misc_feature: MA Experiment ID: 108464 Result: Down-regulated in Transcription
  misc_feature: MA Experiment 108464 PARAMETER Experiment Name: At_Germinating_Seeds_cDNA_P Parameter: Age (day) Value: 4 vs. 0
  misc_feature: MA Experiment 108464 PARAMETER Experiment Name: At_Germinating_Seeds_cDNA_P Parameter: Tissue Value: Germinating Seeds
  misc_feature: MA Experiment ID: 20000113 Result: Up-regulated in Transcription
  misc_feature: MA Experiment 20000113 PARAMETER Experiment Name: At_42deg_Heat_cDNA_P Parameter: Temperature (deg C) Value: 42 vs. 22
  misc_feature: MA Experiment 20000113 PARAMETER Experiment Name: At_42deg_Heat_cDNA_P Parameter: Timepoint (hr) Value: 8
  misc_feature: MA Experiment 20000113 PARAMETER Experiment Name: At_42deg_Heat_cDNA_P Parameter: Tissue Value: Aerial
  misc_feature: MA Experiment ID: 20000180 Result: Down-regulated in Transcription
  misc_feature: MA Experiment 20000180 PARAMETER Experiment Name: At_Germinating_Seeds_P Parameter: Age (hr) Value: 24 vs. 0
  misc_feature: MA Experiment 20000180 PARAMETER Experiment Name: At_Germinating_Seeds_P Parameter: Tissue Value: Germinating Seeds
  misc_feature: MA Experiment ID: 20001911 Result: Up-regulated in Transcription
  misc_feature: MA Experiment 20001911 PARAMETER Experiment Name: At_Drought_Reproduction_P Parameter: Age (day) Value: 40
  misc_feature: MA Experiment 20001911 PARAMETER Experiment Name: At_Drought_Reproduction_P Parameter: Organism Value: A. thaliana
  misc_feature: MA Experiment 20001911 PARAMETER Experiment Name: At_Drought_Reproduction_P Parameter: Plant Line Value: WS
  misc_feature: MA Experiment 20001911 PARAMETER Experiment Name: At_Drought_Reproduction_P Parameter: Timepoint (day) Value: 10
  misc_feature: MA Experiment 20001911 PARAMETER Experiment Name: At_Drought_Reproduction_P Parameter: Tissue Value: Flowers
  misc_feature: MA Experiment 20001911 PARAMETER Experiment Name: At_Drought_Reproduction_P Parameter: Treatment Value: Drought vs. No Drought

SEQ ID NO: 37741 - protein, 341 aa, Arabidopsis thaliana; identical to SEQ ID NO: 29120
  peptide (1)..(341): Ceres Seq. ID no. 12602556
  misc_feature (1)..(341): Homolog of NCBI NO: 7433352 NR Description: ribonucleoside-diphosphate reductase (EC
  misc_feature (1)..(341): Homolog of NCBI NO: 15229476 NR Description: ribonucleoside-diphosphate reductase small chain
  misc_feature (1)..(341): Homolog of NCBI NO: 7433352 NR Description: ribonucleoside-diphosphate reductase (EC
  misc_feature (1)..(341): Homolog of NCBI NO: 15229476 NR Description: ribonucleoside-diphosphate reductase small chain
  misc_feature (1)..(341): Homolog of NCBI NO: 7433352 NR Description: ribonucleoside-diphosphate reductase (EC
  misc_feature (1)..(341): Homolog of NCBI NO: 15229476 NR Description: ribonucleoside-diphosphate reductase small chain

SEQ ID NO: 37742 - protein, 330 aa, Arabidopsis thaliana; identical to SEQ ID NO: 29121
  peptide (1)..(330): Ceres Seq. ID no. 12602557
  misc_feature (1)..(330): Homolog of NCBI NO: 7433352 NR Description: ribonucleoside-diphosphate reductase (EC
  misc_feature (1)..(330): Homolog of NCBI NO: 15229476 NR Description: ribonucleoside-diphosphate reductase small chain
  misc_feature (1)..(330): Homolog of NCBI NO: 7433352 NR Description: ribonucleoside-diphosphate reductase (EC
  misc_feature (1)..(330): Homolog of NCBI NO: 15229476 NR Description: ribonucleoside-diphosphate reductase small chain
  misc_feature (1)..(330): Homolog of NCBI NO: 7433352 NR Description: ribonucleoside-diphosphate reductase (EC
  misc_feature (1)..(330): Homolog of NCBI NO: 15229476 NR Description: ribonucleoside-diphosphate reductase small chain

SEQ ID NO: 37743 - protein, 319 aa, Arabidopsis thaliana; identical to SEQ ID NO: 29122
  peptide (1)..(319): Ceres Seq. ID no. 12602558
  misc_feature (1)..(319): Homolog of NCBI NO: 7433352 NR Description: ribonucleoside-diphosphate reductase (EC
  misc_feature (1)..(319): Homolog of NCBI NO: 15229476 NR Description: ribonucleoside-diphosphate reductase small chain
  misc_feature (1)..(319): Homolog of NCBI NO: 7433352 NR Description: ribonucleoside-diphosphate reductase (EC
  misc_feature (1)..(319): Homolog of NCBI NO: 15229476 NR Description: ribonucleoside-diphosphate reductase small chain
  misc_feature (1)..(319): Homolog of NCBI NO: 7433352 NR Description: ribonucleoside-diphosphate reductase (EC
  misc_feature (1)..(319): Homolog of NCBI NO: 15229476 NR Description: ribonucleoside-diphosphate reductase small chain

SEQ ID NO: 37744 - DNA, 1699 bp, Arabidopsis thaliana
  misc_feature (1)..(1699): Ceres Seq. ID no. 12369916
  misc_feature: MA Experiment ID: 108434 Result: Down-regulated in Transcription
  misc_feature: MA Experiment 108434 PARAMETER Experiment Name: At_Root_Tips_cDNA_P Parameter: Tissue Value: Root Tips
  misc_feature: MA Experiment ID: 108488 Result: Down-regulated in Transcription
  misc_feature: MA Experiment ID: 20000180 Result: Up-regulated in Transcription
  misc_feature: MA Experiment 20000180 PARAMETER Experiment Name: At_Germinating_Seeds_P Parameter: Age (hr) Value: 24 vs. 0
  misc_feature: MA Experiment 20000180 PARAMETER Experiment Name: At_Germinating_Seeds_P Parameter: Tissue Value: Germinating Seeds
  misc_feature: MA Experiment ID: 20000496 Result: Up-regulated in Transcription
  misc_feature: MA Experiment 20000496 PARAMETER Experiment Name: At_Guard_Cells_P Parameter: Harvest Date Value: 7/19/2002
  misc_feature: MA Experiment 20000496 PARAMETER Experiment Name: At_Guard_Cells_P Parameter: Organism Value: Canola
  misc_feature: MA Experiment 20000496 PARAMETER Experiment Name: At_Guard_Cells_P Parameter: Tissue Value: Guard Cells vs. Leaves
  misc_feature: MA Experiment ID: 20001557 Result: Up-regulated in Transcription
  misc_feature: MA Experiment 20001557 PARAMETER Experiment Name: At_Drought_Soil_Dry_P Parameter: Age (day) Value: 27
  misc_feature: MA Experiment 20001557 PARAMETER Experiment Name: At_Drought_Soil_Dry_P Parameter: Organism Value: A. thaliana
  misc_feature: MA Experiment 20001557 PARAMETER Experiment Name: At_Drought_Soil_Dry_P Parameter: Plant Line Value: WS
  misc_feature: MA Experiment 20001557 PARAMETER Experiment Name: At_Drought_Soil_Dry_P Parameter: Post Timepoint (hr) Value: 3
  misc_feature: MA Experiment 20001557 PARAMETER Experiment Name: At_Drought_Soil_Dry_P Parameter: Post-Treatment Value: Re-Water vs. No Drought
  misc_feature: MA Experiment 20001557 PARAMETER Experiment Name: At_Drought_Soil_Dry_P Parameter: Timepoint (day) Value: 13
  misc_feature: MA Experiment 20001557 PARAMETER Experiment Name: At_Drought_Soil_Dry_P Parameter: Treatment Value: Drought vs. No Drought
  misc_feature: MA Experiment ID: 20001904 Result: Up-regulated in Transcription
  misc_feature: MA Experiment 20001904 PARAMETER Experiment Name: At_Drought_Reproduction_P Parameter: Age (day) Value: 37
  misc_feature: MA Experiment 20001904 PARAMETER Experiment Name: At_Drought_Reproduction_P Parameter: Organism Value: A. thaliana
  misc_feature: MA Experiment 20001904 PARAMETER Experiment Name: At_Drought_Reproduction_P Parameter: Plant Line Value: WS
  misc_feature: MA Experiment 20001904 PARAMETER Experiment Name: At_Drought_Reproduction_P Parameter: Timepoint (day) Value: 7
  misc_feature: MA Experiment 20001904 PARAMETER Experiment Name: At_Drought_Reproduction_P Parameter: Tissue Value: Rosettes
  misc_feature: MA Experiment 20001904 PARAMETER Experiment Name: At_Drought_Reproduction_P Parameter: Treatment Value: Drought vs. No Drought
cccaaaagatgaaaaacgatactctactttttatgaatcctttaattgaacaaacggaaccaacacaacaacagattgtgaagaagaaagaaaaaacaacaatggcttcacaaaccaaactcaagaaacctaattctcattttagcctttgtactttcctcttcttcaccgtcctctttaccatcccggctctctttctcctccgcacctcctcttgctcctcctccaccgctgcagtctcctcctcctctgacacagaccagccaccgtggtctggcgacctccaaaccgcccaatttgcctggaaccgccttgatttctccttaaccaaccctcctcccaaaacactaaaactcgctgttttctcccggaaatggcccacgggtcccaatcctggcggcatggaacgccacgccttcactctatacactgccttagctcgccgtggacatcgtgtccacgttttcacctctcccttagaccaatcccctgaaaccaacaaaattccccctgtttccgaccaaatcatttaccctataatccattctcacggagacgcggagcccggaaaatggcggtacaacaaagcgtgggagctttaccaagaagaaaacaagaaagaacctttcgatgcggttcactctgaaagtgttgctttacctcactggatcgcccgggaggttccaaacctcgctgtatcctggcacggcattgcgttagagagcttacaatcaagcatttaccaagacctgatccgtaaaccagacgaaccaagatcacaaggcttcaatgcaagtctatacggtgccgtgcttcccaagatactagacgaaatcagattcttccacaactacgctcaccacatcgctatcagcgatagctgtggagaaatgctaagagacgtttaccaaatcccggaaaaaagggttcacgtgatcctcaacggagtcgacgaaaacggattcacatcagacaagaagctacgtactctgtttaggtcaaaattagggttaccagaaaactcatcaacgattgttttaggagctgctgggagattagtcaaagacaaaggacatccattgctattcgaagctttcgcgaaactaatccaaacgtattcaaatgtctacctcgtagtagctggatcagggccatgggagcaacgatacaaagaattaggcgaaaaagtttccattttgggatctctaaacccaaacgaactcaagggtttctacaacgggatcgatttgttcgtgaatccaacgcttagaccacaaggtcttgatttaacgttaatggaagcgatgttgagtggtaaaccagtgatggcgtcgaggtacgcaagcataaagagaagtatagtggtgaatgatgagtttgggtttatgtttgcgccaaatgtggaagctctgacggcggtaatggaggttgctgtggcggaaggagcggagagattggcggagagagggaggaagtgtaaagagtatgcggcggagatgtttacggcgagtaagatggctttggcttatgagaggctttttctttgtattaacgatcagaaattttgtatttatccttaattagtaatttactcaacatcttaatttttttttcattattggaaaagtgagtcgtattatactcatggcaaagataatcaaatacatatgcgacccttacatatctaaagttatctttt

SEQ ID NO: 37745 - protein, 525 aa, Arabidopsis thaliana
  peptide (1)..(525): Ceres Seq. ID no. 12369917
  misc_feature (329)..(492): Pfam Name: Glycosyl transferases group 1 Pfam Description: Glycosyl transferases group 1
  misc_feature (201)..(255): Homolog of NCBI NO: 10177634 NR Description: glycosyl transferase-like [Arabidopsis thaliana]
  misc_feature (273)..(522): Homolog of NCBI NO: 10177634 NR Description: glycosyl transferase-like [Arabidopsis thaliana]
  misc_feature (45)..(525): Homolog of NCBI NO: 5903105 NR Description: Hypothetical protein [Arabidopsis thaliana]
  misc_feature (45)..(525): Homolog of NCBI NO: 15219398 NR Description: putative glycosyl transferase; protein id:
  misc_feature (57)..(525): Homolog of NCBI NO: 34911892 NR Description: OSJNBb0032K15.23 [Oryza sativa (japonica
  misc_feature (34)..(507): Homolog of NCBI NO: 25407571 NR Description: hypothetical protein AT4g19460 [imported] -
  misc_feature (34)..(507): Homolog of NCBI NO: 7486088 NR Description: hypothetical protein F24J7.20 - Arabidopsis
  misc_feature (11)..(505): Homolog of NCBI NO: 7487719 NR Description: hypothetical protein T5K18.240 - Arabidopsis
  misc_feature (34)..(525): Homolog of NCBI NO: 21593749 NR Description: unknown [Arabidopsis thaliana]
  misc_feature (11)..(525): Homolog of NCBI NO: 18415319 NR Description: putative protein
QKMKNDTLLFMNPLIEQTEPTQQQIVKKKEKTTMASQTKLKKPNSHFSLCTFLFFTVLFTIPALFLLRTSSCSSSTAAVSSSSDTDQPPWSGDLQTAQFAWNRLDFSLTNPPPKTLKLAVFSRKWPTGPNPGGMERHAFTLYTALARRGHRVHVFTSPLDQSPETNKIPPVSDQIIYPIIHSHGDAEPGKWRYNKAWELYQEENKKEPFDAVHSESVALPHWIAREVPNLAVSWHGIALESLQSSIYQDLIRKPDEPRSQGFNASLYGAVLPKILDEIRFFHNYAHHIAISDSCGEMLRDVYQIPEKRVHVILNGVDENGFTSDKKLRTLFRSKLGLPENSSTIVLGAAGRLVKDKGHPLLFEAFAKLIQTYSNVYLVVAGSGPWEQRYKELGEKVSILGSLNPNELKGFYNGIDLFVNPTLRPQGLDLTLMEAMLSGKPVMASRYASIKRSIVVNDEFGFMFAPNVEALTAVMEVAVAEGAERLAERGRKCKEYAAEMFTASKMALAYERLFLCINDQKFCIYP

SEQ ID NO: 37746 - protein, 523 aa, Arabidopsis thaliana
  peptide (1)..(523): Ceres Seq. ID no. 12369918
  misc_feature (327)..(490): Pfam Name: Glycosyl transferases group 1 Pfam Description: Glycosyl transferases group 1
  misc_feature (199)..(253): Homolog of NCBI NO: 10177634 NR Description: glycosyl transferase-like [Arabidopsis thaliana]
  misc_feature (271)..(520): Homolog of NCBI NO: 10177634 NR Description: glycosyl transferase-like [Arabidopsis thaliana]
  misc_feature (43)..(523): Homolog of NCBI NO: 5903105 NR Description: Hypothetical protein [Arabidopsis thaliana]
  misc_feature (43)..(523): Homolog of NCBI NO: 15219398 NR Description: putative glycosyl transferase; protein id:
  misc_feature (55)..(523): Homolog of NCBI NO: 34911892 NR Description: OSJNBb0032K15.23 [Oryza sativa (japonica
  misc_feature (32)..(505): Homolog of NCBI NO: 25407571 NR Description: hypothetical protein AT4g19460 [imported] -
  misc_feature (32)..(505): Homolog of NCBI NO: 7486088 NR Description: hypothetical protein F24J7.20 - Arabidopsis
  misc_feature (9)..(503): Homolog of NCBI NO: 7487719 NR Description: hypothetical protein T5K18.240 - Arabidopsis
  misc_feature (32)..(523): Homolog of NCBI NO: 21593749 NR Description: unknown [Arabidopsis thaliana]
  misc_feature (9)..(523): Homolog of NCBI NO: 18415319 NR Description: putative protein
MKNDTLLFMNPLIEQTEPTQQQIVKKKEKTTMASQTKLKKPNSHFSLCTFLFFTVLFTIPALFLLRTSSCSSSTAAVSSSSDTDQPPWSGDLQTAQFAWNRLDFSLTNPPPKTLKLAVFSRKWPTGPNPGGMERHAFTLYTALARRGHRVHVFTSPLDQSPETNKIPPVSDQIIYPIIHSHGDAEPGKWRYNKAWELYQEENKKEPFDAVHSESVALPHWIAREVPNLAVSWHGIALESLQSSIYQDLIRKPDEPRSQGFNASLYGAVLPKILDEIRFFHNYAHHIAISDSCGEMLRDVYQIPEKRVHVILNGVDENGFTSDKKLRTLFRSKLGLPENSSTIVLGAAGRLVKDKGHPLLFEAFAKLIQTYSNVYLVVAGSGPWEQRYKELGEKVSILGSLNPNELKGFYNGIDLFVNPTLRPQGLDLTLMEAMLSGKPVMASRYASIKRSIVVNDEFGFMFAPNVEALTAVMEVAVAEGAERLAERGRKCKEYAAEMFTASKMALAYERLFLCINDQKFCIYP

SEQ ID NO: 37747 - protein, 515 aa, Arabidopsis thaliana
  peptide (1)..(515): Ceres Seq. ID no. 12369919
  misc_feature (319)..(482): Pfam Name: Glycosyl transferases group 1 Pfam Description: Glycosyl transferases group 1
  misc_feature (191)..(245): Homolog of NCBI NO: 10177634 NR Description: glycosyl transferase-like [Arabidopsis thaliana]
  misc_feature (263)..(512): Homolog of NCBI NO: 10177634 NR Description: glycosyl transferase-like [Arabidopsis thaliana]
  misc_feature (35)..(515): Homolog of NCBI NO: 5903105 NR Description: Hypothetical protein [Arabidopsis thaliana]
  misc_feature (35)..(515): Homolog of NCBI NO: 15219398 NR Description: putative glycosyl transferase; protein id:
  misc_feature (47)..(515): Homolog of NCBI NO: 34911892 NR Description: OSJNBb0032K15.23 [Oryza sativa (japonica
  misc_feature (24)..(497): Homolog of NCBI NO: 25407571 NR Description: hypothetical protein AT4g19460 [imported] -
  misc_feature (24)..(497): Homolog of NCBI NO: 7486088 NR Description: hypothetical protein F24J7.20 - Arabidopsis
  misc_feature (1)..(495): Homolog of NCBI NO: 7487719 NR Description: hypothetical protein T5K18.240 - Arabidopsis
  misc_feature (24)..(515): Homolog of NCBI NO: 21593749 NR Description: unknown [Arabidopsis thaliana]
  misc_feature (1)..(515): Homolog of NCBI NO: 18415319 NR Description: putative protein
MNPLIEQTEPTQQQIVKKKEKTTMASQTKLKKPNSHFSLCTFLFFTVLFTIPALFLLRTSSCSSSTAAVSSSSDTDQPPWSGDLQTAQFAWNRLDFSLTNPPPKTLKLAVFSRKWPTGPNPGGMERHAFTLYTALARRGHRVHVFTSPLDQSPETNKIPPVSDQIIYPIIHSHGDAEPGKWRYNKAWELYQEENKKEPFDAVHSESVALPHWIAREVPNLAVSWHGIALESLQSSIYQDLIRKPDEPRSQGFNASLYGAVLPKILDEIRFFHNYAHHIAISDSCGEMLRDVYQIPEKRVHVILNGVDENGFTSDKKLRTLFRSKLGLPENSSTIVLGAAGRLVKDKGHPLLFEAFAKLIQTYSNVYLVVAGSGPWEQRYKELGEKVSILGSLNPNELKGFYNGIDLFVNPTLRPQGLDLTLMEAMLSGKPVMASRYASIKRSIVVNDEFGFMFAPNVEALTAVMEVAVAEGAERLAERGRKCKEYAAEMFTASKMALAYERLFLCINDQKFCIYP

SEQ ID NO: 37748 - DNA, 1272 bp, Arabidopsis thaliana
  misc_feature (1)..(1272): Ceres Seq. ID no. 12384472
  misc_feature: MA Experiment ID: 108434 Result: Up-regulated in Transcription
  misc_feature: MA Experiment 108434 PARAMETER Experiment Name: At_Root_Tips_cDNA_P Parameter: Tissue Value: Root Tips
  misc_feature: MA Experiment ID: 108463 Result: Down-regulated in Transcription
  misc_feature: MA Experiment 108463 PARAMETER Experiment Name: At_Germinating_Seeds_cDNA_P Parameter: Age (day) Value: 3 vs. 0
  misc_feature: MA Experiment 108463 PARAMETER Experiment Name: At_Germinating_Seeds_cDNA_P Parameter: Tissue Value: Germinating Seeds
  misc_feature: MA Experiment ID: 20000227 Result: Up-regulated in Transcription
  misc_feature: MA Experiment 20000227 PARAMETER Experiment Name: At_Root-Tips-vs-Tops_P Parameter: Tissue Value: Root Tips vs. Root Tops
agtgaacagtaaaactcccaaatttgcaaatgactcatcttcttcacctggagagaatctagggttccagatttactcttcgtcttcctctcttcgcttcttccccactgggattttccttttcttctccttttttctctacccatcgatctacacatcctgatcttcttagaagccccaatccttatacattccgggaacaaaaaacctagctttttttttattccggcttaaccagttttcgaaaaaccctagcttccatggcgaaaactcgacctggtgtcgcctccaaaattaagacgggaaggaaggagctggactcttataccatcaagggcaccaacaaagttgtgagagcgggagactgtgtgttgatgcgcccatcagatgctggtaaaccaccatatgtggcccgtgttgagaagattgaagctgatgcgaggaacaatgtgaaggtgcactgtcgatggtattaccgccctgaggagtcacttggtggtaggagacaatttcatggagccaaagagcttttcttgtctgaccattttgatgttcaaagtgcacacaccattgagggaaaatgcattgttcacaccttcaaaaactacacgaggcttgaaaacgttggggcagaggattattattgtagattcgagtacaaggctgctactggcgcatttacccctgatcgagttgctgtgtactgcaaatgtgaaatgccttacaatccagacgatctcatggtgcagtgtgaaggctgcaaagactggtatcatcctgcgtgtgttggcatgacgattgaagaagcaaagaagcttgatcactttgtatgtgctgaatgcagttctgatgacgatgtcaaaaaatcgcagaatgggtttacttcatctccagctgatgatgttaaggtggaaacgaagcgcagaaaaaggtaatcgcgagttcttggggataaaagccacaagagatgataagttatataacttgggaagctctttggtgcagattttagtaagttagggtttatctttgtcggtctttgtcgtctatggttgtgatgtctgtatggtgcgttccaaaacttagagaaatgtgaaaaagaggagagatcagagagatgatgaagaaaactatgttggcagaatcagttgtatagacttccgtggggtttaagttaactttaggtttgtttattgttatggtctgttgttattttgtggctgatgagaacagatgaacatgaacaacgcttttgacttgggtcatctcagc

SEQ ID NO: 37749 - protein, 224 aa, Arabidopsis thaliana
  peptide (1)..(224): Ceres Seq. ID no. 12384473
  misc_feature (34)..(144): Pfam Name: BAH domain Pfam Description: BAH domain
  misc_feature (1)..(224): Homolog of NCBI NO: 34897170 NR Description: putative DNA-binding protein
  misc_feature (11)..(217): Homolog of NCBI NO: 7484948 NR Description: ES43 protein homolog F19H22.200 - Arabidopsis
  misc_feature (11)..(221): Homolog of NCBI NO: 21595796 NR Description: ES43 like protein [Arabidopsis thaliana]
  misc_feature (11)..(221): Homolog of NCBI NO: 18420377 NR Description: ES43 like protein
  misc_feature (39)..(221): Homolog of NCBI NO: 22328317 NR Description: putative ES43-like protein; protein id:
  misc_feature (10)..(224): Homolog of NCBI NO: 33146914 NR Description: putative ES43 protein [Oryza sativa (japonica
  misc_feature (10)..(210): Homolog of NCBI NO: 34904940 NR Description: OSJNBa0077M12.13 [Oryza sativa (japonica
  misc_feature (10)..(224): Homolog of NCBI NO: 37573088 NR Description: receptor like protein [Oryza sativa (japonica
  misc_feature (39)..(217): Homolog of NCBI NO: 15234729 NR Description: receptor like protein (fragment); protein id:
  misc_feature (34)..(217): Homolog of NCBI NO: 11292613 NR Description: receptor like protein - Arabidopsis thaliana
MAKTRPGVASKIKTGRKELDSYTIKGTNKVVRAGDCVLMRPSDAGKPPYVARVEKIEADARNNVKVHCRWYYRPEESLGGRRQFHGAKELFLSDHFDVQSAHTIEGKCIVHTFKNYTRLENVGAEDYYCRFEYKAATGAFTPDRVAVYCKCEMPYNPDDLMVQCEGCKDWYHPACVGMTIEEAKKLDHFVCAECSSDDDVKKSQNGFTSSPADDVKVETKRRKR

SEQ ID NO: 37750 - protein, 186 aa, Arabidopsis thaliana; identical to SEQ ID NO: 23851
  peptide (1)..(186): Ceres Seq. ID no. 12384474
  misc_feature (1)..(106): Pfam Name: BAH domain Pfam Description: BAH domain
  misc_feature (1)..(186): Homolog of NCBI NO: 34897170 NR Description: putative DNA-binding protein
  misc_feature (1)..(179): Homolog of NCBI NO: 7484948 NR Description: ES43 protein homolog F19H22.200 - Arabidopsis
  misc_feature (1)..(183): Homolog of NCBI NO: 21595796 NR Description: ES43 like protein [Arabidopsis thaliana]
  misc_feature (1)..(183): Homolog of NCBI NO: 18420377 NR Description: ES43 like protein
  misc_feature (1)..(183): Homolog of NCBI NO: 22328317 NR Description: putative ES43-like protein; protein id:
  misc_feature (1)..(186): Homolog of NCBI NO: 33146914 NR Description: putative ES43 protein [Oryza sativa (japonica
  misc_feature (1)..(172): Homolog of NCBI NO: 34904940 NR Description: OSJNBa0077M12.13 [Oryza sativa (japonica
  misc_feature (1)..(186): Homolog of NCBI NO: 37573088 NR Description: receptor like protein [Oryza sativa (japonica
  misc_feature (1)..(179): Homolog of NCBI NO: 15234729 NR Description: receptor like protein (fragment); protein id:
  misc_feature (1)..(179): Homolog of NCBI NO: 11292613 NR Description: receptor like protein - Arabidopsis thaliana

SEQ ID NO: 37751 - DNA, 1391 bp, Arabidopsis thaliana
  misc_feature (1)..(1391): Ceres Seq. ID no. 13580630
  misc_feature: MA Experiment ID: 20000495 Result: Down-regulated in Transcription
  misc_feature: MA Experiment 20000495 PARAMETER Experiment Name: At_Guard_Cells_P Parameter: Harvest Date Value: 8/2/2002
  misc_feature: MA Experiment 20000495 PARAMETER Experiment Name: At_Guard_Cells_P Parameter: Organism Value: A. thaliana
  misc_feature: MA Experiment 20000495 PARAMETER Experiment Name: At_Guard_Cells_P Parameter: Tissue Value: Guard Cells vs. Leaves
  misc_feature: MA Experiment ID: 20001451 Result: Down-regulated in Transcription
  misc_feature: MA Experiment 20001451 PARAMETER Experiment Name: At_Far-red-induction_P Parameter: Age (day) Value: 7
  misc_feature: MA Experiment 20001451 PARAMETER Experiment Name: At_Far-red-induction_P Parameter: Light Value: Far-red vs. White
  misc_feature: MA Experiment 20001451 PARAMETER Experiment Name: At_Far-red-induction_P Parameter: Organism Value: A. thaliana
  misc_feature: MA Experiment 20001451 PARAMETER Experiment Name: At_Far-red-induction_P Parameter: Plant Line Value: Columbia
  misc_feature: MA Experiment 20001451 PARAMETER Experiment Name: At_Far-red-induction_P Parameter: Timepoint (hr) Value: 24
  misc_feature: MA Experiment 20001451 PARAMETER Experiment Name: At_Far-red-induction_P Parameter: Tissue Value: Whole Plant
  misc_feature: MA Experiment ID: 20001560 Result: Down-regulated in Transcription
  misc_feature: MA Experiment 20001560 PARAMETER Experiment Name: At_Drought_Soil_Dry_P Parameter: Age (day) Value: 28
  misc_feature: MA Experiment 20001560 PARAMETER Experiment Name: At_Drought_Soil_Dry_P Parameter: Organism Value: A. thaliana
  misc_feature: MA Experiment 20001560 PARAMETER Experiment Name: At_Drought_Soil_Dry_P Parameter: Plant Line Value: WS
  misc_feature: MA Experiment 20001560 PARAMETER Experiment Name: At_Drought_Soil_Dry_P Parameter: Post Timepoint (hr) Value: None
  misc_feature: MA Experiment 20001560 PARAMETER Experiment Name: At_Drought_Soil_Dry_P Parameter: Post-Treatment Value: None
  misc_feature: MA Experiment 20001560 PARAMETER Experiment Name: At_Drought_Soil_Dry_P Parameter: Timepoint (day) Value: 14
  misc_feature: MA Experiment 20001560 PARAMETER Experiment Name: At_Drought_Soil_Dry_P Parameter: Treatment Value: Drought vs. No Drought
atggaagaattagaaaaaacccagaaatttcagaagaagaagaagcaacaacaagagaaacaagaccagtcttcaccaatcaacttcgagatgtcttcaagatcatcacttcattcattaccacaaacaacgattgaatcacctcctgattcaccaaccctctcttcaatccccgatagccatggatcttctcctcacacgattattccaactccttctgtggccaagacggagactccttttagggttactaacggagaggaggagaagaaagtcagcgagagtaggagacaattgagaccgagcttttcttcttcttcttctactccgcgtgaatcgaaatgggcaagtttgattaggaaagctctacttggatttagggttattgcgtttgtttcgtgtcttgtttcgttctctgtaatggtttctgatagagataaaggatgggctcatgattctttctacaactacaaagaattcaggttctgtttggctgcgaatgtgattggttttgtctactctggttttatgatatgtgatcttgtatacctgttatctactagcatccgaagatcacgacataacctgcgacatttcttggaatttggtcttgatcaaatgctagcttatcttcttgcatcagcttcaacttcagcttcgatccgcgtagatgattggcaatcaaactggggagcagacaagttcccagacttagctagagcatctgtcgcactgtcttacgtctcctttgtcgcattcgccttctgctcattggcttccggttatgctctatgtgcactccggtccatctaaactaaacaagcgcaagctcgagacaaaaagtctcattttgtctactctcagaagttgtatccttgaccctaaacgggtccagtttctgatttttagaagaaacttttattttatatagtggagaatattccatcttgttaaaagatggtgcgaatgctcgtttatacatcactttatctatttcactttttattatatagttctaagaaaagctatatgatgctatcttctccccaaaaaaaaaaaaaaaaaaatcaagaattcgcacgagaccattacctagaacatcctaatcaaaaaaattgggttattagtacgaattttataatgagtgtgccataatttacctaaaaaagaaaaaaaaagaaaaaaagagtgttgtatgtacgtgtgtttgacttggataattagtgacattttaagcaaatgtgtatttggaaaagtgatgtcaatgaaatatgaatatgggtcgaataaagaagcgaagatccgtagactgttgcttctctgcatctgttgttgtattcccgatcatattgttgtatgtttataatttattaaaagcaaattgtcttccc

SEQ ID NO: 37752 - protein, 270 aa, Arabidopsis thaliana
  peptide (1)..(270): Ceres Seq. ID no. 13580631
  misc_feature (116)..(252): Pfam Name: Domain of unknown function (DUF588) Pfam Description: Domain of unknown function (DUF588)
  misc_feature (24)..(209): Homolog of NCBI NO: 15227628 NR Description: expressed protein [Arabidopsis thaliana]
  misc_feature (121)..(264): Homolog of NCBI NO: 28876007 NR Description: hypothetical protein [Oryza sativa (japonica
  misc_feature (173)..(264): Homolog of NCBI NO: 15227628 NR Description: expressed protein [Arabidopsis thaliana]
  misc_feature (210)..(264): Homolog of NCBI NO: 10177460 NR Description: gene_id:MQB2.14~unknown protein [Arabidopsis
  misc_feature (105)..(166): Homolog of NCBI NO: 10177460 NR Description: gene_id:MQB2.14~unknown protein [Arabidopsis
  misc_feature (111)..(265): Homolog of NCBI NO: 2598569 NR Description: putative start codon [Medicago truncatula]
  misc_feature (105)..(264): Homolog of NCBI NO: 15241975 NR Description: hypothetical protein [Arabidopsis thaliana]
  misc_feature (24)..(264): Homolog of NCBI NO: 27754604 NR Description: unknown protein [Arabidopsis thaliana]
  misc_feature (1)..(270): Homolog of NCBI NO: 15242642 NR Description: expressed protein [Arabidopsis thaliana]
MEELEKTQKFQKKKKQQQEKQDQSSPINFEMSSRSSLHSLPQTTIESPPDSPTLSSIPDSHGSSPHTIIPTPSVAKTETPFRVTNGEEEKKVSESRRQLRPSFSSSSSTPRESKWASLIRKALLGFRVIAFVSCLVSFSVMVSDRDKGWAHDSFYNYKEFRFCLAANVIGFVYSGFMICDLVYLLSTSIRRSRHNLRHFLEFGLDQMLAYLLASASTSASIRVDDWQSNWGADKFPDLARASVALSYVSFVAFAFCSLASGYALCALRSI

SEQ ID NO: 37753 - protein, 240 aa, Arabidopsis thaliana
  peptide (1)..(240): Ceres Seq. ID no. 13580632
  misc_feature (86)..(222): Pfam Name: Domain of unknown function (DUF588) Pfam Description: Domain of unknown function (DUF588)
  misc_feature (1)..(179): Homolog of NCBI NO: 15227628 NR Description: expressed protein [Arabidopsis thaliana]
  misc_feature (91)..(234): Homolog of NCBI NO: 28876007 NR Description: hypothetical protein [Oryza sativa (japonica
  misc_feature (143)..(234): Homolog of NCBI NO: 15227628 NR Description: expressed protein [Arabidopsis thaliana]
  misc_feature (180)..(234): Homolog of NCBI NO: 10177460 NR Description: gene_id:MQB2.14~unknown protein [Arabidopsis
  misc_feature (75)..(136): Homolog of NCBI NO: 10177460 NR Description: gene_id:MQB2.14~unknown protein [Arabidopsis
  misc_feature (81)..(235): Homolog of NCBI NO: 2598569 NR Description: putative start codon [Medicago truncatula]
  misc_feature (75)..(234): Homolog of NCBI NO: 15241975 NR Description: hypothetical protein [Arabidopsis thaliana]
  misc_feature (1)..(234): Homolog of NCBI NO: 27754604 NR Description: unknown protein [Arabidopsis thaliana]
  misc_feature (1)..(240): Homolog of NCBI NO: 15242642 NR Description: expressed protein [Arabidopsis thaliana]
MSSRSSLHSLPQTTIESPPDSPTLSSIPDSHGSSPHTIIPTPSVAKTETPFRVTNGEEEKKVSESRRQLRPSFSSSSSTPRESKWASLIRKALLGFRVIAFVSCLVSFSVMVSDRDKGWAHDSFYNYKEFRFCLAANVIGFVYSGFMICDLVYLLSTSIRRSRHNLRHFLEFGLDQMLAYLLASASTSASIRVDDWQSNWGADKFPDLARASVALSYVSFVAFAFCSLASGYALCALRSI

SEQ ID NO: 37754 - DNA, 1667 bp, Arabidopsis thaliana
  misc_feature (1)..(1667): Ceres Seq. ID no. 13487703
  misc_feature: MA Experiment ID: 108434 Result: Up-regulated in Transcription
  misc_feature: MA Experiment 108434 PARAMETER Experiment Name: At_Root_Tips_cDNA_P Parameter: Tissue Value: Root Tips
  misc_feature: MA Experiment ID: 108462 Result: Down-regulated in Transcription
  misc_feature: MA Experiment 108462 PARAMETER Experiment Name: At_Germinating_Seeds_cDNA_P Parameter: Age (day) Value: 2 vs. 0
  misc_feature: MA Experiment 108462 PARAMETER Experiment Name: At_Germinating_Seeds_cDNA_P Parameter: Tissue Value: Germinating Seeds
  misc_feature: MA Experiment ID: 108463 Result: Down-regulated in Transcription
  misc_feature: MA Experiment 108463 PARAMETER Experiment Name: At_Germinating_Seeds_cDNA_P Parameter: Age (day) Value: 3 vs. 0
  misc_feature: MA Experiment 108463 PARAMETER Experiment Name: At_Germinating_Seeds_cDNA_P Parameter: Tissue Value: Germinating Seeds
  misc_feature: MA Experiment ID: 108464 Result: Down-regulated in Transcription
  misc_feature: MA Experiment 108464 PARAMETER Experiment Name: At_Germinating_Seeds_cDNA_P Parameter: Age (day) Value: 4 vs. 0
  misc_feature: MA Experiment 108464 PARAMETER Experiment Name: At_Germinating_Seeds_cDNA_P Parameter: Tissue Value: Germinating Seeds
  misc_feature: MA Experiment ID: 108579 Result: Down-regulated in Transcription
  misc_feature: MA Experiment 108579 PARAMETER Experiment Name: At_4deg_Cold_cDNA_P Parameter: Temperature (deg C) Value: 4 vs. 22
  misc_feature: MA Experiment 108579 PARAMETER Experiment Name: At_4deg_Cold_cDNA_P Parameter: Timepoint (hr) Value: 6
  misc_feature: MA Experiment 108579 PARAMETER Experiment Name: At_4deg_Cold_cDNA_P Parameter: Tissue Value: Aerial
  misc_feature: MA Experiment ID: 20000087 Result: Down-regulated in Transcription
  misc_feature: MA Experiment 20000087 PARAMETER Experiment Name: At_100uM_ABA_Mutants_cDNA_P Parameter: Plant Line Value: WS
  misc_feature: MA Experiment 20000087 PARAMETER Experiment Name: At_100uM_ABA_Mutants_cDNA_P Parameter: Timepoint (hr) Value: 6
  misc_feature: MA Experiment 20000087 PARAMETER Experiment Name: At_100uM_ABA_Mutants_cDNA_P Parameter: Tissue Value: Aerial
  misc_feature: MA Experiment 20000087 PARAMETER Experiment Name: At_100uM_ABA_Mutants_cDNA_P Parameter: Treatment Value: 100uM ABA vs. No Treatment
  misc_feature: MA Experiment ID: 20000179 Result: Down-regulated in Transcription
  misc_feature: MA Experiment 20000179 PARAMETER Experiment Name: At_Germinating_Seeds_P Parameter: Age (hr) Value: 6 vs. 0
  misc_feature: MA Experiment 20000179 PARAMETER Experiment Name: At_Germinating_Seeds_P Parameter: Tissue Value: Germinating Seeds
  misc_feature: MA Experiment ID: 20000185 Result: Up-regulated in Transcription
  misc_feature: MA Experiment 20000185 PARAMETER Experiment Name: At_Roots__P Parameter: Age (day) Value: 7 vs. 21
  misc_feature: MA Experiment 20000185 PARAMETER Experiment Name: At_Roots__P Parameter: Organism Value: A. thaliana
  misc_feature: MA Experiment 20000185 PARAMETER Experiment Name: At_Roots__P Parameter: Tissue Value: Roots vs. Whole Plant
  misc_feature: MA Experiment ID: 20000227 Result: Up-regulated in Transcription
  misc_feature: MA Experiment 20000227 PARAMETER Experiment Name: At_Root-Tips-vs-Tops_P Parameter: Tissue Value: Root Tips vs. Root Tops
  misc_feature: MA Experiment ID: 20000234 Result: Up-regulated in Transcription
  misc_feature: MA Experiment 20000234 PARAMETER Experiment Name: At_Siliques_P Parameter: Age (day) Value: 21
  misc_feature: MA Experiment 20000234 PARAMETER Experiment Name: At_Siliques_P Parameter: Organism Value: A. thaliana
  misc_feature: MA Experiment 20000234 PARAMETER Experiment Name: At_Siliques_P Parameter: Plant Line Value: WS
  misc_feature: MA Experiment 20000234 PARAMETER Experiment Name: At_Siliques_P Parameter: Tissue Value: Less Than 5mm Siliques vs. Whole Plant
  misc_feature: MA Experiment ID: 20000286 Result: Up-regulated in Transcription
  misc_feature: MA Experiment 20000286 PARAMETER Experiment Name: At_Open_Flower_P Parameter: Age (day) Value: 21
  misc_feature: MA Experiment 20000286 PARAMETER Experiment Name: At_Open_Flower_P Parameter: Plant Line Value: WS
  misc_feature: MA Experiment 20000286 PARAMETER Experiment Name: At_Open_Flower_P Parameter: Tissue Value: Half Open vs. Whole Plant
  misc_feature: MA Experiment ID: 20000439 Result: Up-regulated in Transcription
  misc_feature: MA Experiment 20000439 PARAMETER Experiment Name: At_Roots__P Parameter: Age (day) Value: 14 vs. 21
  misc_feature: MA Experiment 20000439 PARAMETER Experiment Name: At_Roots__P Parameter: Organism Value: A. thaliana
  misc_feature: MA Experiment 20000439 PARAMETER Experiment Name: At_Roots__P Parameter: Tissue Value: Roots vs. Whole Plant
  misc_feature: MA Experiment ID: 20001557 Result: Up-regulated in Transcription
  misc_feature: MA Experiment 20001557 PARAMETER Experiment Name: At_Drought_Soil_Dry_P Parameter: Age (day) Value: 27
  misc_feature: MA Experiment 20001557 PARAMETER Experiment Name: At_Drought_Soil_Dry_P Parameter: Organism Value: A. thaliana
  misc_feature: MA Experiment 20001557 PARAMETER Experiment Name: At_Drought_Soil_Dry_P Parameter: Plant Line Value: WS
  misc_feature: MA Experiment 20001557 PARAMETER Experiment Name: At_Drought_Soil_Dry_P Parameter: Post Timepoint (hr) Value: 3
  misc_feature: MA Experiment 20001557 PARAMETER Experiment Name: At_Drought_Soil_Dry_P Parameter: Post-Treatment Value: Re-Water vs. No Drought
  misc_feature: MA Experiment 20001557 PARAMETER Experiment Name: At_Drought_Soil_Dry_P Parameter: Timepoint (day) Value: 13
  misc_feature: MA Experiment 20001557 PARAMETER Experiment Name: At_Drought_Soil_Dry_P Parameter: Treatment Value: Drought vs. No Drought
  misc_feature: MA Experiment ID: 20001558 Result: Up-regulated in Transcription
  misc_feature: MA Experiment 20001558 PARAMETER Experiment Name: At_Drought_Soil_Dry_P Parameter: Age (day) Value: 27
  misc_feature: MA Experiment 20001558 PARAMETER Experiment Name: At_Drought_Soil_Dry_P Parameter: Organism Value: A. thaliana
  misc_feature: MA Experiment 20001558 PARAMETER Experiment Name: At_Drought_Soil_Dry_P Parameter: Plant Line Value: WS
  misc_feature: MA Experiment 20001558 PARAMETER Experiment Name: At_Drought_Soil_Dry_P Parameter: Post Timepoint (hr) Value: 6
  misc_feature: MA Experiment 20001558 PARAMETER Experiment Name: At_Drought_Soil_Dry_P Parameter: Post-Treatment Value: Re-Water vs. No Drought
  misc_feature: MA Experiment 20001558 PARAMETER Experiment Name: At_Drought_Soil_Dry_P Parameter: Timepoint (day) Value: 13
  misc_feature: MA Experiment 20001558 PARAMETER Experiment Name: At_Drought_Soil_Dry_P Parameter: Treatment Value: Drought vs. No Drought
  misc_feature: MA Experiment ID: 20001911 Result: Down-regulated in Transcription
  misc_feature: MA Experiment 20001911 PARAMETER Experiment Name: At_Drought_Reproduction_P Parameter: Age (day) Value: 40
  misc_feature: MA Experiment 20001911 PARAMETER Experiment Name: At_Drought_Reproduction_P Parameter: Organism Value: A. thaliana
  misc_feature: MA Experiment 20001911 PARAMETER Experiment Name: At_Drought_Reproduction_P Parameter: Plant Line Value: WS
  misc_feature: MA Experiment 20001911 PARAMETER Experiment Name: At_Drought_Reproduction_P Parameter: Timepoint (day) Value: 10
  misc_feature: MA Experiment 20001911 PARAMETER Experiment Name: At_Drought_Reproduction_P Parameter: Tissue Value: Flowers
  misc_feature: MA Experiment 20001911 PARAMETER Experiment Name: At_Drought_Reproduction_P Parameter: Treatment Value: Drought vs. No Drought
aagcaaagtaaaacctaaaaaaaaaaaaagaccgtaagtagttacaagggtggaagtataaaggagcagtcttttcttcttctttcaaccccacggcgcagatcctacgagtttggtctttgtctctatcttttcaatctttctctctcaatcgctcttcaatttgataacagcaaagtcatggcaggaatggcatctgatggaactcaatatgatcctcgtcagtttgatactaagatgaatgccattctcggcgaggaaggagaggaaacattctacactaactatgacgaagtttgcgacagctttgatgcaatggaattgcaaccagatcttctcaggggtatttatgcttacggtttcgagaagccttctgctattcagcaaagaggaattattccattctgcaagggtcttgatgtgatccagcaagctcaatctggaactggaaagaccgctaccttttgctctggtgttttacagcagctcgatattagtttggttcaatgccaagctcttgttttggcacctacccgagaacttgcccagcaaattgaaaaggttatgagggcacttggtgactaccttggcgtcaaggctcaggcttgtgttggtggaacaagtgttcgtgaggatcaacgtgttcttcagtctggtgttcatgttgttgttggaacccctggtcgtgtctttgacttgttacgcagacaatccctccgtgctgatgcaatcaaaatgtttgttcttgatgaagctgatgaaatgctctctcgtggtttcaaggatcagatatacgacatcttccagcttcttccttccaaggttcaggttggtgttttctctgctacaatgcctcccgaagcccttgagatcacaaggaagttcatgaacaaaccagtcaggattctggtcaagcgagacgagctgactcttgaaggtatcaagcagttttatgtcaatgtagacaaggaagagtggaaactcgagacactatgcgatctctacgagacactggccatcactcaaagcgtcatctttgtgaacacaaggcgtaaggttgattggctaaccgacaaaatgagaagccgtgaccacactgtttcagctacacacggagacatggaccagaacacaagagacatcatcatgcgcgaattccgctctgggtcttcccgtgtcctcataaccactgacctccttgctcgtggtatcgatgttcagcaagtctctctggtcataaactttgacctcccaacccaaccggagaattaccttcatcgtattggaagaagtggaaggtttgggagaaagggagtagcaatcaatttcatgacatcggaggatgagagaatgatggctgatattcagaggttttacaatgtggtcgttgaggagttgccaagcaatgttgctgatcttctctgaagcctttcttttttctgttttttactgagaaagtgctgtgtttacccctttttttggcagcttctctatgctttgatttttgttttcaggctactacttagatttatagttcttggctaaaagcgaacataactcattacatgattttgcttttttggcaatcaagaatttcggcattatttatctttttgtgaacgtggcttacaaggaaggatactctatgagactaaagacttttctct

SEQ ID NO: 37755 - protein, 414 aa, Arabidopsis thaliana
  peptide (1)..(414): Ceres Seq. ID no. 13487704
  misc_feature (54)..(257): Pfam Name: DEAD/DEAH box helicase Pfam Description: DEAD/DEAH box helicase
  misc_feature (1)..(414): Homolog of NCBI NO: 2500521 NR Description: Eukaryotic initiation factor 4A-15 (eIF-4A-15)
  misc_feature (1)..(414): Homolog of NCBI NO: 2500516 NR Description: Eukaryotic initiation factor 4A-7 (eIF-4A-7)
  misc_feature (1)..(414): Homolog of NCBI NO: 2119935 NR Description: translation initiation factor eIF-4A.15 - common
  misc_feature (1)..(414): Homolog of NCBI NO: 18400210 NR Description: eukaryotic translation initiation factor 4A-1
  misc_feature (1)..(414): Homolog of NCBI NO: 2119938 NR Description: translation initiation factor eIF-4A.14 - common
  misc_feature (1)..(414): Homolog of NCBI NO: 1170506 NR Description: Eukaryotic initiation factor 4A-2 (eIF-4A-2)
  misc_feature (1)..(414): Homolog of NCBI NO: 2119934 NR Description: translation initiation factor eIF-4A.7 - common
  misc_feature (1)..(414): Homolog of NCBI NO: 1170511 NR Description: Eukaryotic initiation factor 4A-10 (eIF-4A-10)
  misc_feature (1)..(414): Homolog of NCBI NO: 15218574 NR Description: eukaryotic translation initiation factor 4A
  misc_feature (1)..(414): Homolog of NCBI NO: 11358803 NR Description: RNA helicase RH23 [imported] - Arabidopsis
MAGMASDGTQYDPRQFDTKMNAILGEEGEETFYTNYDEVCDSFDAMELQPDLLRGIYAYGFEKPSAIQQRGIIPFCKGLDVIQQAQSGTGKTATFCSGVLQQLDISLVQCQALVLAPTRELAQQIEKVMRALGDYLGVKAQACVGGTSVREDQRVLQSGVHVVVGTPGRVFDLLRRQSLRADAIKMFVLDEADEMLSRGFKDQIYDIFQLLPSKVQVGVFSATMPPEALEITRKFMNKPVRILVKRDELTLEGIKQFYVNVDKEEWKLETLCDLYETLAITQSVIFVNTRRKVDWLTDKMRSRDHTVSATHGDMDQNTRDIIMREFRSGSSRVLITTDLLARGIDVQQVSLVINFDLPTQPENYLHRIGRSGRFGRKGVAINFMTSEDERMMADIQRFYNVVVEELPSNVADLL

SEQ ID NO: 37756 - protein, 411 aa, Arabidopsis thaliana
  peptide (1)..(411): Ceres Seq. ID no. 13487705
  misc_feature (51)..(254): Pfam Name: DEAD/DEAH box helicase Pfam Description: DEAD/DEAH box helicase
  misc_feature (1)..(411): Homolog of NCBI NO: 2500521 NR Description: Eukaryotic initiation factor 4A-15 (eIF-4A-15)
  misc_feature (1)..(411): Homolog of NCBI NO: 2500516 NR Description: Eukaryotic initiation factor 4A-7 (eIF-4A-7)
  misc_feature (1)..(411): Homolog of NCBI NO: 2119935 NR Description: translation initiation factor eIF-4A.15 - common
  misc_feature (1)..(411): Homolog of NCBI NO: 18400210 NR Description: eukaryotic translation initiation factor 4A-1
  misc_feature (1)..(411): Homolog of NCBI NO: 2119938 NR Description: translation initiation factor eIF-4A.14 - common
  misc_feature (1)..(411): Homolog of NCBI NO: 1170506 NR Description: Eukaryotic initiation factor 4A-2 (eIF-4A-2)
  misc_feature (1)..(411): Homolog of NCBI NO: 2119934 NR Description: translation initiation factor eIF-4A.7 - common
  misc_feature (1)..(411): Homolog of NCBI NO: 1170511 NR Description: Eukaryotic initiation factor 4A-10 (eIF-4A-10)
  misc_feature (1)..(411): Homolog of NCBI NO: 15218574 NR Description: eukaryotic translation initiation factor 4A
  misc_feature (1)..(411): Homolog of NCBI NO: 11358803 NR Description: RNA helicase RH23 [imported] - Arabidopsis
MASDGTQYDPRQFDTKMNAILGEEGEETFYTNYDEVCDSFDAMELQPDLLRGIYAYGFEKPSAIQQRGIIPFCKGLDVIQQAQSGTGKTATFCSGVLQQLDISLVQCQALVLAPTRELAQQIEKVMRALGDYLGVKAQACVGGTSVREDQRVLQSGVHVVVGTPGRVFDLLRRQSLRADAIKMFVLDEADEMLSRGFKDQIYDIFQLLPSKVQVGVFSATMPPEALEITRKFMNKPVRILVKRDELTLEGIKQFYVNVDKEEWKLETLCDLYETLAITQSVIFVNTRRKVDWLTDKMRSRDHTVSATHGDMDQNTRDIIMREFRSGSSRVLITTDLLARGIDVQQVSLVINFDLPTQPENYLHRIGRSGRFGRKGVAINFMTSEDERMMADIQRFYNVVVEELPSNVADLL

SEQ ID NO: 37757 - protein, 395 aa, Arabidopsis thaliana
  peptide (1)..(395): Ceres Seq. ID no. 13487706
  misc_feature (35)..(238): Pfam Name: DEAD/DEAH box helicase Pfam Description: DEAD/DEAH box helicase
  misc_feature (1)..(395): Homolog of NCBI NO: 2500521 NR Description: Eukaryotic initiation factor 4A-15 (eIF-4A-15)
  misc_feature (1)..(395): Homolog of NCBI NO: 2500516 NR Description: Eukaryotic initiation factor 4A-7 (eIF-4A-7)
  misc_feature (1)..(395): Homolog of NCBI NO: 18400210 NR Description: eukaryotic translation initiation factor 4A-1
  misc_feature (1)..(395): Homolog of NCBI NO: 2119935 NR Description: translation initiation factor eIF-4A.15 - common
  misc_feature (1)..(395): Homolog of NCBI NO: 2119938 NR Description: translation initiation factor eIF-4A.14 - common
  misc_feature (1)..(395): Homolog of NCBI NO: 1170506 NR Description: Eukaryotic initiation factor 4A-2 (eIF-4A-2)
  misc_feature (1)..(395): Homolog of NCBI NO: 2119934 NR Description: translation initiation factor eIF-4A.7 - common
  misc_feature (1)..(395): Homolog of NCBI NO: 1170511 NR Description: Eukaryotic initiation factor 4A-10 (eIF-4A-10)
  misc_feature (1)..(395): Homolog of NCBI NO: 15218574 NR Description: eukaryotic translation initiation factor 4A
  misc_feature (1)..(395): Homolog of NCBI NO: 11358803 NR Description: RNA helicase RH23 [imported] - Arabidopsis
MNAILGEEGEETFYTNYDEVCDSFDAMELQPDLLRGIYAYGFEKPSAIQQRGIIPFCKGLDVIQQAQSGTGKTATFCSGVLQQLDISLVQCQALVLAPTRELAQQIEKVMRALGDYLGVKAQACVGGTSVREDQRVLQSGVHVVVGTPGRVFDLLRRQSLRADAIKMFVLDEADEMLSRGFKDQIYDIFQLLPSKVQVGVFSATMPPEALEITRKFMNKPVRILVKRDELTLEGIKQFYVNVDKEEWKLETLCDLYETLAITQSVIFVNTRRKVDWLTDKMRSRDHTVSATHGDMDQNTRDIIMREFRSGSSRVLITTDLLARGIDVQQVSLVINFDLPTQPENYLHRIGRSGRFGRKGVAINFMTSEDERMMADIQRFYNVVVEELPSNVADLL

SEQ ID NO: 37758 - DNA, 1167 bp, Arabidopsis thaliana
  misc_feature (1)..(1167): Ceres Seq. ID no. 12661399
  misc_feature: MA Experiment ID: 108434 Result: Up-regulated in Transcription
  misc_feature: MA Experiment 108434 PARAMETER Experiment Name: At_Root_Tips_cDNA_P Parameter: Tissue Value: Root Tips
  misc_feature: MA Experiment ID: 108435 Result: Up-regulated in Transcription
  misc_feature: MA Experiment 108435 PARAMETER Experiment Name: At_stm_Mutants_cDNA_P Parameter: Plant Line Value: wt Landsburg vs stm
  misc_feature: MA Experiment 108435 PARAMETER Experiment Name: At_stm_Mutants_cDNA_P Parameter: Tissue Value: Shoot Apical Meristem Region
  misc_feature: MA Experiment ID: 20000087 Result: Down-regulated in Transcription
  misc_feature: MA Experiment 20000087 PARAMETER Experiment Name: At_100uM_ABA_Mutants_cDNA_P Parameter: Plant Line Value: WS
  misc_feature: MA Experiment 20000087 PARAMETER Experiment Name: At_100uM_ABA_Mutants_cDNA_P Parameter: Timepoint (hr) Value: 6
  misc_feature: MA Experiment 20000087 PARAMETER Experiment Name: At_100uM_ABA_Mutants_cDNA_P Parameter: Tissue Value: Aerial
  misc_feature: MA Experiment 20000087 PARAMETER Experiment Name: At_100uM_ABA_Mutants_cDNA_P Parameter: Treatment Value: 100uM ABA vs. No Treatment
  misc_feature: MA Experiment ID: 20000089 Result: Down-regulated in Transcription
  misc_feature: MA Experiment ID: 20000111 Result: Down-regulated in Transcription
  misc_feature: MA Experiment 20000111 PARAMETER Experiment Name: At_42deg_Heat_cDNA_P Parameter: Temperature (deg C) Value: 42 vs. 22
  misc_feature: MA Experiment 20000111 PARAMETER Experiment Name: At_42deg_Heat_cDNA_P Parameter: Timepoint (hr) Value: 6
  misc_feature: MA Experiment 20000111 PARAMETER Experiment Name: At_42deg_Heat_cDNA_P Parameter: Tissue Value: Aerial
  misc_feature: MA Experiment ID: 20000234 Result: Down-regulated in Transcription
  misc_feature: MA Experiment 20000234 PARAMETER Experiment Name: At_Siliques_P Parameter: Age (day) Value: 21
  misc_feature: MA Experiment 20000234 PARAMETER Experiment Name: At_Siliques_P Parameter: Organism Value: A. thaliana
  misc_feature: MA Experiment 20000234 PARAMETER Experiment Name: At_Siliques_P Parameter: Plant Line Value: WS
  misc_feature: MA Experiment 20000234 PARAMETER Experiment Name: At_Siliques_P Parameter: Tissue Value: Less Than 5mm Siliques vs. Whole Plant
  misc_feature: MA Experiment ID: 20000235 Result: Down-regulated in Transcription
  misc_feature: MA Experiment 20000235 PARAMETER Experiment Name: At_Siliques_P Parameter: Age (day) Value: 21
  misc_feature: MA Experiment 20000235 PARAMETER Experiment Name: At_Siliques_P Parameter: Organism Value: A. thaliana
  misc_feature: MA Experiment 20000235 PARAMETER Experiment Name: At_Siliques_P Parameter: Plant Line Value: WS
  misc_feature: MA Experiment 20000235 PARAMETER Experiment Name: At_Siliques_P Parameter: Tissue Value: 5-10mm Siliques vs. Whole Plant
  misc_feature: MA Experiment ID: 20000264 Result: Down-regulated in Transcription
  misc_feature: MA Experiment 20000264 PARAMETER Experiment Name: At_Open_Flower_P Parameter: Age (day) Value: 21
  misc_feature: MA Experiment 20000264 PARAMETER Experiment Name: At_Open_Flower_P Parameter: Plant Line Value: WS
  misc_feature: MA Experiment 20000264 PARAMETER Experiment Name: At_Open_Flower_P Parameter: Tissue Value: Open Flower vs. Whole Plant
  misc_feature: MA Experiment ID: 20000265 Result: Down-regulated in Transcription
  misc_feature: MA Experiment 20000265 PARAMETER Experiment Name: At_Open_Flower_P Parameter: Age (day) Value: 21
  misc_feature: MA Experiment 20000265 PARAMETER Experiment Name: At_Open_Flower_P Parameter: Plant Line Value: WS
  misc_feature: MA Experiment 20000265 PARAMETER Experiment Name: At_Open_Flower_P Parameter: Tissue Value: Closed Flower vs. Whole Plant
  misc_feature: MA Experiment ID: 20000286 Result: Down-regulated in Transcription
  misc_feature: MA Experiment 20000286 PARAMETER Experiment Name: At_Open_Flower_P Parameter: Age (day) Value: 21
  misc_feature: MA Experiment 20000286 PARAMETER Experiment Name: At_Open_Flower_P Parameter: Plant Line Value: WS
  misc_feature: MA Experiment 20000286 PARAMETER Experiment Name: At_Open_Flower_P Parameter: Tissue Value: Half Open vs. Whole Plant
  misc_feature: MA Experiment ID: 20000308 Result: Down-regulated in Transcription
  misc_feature: MA Experiment 20000308 PARAMETER Experiment Name: At_100mM_NaCl__P Parameter: Age (day) Value: 17
  misc_feature: MA Experiment 20000308 PARAMETER Experiment Name: At_100mM_NaCl__P Parameter: Organism Value: A. thaliana
  misc_feature: MA Experiment 20000308 PARAMETER Experiment Name: At_100mM_NaCl__P Parameter: Plant Line Value: WS
  misc_feature: MA Experiment 20000308 PARAMETER Experiment Name: At_100mM_NaCl__P Parameter: Timepoint (hr) Value: 72
  misc_feature: MA Experiment 20000308 PARAMETER Experiment Name: At_100mM_NaCl__P Parameter: Tissue Value: Whole Plant
  misc_feature: MA Experiment 20000308 PARAMETER Experiment Name: At_100mM_NaCl__P Parameter: Treatment Value: 100mM NaCl vs. No Treatment
  misc_feature: MA Experiment ID: 20000437 Result: Down-regulated in Transcription
  misc_feature: MA Experiment 20000437 PARAMETER Experiment Name: At_Drought_P Parameter: Age (day) Value: 8
  misc_feature: MA Experiment 20000437 PARAMETER Experiment Name: At_Drought_P Parameter: Organism Value: A. thaliana
  misc_feature: MA Experiment 20000437 PARAMETER Experiment Name: At_Drought_P Parameter: Plant Line Value: WS
  misc_feature: MA Experiment 20000437 PARAMETER Experiment Name: At_Drought_P Parameter: Timepoint (hr) Value: 24
  misc_feature: MA Experiment 20000437 PARAMETER Experiment Name: At_Drought_P Parameter: Tissue Value: Whole Plant
  misc_feature: MA Experiment 20000437 PARAMETER Experiment Name: At_Drought_P Parameter: Treatment Value: Drought vs. No Drought
  misc_feature: MA Experiment ID: 20000575 Result: Up-regulated in Transcription
  misc_feature: MA Experiment 20000575 PARAMETER Experiment Name: At_100uM_ABA_Mutants__P Parameter: Organism Value: A. thaliana
  misc_feature: MA Experiment 20000575 PARAMETER Experiment Name: At_100uM_ABA_Mutants__P Parameter: Plant Line Value: CS22
  misc_feature: MA Experiment 20000575 PARAMETER Experiment Name: At_100uM_ABA_Mutants__P Parameter: Timepoint (hr) Value: 6
  misc_feature: MA Experiment 20000575 PARAMETER Experiment Name: At_100uM_ABA_Mutants__P Parameter: Tissue Value: Whole Plant
  misc_feature: MA Experiment 20000575 PARAMETER Experiment Name: At_100uM_ABA_Mutants__P Parameter: Treatment Value: 1uM ABA vs. No Treatment
  misc_feature: MA Experiment ID: 20000576 Result: Up-regulated in Transcription
  misc_feature: MA Experiment 20000576 PARAMETER Experiment Name: At_100uM_ABA_Mutants__P Parameter: Organism Value: A. thaliana
  misc_feature: MA Experiment 20000576 PARAMETER Experiment Name: At_100uM_ABA_Mutants__P Parameter: Plant Line Value: CS23
  misc_feature: MA Experiment 20000576 PARAMETER Experiment Name: At_100uM_ABA_Mutants__P Parameter: Timepoint (hr) Value: 6
  misc_feature: MA Experiment 20000576 PARAMETER Experiment Name: At_100uM_ABA_Mutants__P Parameter: Tissue Value: Whole Plant
  misc_feature: MA Experiment 20000576 PARAMETER Experiment Name: At_100uM_ABA_Mutants__P Parameter: Treatment Value: 1uM ABA vs. No Treatment
  misc_feature: MA Experiment ID: 20000794 Result: Down-regulated in Transcription
  misc_feature: MA Experiment 20000794 PARAMETER Experiment Name: At_Petals_P Parameter: Age (day) Value: 23-25 days
  misc_feature: MA Experiment 20000794 PARAMETER Experiment Name: At_Petals_P Parameter: Plant Line Value: WS
  misc_feature: MA Experiment 20000794 PARAMETER Experiment Name: At_Petals_P Parameter: Tissue Value: Petals vs. Whole plant
  misc_feature: MA Experiment ID: 20001247 Result: Up-regulated in Transcription
  misc_feature: MA Experiment 20001247 PARAMETER Experiment Name: At_Far-red-induction_P Parameter: Age (day) Value: 7
  misc_feature: MA Experiment 20001247 PARAMETER Experiment Name: At_Far-red-induction_P Parameter: Light Value: Far-red vs. White
  misc_feature: MA Experiment 20001247 PARAMETER Experiment Name: At_Far-red-induction_P Parameter: Organism Value: A. thaliana
  misc_feature: MA Experiment 20001247 PARAMETER Experiment Name: At_Far-red-induction_P Parameter: Plant Line Value: Columbia
  misc_feature: MA Experiment 20001247 PARAMETER Experiment Name: At_Far-red-induction_P Parameter: Timepoint (hr) Value: 1
  misc_feature: MA Experiment 20001247 PARAMETER Experiment Name: At_Far-red-induction_P Parameter: Tissue Value: Whole Plant
  misc_feature: MA Experiment ID: 20001248 Result: Up-regulated in Transcription
  misc_feature: MA Experiment 20001248 PARAMETER Experiment Name: At_Far-red-induction_P Parameter: Age (day) Value: 7
  misc_feature: MA Experiment 20001248 PARAMETER Experiment Name: At_Far-red-induction_P Parameter: Light Value: Far-red vs. White
  misc_feature: MA Experiment 20001248 PARAMETER Experiment Name: At_Far-red-induction_P Parameter: Organism Value: A. thaliana
  misc_feature: MA Experiment 20001248 PARAMETER Experiment Name: At_Far-red-induction_P Parameter: Plant Line Value: Columbia
  misc_feature: MA Experiment 20001248 PARAMETER Experiment Name: At_Far-red-induction_P Parameter: Timepoint (hr) Value: 4
  misc_feature: MA Experiment 20001248 PARAMETER Experiment Name: At_Far-red-induction_P Parameter: Tissue Value: Whole Plant
  misc_feature: MA Experiment ID: 20001450 Result: Up-regulated in Transcription
  misc_feature: MA Experiment 20001450 PARAMETER Experiment Name: At_Far-red-induction_P Parameter: Age (day) Value: 7
  misc_feature: MA Experiment 20001450 PARAMETER Experiment Name: At_Far-red-induction_P Parameter: Light Value: Far-red vs. White
  misc_feature: MA Experiment 20001450 PARAMETER Experiment Name: At_Far-red-induction_P Parameter: Organism Value: A. thaliana
  misc_feature: MA Experiment 20001450 PARAMETER Experiment Name: At_Far-red-induction_P Parameter: Plant Line Value: Columbia
  misc_feature: MA Experiment 20001450 PARAMETER Experiment Name: At_Far-red-induction_P Parameter: Timepoint (hr) Value: 8
  misc_feature: MA Experiment 20001450 PARAMETER Experiment Name: At_Far-red-induction_P Parameter: Tissue Value: Whole Plant
  misc_feature: MA Experiment ID: 20001451 Result: Up-regulated in Transcription
  misc_feature: MA Experiment 20001451 PARAMETER Experiment Name: At_Far-red-induction_P Parameter: Age (day) Value: 7
  misc_feature: MA Experiment 20001451 PARAMETER Experiment Name: At_Far-red-induction_P Parameter: Light Value: Far-red vs. White
  misc_feature: MA Experiment 20001451 PARAMETER Experiment Name: At_Far-red-induction_P Parameter: Organism Value: A. thaliana
  misc_feature: MA Experiment 20001451 PARAMETER Experiment Name: At_Far-red-induction_P Parameter: Plant Line Value: Columbia
  misc_feature: MA Experiment 20001451 PARAMETER Experiment Name: At_Far-red-induction_P Parameter: Timepoint (hr) Value: 24
  misc_feature: MA Experiment 20001451 PARAMETER Experiment Name: At_Far-red-induction_P Parameter: Tissue Value: Whole Plant
  misc_feature: MA Experiment ID: 20001503 Result: Up-regulated in Transcription
  misc_feature: MA Experiment 20001503 PARAMETER Experiment Name: At_Far-red-enriched_P Parameter: Age (day) Value: 7
  misc_feature: MA Experiment 20001503 PARAMETER Experiment Name: At_Far-red-enriched_P Parameter: Light Value: Far-red enriched vs. White
  misc_feature: MA Experiment 20001503 PARAMETER Experiment Name: At_Far-red-enriched_P Parameter: Organism Value: A. thaliana
  misc_feature: MA Experiment 20001503 PARAMETER Experiment Name: At_Far-red-enriched_P Parameter: Plant Line Value: Columbia
  misc_feature: MA Experiment 20001503 PARAMETER Experiment Name: At_Far-red-enriched_P Parameter: Timepoint (day) Value: 3
  misc_feature: MA Experiment 20001503 PARAMETER Experiment Name: At_Far-red-enriched_P Parameter: Tissue Value: Whole Plant
  misc_feature: MA Experiment ID: 20001504 Result: Up-regulated in Transcription
  misc_feature: MA Experiment 20001504 PARAMETER Experiment Name: At_Far-red-enriched_P Parameter: Age (day) Value: 10
  misc_feature: MA Experiment 20001504 PARAMETER Experiment Name: At_Far-red-enriched_P Parameter: Light Value: Far-red enriched vs. White
  misc_feature: MA Experiment 20001504 PARAMETER Experiment Name: At_Far-red-enriched_P Parameter: Organism Value: A. thaliana
  misc_feature: MA Experiment 20001504 PARAMETER Experiment Name: At_Far-red-enriched_P Parameter: Plant Line Value: Columbia
  misc_feature: MA Experiment 20001504 PARAMETER Experiment Name: At_Far-red-enriched_P Parameter: Timepoint (day) Value: 6
  misc_feature: MA Experiment 20001504 PARAMETER Experiment Name: At_Far-red-enriched_P Parameter: Tissue Value: Whole Plant
  misc_feature: MA Experiment ID: 20001556 Result: Down-regulated in Transcription
  misc_feature: MA Experiment 20001556 PARAMETER Experiment Name: At_Drought_Soil_Dry_P Parameter: Age (day) Value: 26
  misc_feature: MA Experiment 20001556 PARAMETER Experiment Name: At_Drought_Soil_Dry_P Parameter: Organism Value: A. thaliana
  misc_feature: MA Experiment 20001556 PARAMETER Experiment Name: At_Drought_Soil_Dry_P Parameter: Plant Line Value: WS
  misc_feature: MA Experiment 20001556 PARAMETER Experiment Name: At_Drought_Soil_Dry_P Parameter: Post Timepoint (hr) Value: None
  misc_feature: MA Experiment 20001556 PARAMETER Experiment Name: At_Drought_Soil_Dry_P Parameter: Post-Treatment Value: None
  misc_feature: MA Experiment 20001556 PARAMETER Experiment Name: At_Drought_Soil_Dry_P Parameter: Timepoint (day) Value: 12
  misc_feature: MA Experiment 20001556 PARAMETER Experiment Name: At_Drought_Soil_Dry_P Parameter: Treatment Value: Drought vs. No Drought
  misc_feature: MA Experiment ID: 20001557 Result: Down-regulated in Transcription
  misc_feature: MA Experiment 20001557 PARAMETER Experiment Name: At_Drought_Soil_Dry_P Parameter: Age (day) Value: 27
  misc_feature: MA Experiment 20001557 PARAMETER Experiment Name: At_Drought_Soil_Dry_P Parameter: Organism Value: A. thaliana
  misc_feature: MA Experiment 20001557 PARAMETER Experiment Name: At_Drought_Soil_Dry_P Parameter: Plant Line Value: WS
  misc_feature: MA Experiment 20001557 PARAMETER Experiment Name: At_Drought_Soil_Dry_P Parameter: Post Timepoint (hr) Value: 3
  misc_feature: MA Experiment 20001557 PARAMETER Experiment Name: At_Drought_Soil_Dry_P Parameter: Post-Treatment Value: Re-Water vs. No Drought
  misc_feature: MA Experiment 20001557 PARAMETER Experiment Name: At_Drought_Soil_Dry_P Parameter: Timepoint (day) Value: 13
  misc_feature: MA Experiment 20001557 PARAMETER Experiment Name: At_Drought_Soil_Dry_P Parameter: Treatment Value: Drought vs. No Drought
  misc_feature: MA Experiment ID: 20001558 Result: Down-regulated in Transcription
  misc_feature: MA Experiment 20001558 PARAMETER Experiment Name: At_Drought_Soil_Dry_P Parameter: Age (day) Value: 27
  misc_feature: MA Experiment 20001558 PARAMETER Experiment Name: At_Drought_Soil_Dry_P Parameter: Organism Value: A. thaliana
  misc_feature: MA Experiment 20001558 PARAMETER Experiment Name: At_Drought_Soil_Dry_P Parameter: Plant Line Value: WS
  misc_feature: MA Experiment 20001558 PARAMETER Experiment Name: At_Drought_Soil_Dry_P Parameter: Post Timepoint (hr) Value: 6
  misc_feature: MA Experiment 20001558 PARAMETER Experiment Name: At_Drought_Soil_Dry_P Parameter: Post-Treatment Value: Re-Water vs. No Drought
  misc_feature: MA Experiment 20001558 PARAMETER Experiment Name: At_Drought_Soil_Dry_P Parameter: Timepoint (day) Value: 13
  misc_feature: MA Experiment 20001558 PARAMETER Experiment Name: At_Drought_Soil_Dry_P Parameter: Treatment Value: Drought vs. No Drought
  misc_feature: MA Experiment ID: 20001559 Result: Down-regulated in Transcription
  misc_feature: MA Experiment 20001559 PARAMETER Experiment Name: At_Drought_Soil_Dry_P Parameter: Age (day) Value: 28
  misc_feature: MA Experiment 20001559 PARAMETER Experiment Name: At_Drought_Soil_Dry_P Parameter: Organism Value: A. thaliana
  misc_feature: MA Experiment 20001559 PARAMETER Experiment Name: At_Drought_Soil_Dry_P Parameter: Plant Line Value: WS
  misc_feature: MA Experiment 20001559 PARAMETER Experiment Name: At_Drought_Soil_Dry_P Parameter: Post Timepoint (hr) Value: 29
  misc_feature: MA Experiment 20001559 PARAMETER Experiment Name: At_Drought_Soil_Dry_P Parameter: Post-Treatment Value: Re-Water vs. No Drought
  misc_feature: MA Experiment 20001559 PARAMETER Experiment Name: At_Drought_Soil_Dry_P Parameter: Timepoint (day) Value: 14
  misc_feature: MA Experiment 20001559 PARAMETER Experiment Name: At_Drought_Soil_Dry_P Parameter: Treatment Value: Drought vs. No Drought
  misc_feature: MA Experiment ID: 20001560 Result: Down-regulated in Transcription
  misc_feature: MA Experiment 20001560 PARAMETER Experiment Name: At_Drought_Soil_Dry_P Parameter: Age (day) Value: 28
  misc_feature: MA Experiment 20001560 PARAMETER Experiment Name: At_Drought_Soil_Dry_P Parameter: Organism Value: A. thaliana
  misc_feature: MA Experiment 20001560 PARAMETER Experiment Name: At_Drought_Soil_Dry_P Parameter: Plant Line Value: WS
  misc_feature: MA Experiment 20001560 PARAMETER Experiment Name: At_Drought_Soil_Dry_P Parameter: Post Timepoint (hr) Value: None
  misc_feature: MA Experiment 20001560 PARAMETER Experiment Name: At_Drought_Soil_Dry_P Parameter: Post-Treatment Value: None
  misc_feature: MA Experiment 20001560 PARAMETER Experiment Name: At_Drought_Soil_Dry_P Parameter: Timepoint (day) Value: 14
  misc_feature: MA Experiment 20001560 PARAMETER Experiment Name: At_Drought_Soil_Dry_P Parameter: Treatment Value: Drought vs. No Drought
  misc_feature: MA Experiment ID: 20001768 Result: Up-regulated in Transcription
  misc_feature: MA Experiment 20001768 PARAMETER Experiment Name: At_Far-red-enriched-adult_P Parameter: Age (day) Value: 28
  misc_feature: MA Experiment 20001768 PARAMETER Experiment Name: At_Far-red-enriched-adult_P Parameter: Light Value: Far-red enriched vs. White
  misc_feature: MA Experiment 20001768 PARAMETER Experiment Name: At_Far-red-enriched-adult_P Parameter: Organism Value: A. thaliana
  misc_feature: MA Experiment 20001768 PARAMETER Experiment Name: At_Far-red-enriched-adult_P Parameter: Plant Line Value: Columbia
  misc_feature: MA Experiment 20001768 PARAMETER Experiment Name: At_Far-red-enriched-adult_P Parameter: Timepoint (hr) Value: 1
  misc_feature: MA Experiment 20001768 PARAMETER Experiment Name: At_Far-red-enriched-adult_P Parameter: Tissue Value: Aerial
  misc_feature: MA Experiment ID: 20001769 Result: Up-regulated in Transcription
  misc_feature: MA Experiment 20001769 PARAMETER Experiment Name: At_Far-red-enriched-adult_P Parameter: Age (day) Value: 28
  misc_feature: MA Experiment 20001769 PARAMETER Experiment Name: At_Far-red-enriched-adult_P Parameter: Light Value: Far-red enriched vs. White
  misc_feature: MA Experiment 20001769 PARAMETER Experiment Name: At_Far-red-enriched-adult_P Parameter: Organism Value: A. thaliana
  misc_feature: MA Experiment 20001769 PARAMETER Experiment Name: At_Far-red-enriched-adult_P Parameter: Plant Line Value: Columbia
  misc_feature: MA Experiment 20001769 PARAMETER Experiment Name: At_Far-red-enriched-adult_P Parameter: Timepoint (hr) Value: 4
  misc_feature: MA Experiment 20001769 PARAMETER Experiment Name: At_Far-red-enriched-adult_P Parameter: Tissue Value: Aerial
  misc_feature: MA Experiment ID: 20001770 Result: Up-regulated in Transcription
  misc_feature: MA Experiment 20001770 PARAMETER Experiment Name: At_Far-red-enriched-adult_P Parameter: Age (day) Value: 28
  misc_feature: MA Experiment 20001770 PARAMETER Experiment Name: At_Far-red-enriched-adult_P Parameter: Light Value: Far-red enriched vs. White
  misc_feature: MA Experiment 20001770 PARAMETER Experiment Name: At_Far-red-enriched-adult_P Parameter: Organism Value: A. thaliana
  misc_feature: MA Experiment 20001770 PARAMETER Experiment Name: At_Far-red-enriched-adult_P Parameter: Plant Line Value: Columbia
  misc_feature: MA Experiment 20001770 PARAMETER Experiment Name: At_Far-red-enriched-adult_P Parameter: Timepoint (hr) Value: 8
  misc_feature: MA Experiment 20001770 PARAMETER Experiment Name: At_Far-red-enriched-adult_P Parameter: Tissue Value: Aerial
  misc_feature: MA Experiment ID: 20001771 Result: Up-regulated in Transcription
  misc_feature: MA Experiment 20001771 PARAMETER Experiment Name: At_Far-red-enriched-adult_P Parameter: Age (day) Value: 28
  misc_feature: MA Experiment 20001771 PARAMETER Experiment Name: At_Far-red-enriched-adult_P Parameter: Light Value: Far-red enriched vs. White
  misc_feature: MA Experiment 20001771 PARAMETER Experiment Name: At_Far-red-enriched-adult_P Parameter: Organism Value: A. thaliana
  misc_feature: MA Experiment 20001771 PARAMETER Experiment Name: At_Far-red-enriched-adult_P Parameter: Plant Line Value: Columbia
  misc_feature: MA Experiment 20001771 PARAMETER Experiment Name: At_Far-red-enriched-adult_P Parameter: Timepoint (hr) Value: 16
  misc_feature: MA Experiment 20001771 PARAMETER Experiment Name: At_Far-red-enriched-adult_P Parameter: Tissue Value: Aerial
  misc_feature: MA Experiment ID: 20001773 Result: Up-regulated in Transcription
  misc_feature: MA Experiment 20001773 PARAMETER Experiment Name: At_Far-red-enriched-adult_P Parameter: Age (day) Value: 30
  misc_feature: MA Experiment 20001773 PARAMETER Experiment Name: At_Far-red-enriched-adult_P Parameter: Light Value: Far-red enriched vs. White
  misc_feature: MA Experiment 20001773 PARAMETER Experiment Name: At_Far-red-enriched-adult_P Parameter: Organism Value: A. thaliana
  misc_feature: MA Experiment 20001773 PARAMETER Experiment Name: At_Far-red-enriched-adult_P Parameter: Plant Line Value: Columbia
  misc_feature: MA Experiment 20001773 PARAMETER Experiment Name: At_Far-red-enriched-adult_P Parameter: Timepoint (hr) Value: 48
  misc_feature: MA Experiment 20001773 PARAMETER Experiment Name: At_Far-red-enriched-adult_P Parameter: Tissue Value: Aerial
  misc_feature: MA Experiment ID: 20001774 Result: Up-regulated in Transcription
  misc_feature: MA Experiment 20001774 PARAMETER Experiment Name: At_Far-red-enriched-adult_P Parameter: Age (day) Value: 31
  misc_feature: MA Experiment 20001774 PARAMETER Experiment Name: At_Far-red-enriched-adult_P Parameter: Light Value: Far-red enriched vs. White
  misc_feature: MA Experiment 20001774 PARAMETER Experiment Name: At_Far-red-enriched-adult_P Parameter: Organism Value: A. thaliana
  misc_feature: MA Experiment 20001774 PARAMETER Experiment Name: At_Far-red-enriched-adult_P Parameter: Plant Line Value: Columbia
  misc_feature: MA Experiment 20001774 PARAMETER Experiment Name: At_Far-red-enriched-adult_P Parameter: Timepoint (hr) Value: 72
  misc_feature: MA Experiment 20001774 PARAMETER Experiment Name: At_Far-red-enriched-adult_P Parameter: Tissue Value: Aerial
  misc_feature: MA Experiment ID: 20001904 Result: Down-regulated in Transcription
  misc_feature: MA Experiment 20001904 PARAMETER Experiment Name: At_Drought_Reproduction_P Parameter: Age (day) Value: 37
  misc_feature: MA Experiment 20001904 PARAMETER Experiment Name: At_Drought_Reproduction_P Parameter: Organism Value: A. thaliana
  misc_feature: MA Experiment 20001904 PARAMETER Experiment Name: At_Drought_Reproduction_P Parameter: Plant Line Value: WS
  misc_feature: MA Experiment 20001904 PARAMETER Experiment Name: At_Drought_Reproduction_P Parameter: Timepoint (day) Value: 7
  misc_feature: MA Experiment 20001904 PARAMETER Experiment Name: At_Drought_Reproduction_P Parameter: Tissue Value: Rosettes
  misc_feature: MA Experiment 20001904 PARAMETER Experiment Name: At_Drought_Reproduction_P Parameter: Treatment Value: Drought vs. No Drought
  misc_feature: Phenotype: WHOLE PLANT Color-Dark Green
  misc_feature: Phenotype: ROSETTE LEAVES Shape-Lanceolate
  misc_feature: Phenotype: WHOLE PLANT Color-Dark Green
  misc_feature: Phenotype: ROSETTE LEAVES Shape-Lanceolate
  misc_feature: Phenotype: WHOLE PLANT Color-Dark Green
  misc_feature: Phenotype: ROSETTE LEAVES Shape-Lanceolate
  misc_feature: Phenotype: WHOLE PLANT Color-Dark Green
  misc_feature: Phenotype: ROSETTE LEAVES Shape-Lanceolate
  misc_feature: Phenotype: WHOLE PLANT Color-Dark Green
  misc_feature: Phenotype: ROSETTE LEAVES Shape-Lanceolate
  misc_feature: Phenotype: WHOLE PLANT Color-Dark Green
  misc_feature: Phenotype: ROSETTE LEAVES Shape-Lanceolate
  misc_feature: Phenotype: WHOLE PLANT Color-Dark Green
tgcccccagctagtcacatactcatgattgcaaaatctctctctctctctgcctctctatatattaacctttcttcttcctttactttctcatcttctatctctcaaaagaaaagcagacaactttatttgcaaaaacagagtttttttttcttatcttgagaaagttcaacagaagatgatgttcgagaaagacgatctgggtctaagcttaggcttgaattttccaaagaaacagatcaatctcaaatcaaatccatctgtttctgttactccttcttcttcttcttttggattattcagaagatcttcatggaacgagagttttacttcttcagttccaaactcagattcgtcacaaaaagaaacaagaactttcatccgaggaatcgacgtgaacagaccaccgtctacagcggaatacggcgacgaagacgctggagtatcttcacctaacagtacagtctcaagctctacagggaaaagaagcgagagagaagaagacacagatccacaaggctcaagaggaatcagtgacgatgaagatggtgataactccaggaaaaagcttagactttccaaagatcaatctgctattcttgaagagaccttcaaagatcacagtactctcaatccgaagcagaagcaagcattggctaaacaattagggttacgagcaagacaagtggaagtttggtttcagaacagacgagcaagaacaaagctgaagcaaacggaggtagactgcgagttcttacggagatgctgcgagaatctaacggaagagaaccgtcggctacaaaaagaagtaacggaattgagagcacttaagctctctcctcagttctacatgcacatgagcccacccactactttgaccatgtgcccttcatgtgaacacgtgtcggtcccgccaccacaacctcaggctgctacgtcagcgcaccaccggtcgttgccggtcaatgcgtgggctcctgcgacgaggatatctcacggcttgacttttgacgctcttcgtcctaggtcctaagtctttttacttgcaaccaaagggcattttggtcgttttttaagtttcatggaccagatatgcatgtagttgttaacatgtatgtattttcttagaaagaaagaaaaacagattaatatttttctagcttaaacc

SEQ ID NO: 37759 - protein, 284 aa, Arabidopsis thaliana
  peptide (1)..(284): Ceres Seq. ID no. 12661400
  misc_feature (1)..(109): Pfam Name: HD-ZIP protein N terminus Pfam Description: HD-ZIP protein N terminus
  misc_feature (1)..(284): Homolog of NCBI NO: 8919876 NR Description: hypothetical protein [Capsella rubella]
  misc_feature (1)..(284): Homolog of NCBI NO: 22759 NR Description: HAT4 [Arabidopsis thaliana]
  misc_feature (1)..(284): Homolog of NCBI NO: 15235882 NR Description: homeobox-leucine zipper protein HAT4 (HD-Zip
MMFEKDDLGLSLGLNFPKKQINLKSNPSVSVTPSSSSFGLFRRSSWNESFTSSVPNSDSSQKETRTFIRGIDVNRPPSTAEYGDEDAGVSSPNSTVSSSTGKRSEREEDTDPQGSRGISDDEDGDNSRKKLRLSKDQSAILEETFKDHSTLNPKQKQALAKQLGLRARQVEVWFQNRRARTKLKQTEVDCEFLRRCCENLTEENRRLQKEVTELRALKLSPQFYMHMSPPTTLTMCPSCEHVSVPPPQPQAATSAHHRSLPVNAWAPATRISHGLTFDALRPRS

SEQ ID NO: 37760 - protein, 283 aa, Arabidopsis thaliana
  peptide (1)..(283): Ceres Seq. ID no. 12661401
  misc_feature (1)..(108): Pfam Name: HD-ZIP protein N terminus Pfam Description: HD-ZIP protein N terminus
  misc_feature (1)..(283): Homolog of NCBI NO: 8919876 NR Description: hypothetical protein [Capsella rubella]
  misc_feature (1)..(283): Homolog of NCBI NO: 22759 NR Description: HAT4 [Arabidopsis thaliana]
  misc_feature (1)..(283): Homolog of NCBI NO: 15235882 NR Description: homeobox-leucine zipper protein HAT4 (HD-Zip
MFEKDDLGLSLGLNFPKKQINLKSNPSVSVTPSSSSFGLFRRSSWNESFTSSVPNSDSSQKETRTFIRGIDVNRPPSTAEYGDEDAGVSSPNSTVSSSTGKRSEREEDTDPQGSRGISDDEDGDNSRKKLRLSKDQSAILEETFKDHSTLNPKQKQALAKQLGLRARQVEVWFQNRRARTKLKQTEVDCEFLRRCCENLTEENRRLQKEVTELRALKLSPQFYMHMSPPTTLTMCPSCEHVSVPPPQPQAATSAHHRSLPVNAWAPATRISHGLTFDALRPRS

SEQ ID NO: 37761 - DNA, 465 bp, Arabidopsis thaliana; identical to SEQ ID NO: 30079
  misc_feature (1)..(465): Ceres Seq. ID no. 12558719
  misc_feature: MA Experiment ID: 108434 Result: Up-regulated in Transcription
  misc_feature: MA Experiment 108434 PARAMETER Experiment Name: At_Root_Tips_cDNA_P Parameter: Tissue Value: Root Tips
  misc_feature: MA Experiment ID: 108463 Result: Down-regulated in Transcription
  misc_feature: MA Experiment 108463 PARAMETER Experiment Name: At_Germinating_Seeds_cDNA_P Parameter: Age (day) Value: 3 vs. 0
  misc_feature: MA Experiment 108463 PARAMETER Experiment Name: At_Germinating_Seeds_cDNA_P Parameter: Tissue Value: Germinating Seeds
  misc_feature: MA Experiment ID: 108561 Result: Down-regulated in Transcription
  misc_feature: MA Experiment 108561 PARAMETER Experiment Name: At_100uM_ABA_cDNA_P Parameter: Timepoint (hr) Value: 6
  misc_feature: MA Experiment 108561 PARAMETER Experiment Name: At_100uM_ABA_cDNA_P Parameter: Tissue Value: Aerial
  misc_feature: MA Experiment 108561 PARAMETER Experiment Name: At_100uM_ABA_cDNA_P Parameter: Treatment Value: 100uM ABA vs. No Treatment
  misc_feature: MA Experiment ID: 108573 Result: Down-regulated in Transcription
  misc_feature: MA Experiment 108573 PARAMETER Experiment Name: At_Drought_cDNA_P Parameter: Timepoint (hr) Value: 6
  misc_feature: MA Experiment 108573 PARAMETER Experiment Name: At_Drought_cDNA_P Parameter: Tissue Value: Aerial
  misc_feature: MA Experiment 108573 PARAMETER Experiment Name: At_Drought_cDNA_P Parameter: Treatment Value: Drought vs. No Drought
  misc_feature: MA Experiment ID: 20000071 Result: Down-regulated in Transcription
  misc_feature: MA Experiment 20000071 PARAMETER Experiment Name: At_100uM_ABA_Mutants_cDNA_P Parameter: Plant Line Value: CS8104
  misc_feature: MA Experiment 20000071 PARAMETER Experiment Name: At_100uM_ABA_Mutants_cDNA_P Parameter: Timepoint (hr) Value: 6
  misc_feature: MA Experiment 20000071 PARAMETER Experiment Name: At_100uM_ABA_Mutants_cDNA_P Parameter: Tissue Value: Aerial
  misc_feature: MA Experiment 20000071 PARAMETER Experiment Name: At_100uM_ABA_Mutants_cDNA_P Parameter: Treatment Value: 100uM ABA vs. No Treatment
  misc_feature: MA Experiment ID: 20000117 Result: Down-regulated in Transcription
  misc_feature: MA Experiment 20000117 PARAMETER Experiment Name: At_100uM_ABA_Mutants_cDNA_P Parameter: Plant Line Value: Columbia
  misc_feature: MA Experiment 20000117 PARAMETER Experiment Name: At_100uM_ABA_Mutants_cDNA_P Parameter: Timepoint (hr) Value: 6
  misc_feature: MA Experiment 20000117 PARAMETER Experiment Name: At_100uM_ABA_Mutants_cDNA_P Parameter: Tissue Value: Aerial
  misc_feature: MA Experiment 20000117 PARAMETER Experiment Name: At_100uM_ABA_Mutants_cDNA_P Parameter: Treatment Value: 100uM ABA vs. No Treatment
  misc_feature: MA Experiment ID: 20000184 Result: Up-regulated in Transcription
  misc_feature: MA Experiment 20000184 PARAMETER Experiment Name: At_Shoots__P Parameter: Age (day) Value: 7
  misc_feature: MA Experiment 20000184 PARAMETER Experiment Name: At_Shoots__P Parameter: Tissue Value: Shoots vs. Whole Plant
  misc_feature: MA Experiment ID: 20000227 Result: Up-regulated in Transcription
  misc_feature: MA Experiment 20000227 PARAMETER Experiment Name: At_Root-Tips-vs-Tops_P Parameter: Tissue Value: Root Tips vs. Root Tops
  misc_feature: MA Experiment ID: 20000234 Result: Up-regulated in Transcription
  misc_feature: MA Experiment 20000234 PARAMETER Experiment Name: At_Siliques_P Parameter: Age (day) Value: 21
  misc_feature: MA Experiment 20000234 PARAMETER Experiment Name: At_Siliques_P Parameter: Organism Value: A. thaliana
  misc_feature: MA Experiment 20000234 PARAMETER Experiment Name: At_Siliques_P Parameter: Plant Line Value: WS
  misc_feature: MA Experiment 20000234 PARAMETER Experiment Name: At_Siliques_P Parameter: Tissue Value: Less Than 5mm Siliques vs. Whole Plant
  misc_feature: MA Experiment ID: 20000235 Result: Up-regulated in Transcription
  misc_feature: MA Experiment 20000235 PARAMETER Experiment Name: At_Siliques_P Parameter: Age (day) Value: 21
  misc_feature: MA Experiment 20000235 PARAMETER Experiment Name: At_Siliques_P Parameter: Organism Value: A. thaliana
  misc_feature: MA Experiment 20000235 PARAMETER Experiment Name: At_Siliques_P Parameter: Plant Line Value: WS
  misc_feature: MA Experiment 20000235 PARAMETER Experiment Name: At_Siliques_P Parameter: Tissue Value: 5-10mm Siliques vs. Whole Plant
  misc_feature: MA Experiment ID: 20000264 Result: Up-regulated in Transcription
  misc_feature: MA Experiment 20000264 PARAMETER Experiment Name: At_Open_Flower_P Parameter: Age (day) Value: 21
  misc_feature: MA Experiment 20000264 PARAMETER Experiment Name: At_Open_Flower_P Parameter: Plant Line Value: WS
  misc_feature: MA Experiment 20000264 PARAMETER Experiment Name: At_Open_Flower_P Parameter: Tissue Value: Open Flower vs. Whole Plant
  misc_feature: MA Experiment ID: 20000437 Result: Down-regulated in Transcription
  misc_feature: MA Experiment 20000437 PARAMETER Experiment Name: At_Drought_P Parameter: Age (day) Value: 8
  misc_feature: MA Experiment 20000437 PARAMETER Experiment Name: At_Drought_P Parameter: Organism Value: A. thaliana
  misc_feature: MA Experiment 20000437 PARAMETER Experiment Name: At_Drought_P Parameter: Plant Line Value: WS
  misc_feature: MA Experiment 20000437 PARAMETER Experiment Name: At_Drought_P Parameter: Timepoint (hr) Value: 24
  misc_feature: MA Experiment 20000437 PARAMETER Experiment Name: At_Drought_P Parameter: Tissue Value: Whole Plant
  misc_feature: MA Experiment 20000437 PARAMETER Experiment Name: At_Drought_P Parameter: Treatment Value: Drought vs. No Drought
  misc_feature: MA Experiment ID: 20000794 Result: Down-regulated in Transcription
  misc_feature: MA Experiment 20000794 PARAMETER Experiment Name: At_Petals_P Parameter: Age (day) Value: 23-25 days
  misc_feature: MA Experiment 20000794 PARAMETER Experiment Name: At_Petals_P Parameter: Plant Line Value: WS
  misc_feature: MA Experiment 20000794 PARAMETER Experiment Name: At_Petals_P Parameter: Tissue Value: Petals vs. Whole plant
  misc_feature: MA Experiment ID: 20001557 Result: Up-regulated in Transcription
  misc_feature: MA Experiment 20001557 PARAMETER Experiment Name: At_Drought_Soil_Dry_P Parameter: Age (day) Value: 27
  misc_feature: MA Experiment 20001557 PARAMETER Experiment Name: At_Drought_Soil_Dry_P Parameter: Organism Value: A. thaliana
  misc_feature: MA Experiment 20001557 PARAMETER Experiment Name: At_Drought_Soil_Dry_P Parameter: Plant Line Value: WS
  misc_feature: MA Experiment 20001557 PARAMETER Experiment Name: At_Drought_Soil_Dry_P Parameter: Post Timepoint (hr) Value: 3
  misc_feature: MA Experiment 20001557 PARAMETER Experiment Name: At_Drought_Soil_Dry_P Parameter: Post-Treatment Value: Re-Water vs. No Drought
  misc_feature: MA Experiment 20001557 PARAMETER Experiment Name: At_Drought_Soil_Dry_P Parameter: Timepoint (day) Value: 13
  misc_feature: MA Experiment 20001557 PARAMETER Experiment Name: At_Drought_Soil_Dry_P Parameter: Treatment Value: Drought vs. No Drought
  misc_feature: MA Experiment ID: 20001558 Result: Up-regulated in Transcription
  misc_feature: MA Experiment 20001558 PARAMETER Experiment Name: At_Drought_Soil_Dry_P Parameter: Age (day) Value: 27
  misc_feature: MA Experiment 20001558 PARAMETER Experiment Name: At_Drought_Soil_Dry_P Parameter: Organism Value: A. thaliana
  misc_feature: MA Experiment 20001558 PARAMETER Experiment Name: At_Drought_Soil_Dry_P Parameter: Plant Line Value: WS
  misc_feature: MA Experiment 20001558 PARAMETER Experiment Name: At_Drought_Soil_Dry_P Parameter: Post Timepoint (hr) Value: 6
  misc_feature: MA Experiment 20001558 PARAMETER Experiment Name: At_Drought_Soil_Dry_P Parameter: Post-Treatment Value: Re-Water vs. No Drought
  misc_feature: MA Experiment 20001558 PARAMETER Experiment Name: At_Drought_Soil_Dry_P Parameter: Timepoint (day) Value: 13
  misc_feature: MA Experiment 20001558 PARAMETER Experiment Name: At_Drought_Soil_Dry_P Parameter: Treatment Value: Drought vs. No Drought
  misc_feature: MA Experiment ID: 20001560 Result: Up-regulated in Transcription
  misc_feature: MA Experiment 20001560 PARAMETER Experiment Name: At_Drought_Soil_Dry_P Parameter: Age (day) Value: 28
  misc_feature: MA Experiment 20001560 PARAMETER Experiment Name: At_Drought_Soil_Dry_P Parameter: Organism Value: A. thaliana
  misc_feature: MA Experiment 20001560 PARAMETER Experiment Name: At_Drought_Soil_Dry_P Parameter: Plant Line Value: WS
  misc_feature: MA Experiment 20001560 PARAMETER Experiment Name: At_Drought_Soil_Dry_P Parameter: Post Timepoint (hr) Value: None
  misc_feature: MA Experiment 20001560 PARAMETER Experiment Name: At_Drought_Soil_Dry_P Parameter: Post-Treatment Value: None
  misc_feature: MA Experiment 20001560 PARAMETER Experiment Name: At_Drought_Soil_Dry_P Parameter: Timepoint (day) Value: 14
  misc_feature: MA Experiment 20001560 PARAMETER Experiment Name: At_Drought_Soil_Dry_P Parameter: Treatment Value: Drought vs. No Drought
  misc_feature: MA Experiment ID: 20001757 Result: Up-regulated in Transcription
  misc_feature: MA Experiment 20001757 PARAMETER Experiment Name: At_50mM_NH4NO3_L-to-H_P Parameter: Timepoint (hr) Value: 6
  misc_feature: MA Experiment 20001757 PARAMETER Experiment Name: At_50mM_NH4NO3_L-to-H_P Parameter: Tissue Value: Leaf
  misc_feature: MA Experiment 20001757 PARAMETER Experiment Name: At_50mM_NH4NO3_L-to-H_P Parameter: Treatment Value: 50mM NH4NO3 vs 100mM Mannitol

SEQ ID NO: 37762 - protein, 92 aa, Arabidopsis thaliana [sequence omitted]

SEQ ID NO: 37763 - protein, 65 aa, Arabidopsis thaliana; identical to SEQ ID NO: 30081
  peptide (1)..(65): Ceres Seq. ID no. 12558721

SEQ ID NO: 37764 - protein, 64 aa, Arabidopsis thaliana; identical to SEQ ID NO: 30082
  peptide (1)..(64): Ceres Seq. ID no. 12558722
  misc_feature (1)..(61): Homolog of NCBI NO: 33637090 NR Description: N1 [Toxoplasma gondii]
  misc_feature (1)..(60): Homolog of NCBI NO: 7441206 NR Description: ribosomal protein L37a
  misc_feature (1)..(63): Homolog of NCBI NO: 6093889 NR Description: 60S RIBOSOMAL PROTEIN L37A
  misc_feature (1)..(64): Homolog of NCBI NO: 11358898 NR Description: translation initiation factor eIF-4 gamma homolog
  misc_feature (1)..(63): Homolog of NCBI NO: 15228411 NR Description: putative 60S ribosomal protein L37a; protein id:
  misc_feature (1)..(63): Homolog of NCBI NO: 6831602 NR Description: 60S RIBOSOMAL PROTEIN L37A
  misc_feature (1)..(64): Homolog of NCBI NO: 6831607 NR Description: 60S ribosomal protein L37a
  misc_feature (1)..(63): Homolog of NCBI NO: 34911166 NR Description: putative 60S ribosomal protein L37a
  misc_feature (1)..(64): Homolog of NCBI NO: 1173045 NR Description: 60S RIBOSOMAL PROTEIN L37A
  misc_feature (1)..(64): Homolog of NCBI NO: 18411538 NR Description: Expressed protein
  misc_feature (1)..(61): Homolog of NCBI NO: 33637090 NR Description: N1 [Toxoplasma gondii]
  misc_feature (1)..(60): Homolog of NCBI NO: 7441206 NR Description: ribosomal protein L37a
  misc_feature (1)..(63): Homolog of NCBI NO: 6093889 NR Description: 60S RIBOSOMAL PROTEIN L37A
  misc_feature (1)..(64): Homolog of NCBI NO: 11358898 NR Description: translation initiation factor eIF-4 gamma homolog
  misc_feature (1)..(63): Homolog of NCBI NO: 15228411 NR Description: putative 60S ribosomal protein L37a; protein id:
  misc_feature (1)..(63): Homolog of NCBI NO: 6831602 NR Description: 60S RIBOSOMAL PROTEIN L37A
  misc_feature (1)..(64): Homolog of NCBI NO: 6831607 NR Description: 60S ribosomal protein L37a
  misc_feature (1)..(63): Homolog of NCBI NO: 34911166 NR Description: putative 60S ribosomal protein L37a
  misc_feature (1)..(64): Homolog of NCBI NO: 1173045 NR Description: 60S RIBOSOMAL PROTEIN L37A
  misc_feature (1)..(64): Homolog of NCBI NO: 18411538 NR Description: Expressed protein

SEQ ID NO: 37765 - DNA, 1205 bp, Arabidopsis thaliana
  misc_feature (1)..(1205): Ceres Seq. ID no. 12324679
  misc_feature: MA Experiment ID: 108434 Result: Up-regulated in Transcription
  misc_feature: MA Experiment 108434 PARAMETER Experiment Name: At_Root_Tips_cDNA_P Parameter: Tissue Value: Root Tips
  misc_feature: MA Experiment ID: 20000086 Result: Down-regulated in Transcription
  misc_feature: MA Experiment 20000086 PARAMETER Experiment Name: At_100uM_ABA_Mutants_cDNA_P Parameter: Plant Line Value: CS22
  misc_feature: MA Experiment 20000086 PARAMETER Experiment Name: At_100uM_ABA_Mutants_cDNA_P Parameter: Timepoint (hr) Value: 6
  misc_feature: MA Experiment 20000086 PARAMETER Experiment Name: At_100uM_ABA_Mutants_cDNA_P Parameter: Tissue Value: Aerial
  misc_feature: MA Experiment 20000086 PARAMETER Experiment Name: At_100uM_ABA_Mutants_cDNA_P Parameter: Treatment Value: 100uM ABA vs. No Treatment
  misc_feature: MA Experiment ID: 20000180 Result: Up-regulated in Transcription
  misc_feature: MA Experiment 20000180 PARAMETER Experiment Name: At_Germinating_Seeds_P Parameter: Age (hr) Value: 24 vs. 0
  misc_feature: MA Experiment 20000180 PARAMETER Experiment Name: At_Germinating_Seeds_P Parameter: Tissue Value: Germinating Seeds
  misc_feature: MA Experiment ID: 20000185 Result: Up-regulated in Transcription
  misc_feature: MA Experiment 20000185 PARAMETER Experiment Name: At_Roots__P Parameter: Age (day) Value: 7 vs. 21
  misc_feature: MA Experiment 20000185 PARAMETER Experiment Name: At_Roots__P Parameter: Organism Value: A. thaliana
  misc_feature: MA Experiment 20000185 PARAMETER Experiment Name: At_Roots__P Parameter: Tissue Value: Roots vs. Whole Plant
  misc_feature: MA Experiment ID: 20000437 Result: Down-regulated in Transcription
  misc_feature: MA Experiment 20000437 PARAMETER Experiment Name: At_Drought_P Parameter: Age (day) Value: 8
  misc_feature: MA Experiment 20000437 PARAMETER Experiment Name: At_Drought_P Parameter: Organism Value: A. thaliana
  misc_feature: MA Experiment 20000437 PARAMETER Experiment Name: At_Drought_P Parameter: Plant Line Value: WS
  misc_feature: MA Experiment 20000437 PARAMETER Experiment Name: At_Drought_P Parameter: Timepoint (hr) Value: 24
  misc_feature: MA Experiment 20000437 PARAMETER Experiment Name: At_Drought_P Parameter: Tissue Value: Whole Plant
  misc_feature: MA Experiment 20000437 PARAMETER Experiment Name: At_Drought_P Parameter: Treatment Value: Drought vs. No Drought
  misc_feature: MA Experiment ID: 20000439 Result: Up-regulated in Transcription
  misc_feature: MA Experiment 20000439 PARAMETER Experiment Name: At_Roots__P Parameter: Age (day) Value: 14 vs. 21
  misc_feature: MA Experiment 20000439 PARAMETER Experiment Name: At_Roots__P Parameter: Organism Value: A. thaliana
  misc_feature: MA Experiment 20000439 PARAMETER Experiment Name: At_Roots__P Parameter: Tissue Value: Roots vs. Whole Plant
acaacaacattgaaacccatttcttcgcctttaaccttacttgaatttttgtgtgggtcctttttttttctttctccaagccattgaataaaaaggcagagaaaatggagttttttggtaaaatgataatttcattgagtcttattatgatgataatgtggaagagcgtggatggttacagtagtggttgggtcaatgctcgagccacattctatggaggagctgatgcttctggcaccatgggcggcgcgtgtggttacggaaacttatacagtcaaggatacggcactaacacggcggctctaagcacggctctattcaacggcggccaaagctgtggtgcttgttttcagataaaatgcgtaaacgacccaaaatggtgtatcggtggaacaatcaccgtcaccggaacaaacttttgtccacccaactttgctcaagccaacaacgccggaggttggtgtaatcctcctcaacaccacttcgatttagctcagcccatcttcctccgtattgctcaatacaaagccggcgtcgtccctgtccaataccggagagtggcttgccggagaaaaggaggaataagattcacgatcaacggtcattcatacttcaacctcgtacttataaccaacgtcgccggcgccggagatgttatctccgtctccattaaaggaaccaatacacgttggcaaagcatgtcaagaaactggggacaaaactggcaaagcaatgcaaaacttgatggtcaagctttgtcctttaaagtaacaactagtgatggccgtacagttatatctaacaatgctacaccacgtaactggagctttggacagacttataccggaaaacagttccgggctcagaggtgatgatgacgtggactgtctggagggaaaaaaaaaagttttacttattactgattttggagttttctagagtttgcatagtttgaaaaaagttttcaggaattaaccctaatcaaaataaccaatttctaaatggcggaaatcgaggttttttctcactggcagcttttgtaattcgccggtgagactgaggtgttttcacccgccgcctgagtgattgagttttttttttttttttttttgtactttgtttggcttttaagatgttcaatggtctgtttctttaagacattgtctactgaaataataataaaatcaagttaatttataattttt

SEQ ID NO: 37766 - protein, 255 aa, Arabidopsis thaliana
  peptide (1)..(255): Ceres Seq. ID no. 12324680
  misc_feature (160)..(237): Pfam Name: Pollen allergen Pfam Description: Pollen allergen
  misc_feature (13)..(252): Homolog of NCBI NO: 29467507 NR Description: expansin [Pyrus communis]
  misc_feature (16)..(252): Homolog of NCBI NO: 38046730 NR Description: alpha-expansin 3 [Populus tremula x Populus
  misc_feature (11)..(252): Homolog of NCBI NO: 29466641 NR Description: expansin [Prunus persica]
  misc_feature (8)..(252): Homolog of NCBI NO: 21615407 NR Description: alpha-expansin 3 [Cicer arietinum]
  misc_feature (21)..(252): Homolog of NCBI NO: 20137710 NR Description: Alpha-expansin 15 precursor (At-EXP15) (AtEx15)
  misc_feature (11)..(252): Homolog of NCBI NO: 17484121 NR Description: alpha-expansin [Prunus cerasus]
  misc_feature (3)..(252): Homolog of NCBI NO: 22325441 NR Description: expansin, putative
  misc_feature (1)..(252): Homolog of NCBI NO: 29467505 NR Description: expansin [Pyrus communis]
  misc_feature (7)..(255): Homolog of NCBI NO: 21593755 NR Description: expansin [Arabidopsis thaliana]
  misc_feature (1)..(255): Homolog of NCBI NO: 15241183 NR Description: expansin, putative
MEFFGKMIISLSLIMMIMWKSVDGYSSGWVNARATFYGGADASGTMGGACGYGNLYSQGYGTNTAALSTALFNGGQSCGACFQIKCVNDPKWCIGGTITVTGTNFCPPNFAQANNAGGWCNPPQHHFDLAQPIFLRIAQYKAGVVPVQYRRVACRRKGGIRFTINGHSYFNLVLITNVAGAGDVISVSIKGTNTRWQSMSRNWGQNWQSNAKLDGQALSFKVTTSDGRTVISNNATPRNWSFGQTYTGKQFRAQR

SEQ ID NO: 37767 - protein, 249 aa, Arabidopsis thaliana
  peptide (1)..(249): Ceres Seq. ID no. 12324681
  misc_feature (154)..(231): Pfam Name: Pollen allergen Pfam Description: Pollen allergen
  misc_feature (7)..(246): Homolog of NCBI NO: 29467507 NR Description: expansin [Pyrus communis]
  misc_feature (10)..(246): Homolog of NCBI NO: 38046730 NR Description: alpha-expansin 3 [Populus tremula x Populus
  misc_feature (5)..(246): Homolog of NCBI NO: 29466641 NR Description: expansin [Prunus persica]
  misc_feature (2)..(246): Homolog of NCBI NO: 21615407 NR Description: alpha-expansin 3 [Cicer arietinum]
  misc_feature (15)..(246): Homolog of NCBI NO: 20137710 NR Description: Alpha-expansin 15 precursor (At-EXP15) (AtEx15)
  misc_feature (5)..(246): Homolog of NCBI NO: 17484121 NR Description: alpha-expansin [Prunus cerasus]
  misc_feature (1)..(246): Homolog of NCBI NO: 22325441 NR Description: expansin, putative
  misc_feature (1)..(246): Homolog of NCBI NO: 29467505 NR Description: expansin [Pyrus communis]
  misc_feature (1)..(249): Homolog of NCBI NO: 21593755 NR Description: expansin [Arabidopsis thaliana]
  misc_feature (1)..(249): Homolog of NCBI NO: 15241183 NR Description: expansin, putative
MIISLSLIMMIMWKSVDGYSSGWVNARATFYGGADASGTMGGACGYGNLYSQGYGTNTAALSTALFNGGQSCGACFQIKCVNDPKWCIGGTITVTGTNFCPPNFAQANNAGGWCNPPQHHFDLAQPIFLRIAQYKAGVVPVQYRRVACRRKGGIRFTINGHSYFNLVLITNVAGAGDVISVSIKGTNTRWQSMSRNWGQNWQSNAKLDGQALSFKVTTSDGRTVISNNATPRNWSFGQTYTGKQFRAQR

SEQ ID NO: 37768 - protein, 241 aa, Arabidopsis thaliana
  peptide (1)..(241): Ceres Seq. ID no. 12324682
  misc_feature (146)..(223): Pfam Name: Pollen allergen Pfam Description: Pollen allergen
  misc_feature (1)..(238): Homolog of NCBI NO: 29467507 NR Description: expansin [Pyrus communis]
  misc_feature (2)..(238): Homolog of NCBI NO: 38046730 NR Description: alpha-expansin 3 [Populus tremula x Populus
  misc_feature (1)..(238): Homolog of NCBI NO: 29466641 NR Description: expansin [Prunus persica]
  misc_feature (1)..(238): Homolog of NCBI NO: 21615407 NR Description: alpha-expansin 3 [Cicer arietinum]
  misc_feature (7)..(238): Homolog of NCBI NO: 20137710 NR Description: Alpha-expansin 15 precursor (At-EXP15) (AtEx15)
  misc_feature (1)..(238): Homolog of NCBI NO: 17484121 NR Description: alpha-expansin [Prunus cerasus]
  misc_feature (1)..(238): Homolog of NCBI NO: 22325441 NR Description: expansin, putative
  misc_feature (1)..(238): Homolog of NCBI NO: 29467505 NR Description: expansin [Pyrus communis]
  misc_feature (1)..(241): Homolog of NCBI NO: 21593755 NR Description: expansin [Arabidopsis thaliana]
  misc_feature (1)..(241): Homolog of NCBI NO: 15241183 NR Description: expansin, putative
MMIMWKSVDGYSSGWVNARATFYGGADASGTMGGACGYGNLYSQGYGTNTAALSTALFNGGQSCGACFQIKCVNDPKWCIGGTITVTGTNFCPPNFAQANNAGGWCNPPQHHFDLAQPIFLRIAQYKAGVVPVQYRRVACRRKGGIRFTINGHSYFNLVLITNVAGAGDVISVSIKGTNTRWQSMSRNWGQNWQSNAKLDGQALSFKVTTSDGRTVISNNATPRNWSFGQTYTGKQFRAQR

SEQ ID NO: 37769 - DNA, 1032 bp, Arabidopsis thaliana; identical to SEQ ID NO: 24829
  misc_feature (1)..(1032): Ceres Seq. ID no. 12385678
  misc_feature: MA Experiment ID: 108573 Result: Up-regulated in Transcription
  misc_feature: MA Experiment 108573 PARAMETER Experiment Name: At_Drought_cDNA_P Parameter: Timepoint (hr) Value: 6
  misc_feature: MA Experiment 108573 PARAMETER Experiment Name: At_Drought_cDNA_P Parameter: Tissue Value: Aerial
  misc_feature: MA Experiment 108573 PARAMETER Experiment Name: At_Drought_cDNA_P Parameter: Treatment Value: Drought vs. No Drought
  misc_feature: MA Experiment ID: 108576 Result: Up-regulated in Transcription
  misc_feature: MA Experiment 108576 PARAMETER Experiment Name: At_42deg_Heat_cDNA_P Parameter: Temperature (deg C) Value: 42 vs. 22
  misc_feature: MA Experiment 108576 PARAMETER Experiment Name: At_42deg_Heat_cDNA_P Parameter: Timepoint (hr) Value: 1
  misc_feature: MA Experiment 108576 PARAMETER Experiment Name: At_42deg_Heat_cDNA_P Parameter: Tissue Value: Aerial
  misc_feature: MA Experiment ID: 108577 Result: Up-regulated in Transcription
  misc_feature: MA Experiment 108577 PARAMETER Experiment Name: At_42deg_Heat_cDNA_P Parameter: Temperature (deg C) Value: 42 vs. 22
  misc_feature: MA Experiment 108577 PARAMETER Experiment Name: At_42deg_Heat_cDNA_P Parameter: Timepoint (hr) Value: 6
  misc_feature: MA Experiment 108577 PARAMETER Experiment Name: At_42deg_Heat_cDNA_P Parameter: Tissue Value: Aerial
  misc_feature: MA Experiment ID: 108595 Result: Up-regulated in Transcription
  misc_feature: MA Experiment 108595 PARAMETER Experiment Name: At_Ler-pi_Ovule_cDNA_P Parameter: Plant Line Value: null
  misc_feature: MA Experiment ID: 20000171 Result: Up-regulated in Transcription
  misc_feature: MA Experiment 20000171 PARAMETER Experiment Name: At_42deg_Heat_P Parameter: Age (day) Value: 14
  misc_feature: MA Experiment 20000171 PARAMETER Experiment Name: At_42deg_Heat_P Parameter: Organism Value: A. thaliana
  misc_feature: MA Experiment 20000171 PARAMETER Experiment Name: At_42deg_Heat_P Parameter: Plant Line Value: WS
  misc_feature: MA Experiment 20000171 PARAMETER Experiment Name: At_42deg_Heat_P Parameter: Temperature (deg C) Value: 42 vs. 22
  misc_feature: MA Experiment 20000171 PARAMETER Experiment Name: At_42deg_Heat_P Parameter: Timepoint (hr) Value: 1
  misc_feature: MA Experiment 20000171 PARAMETER Experiment Name: At_42deg_Heat_P Parameter: Tissue Value: Aerial
  misc_feature: MA Experiment ID: 20000173 Result: Up-regulated in Transcription
  misc_feature: MA Experiment 20000173 PARAMETER Experiment Name: At_42deg_Heat_P Parameter: Age (day) Value: 14
  misc_feature: MA Experiment 20000173 PARAMETER Experiment Name: At_42deg_Heat_P Parameter: Organism Value: A. thaliana
  misc_feature: MA Experiment 20000173 PARAMETER Experiment Name: At_42deg_Heat_P Parameter: Plant Line Value: WS
  misc_feature: MA Experiment 20000173 PARAMETER Experiment Name: At_42deg_Heat_P Parameter: Temperature (deg C) Value: 42 vs. 22
  misc_feature: MA Experiment 20000173 PARAMETER Experiment Name: At_42deg_Heat_P Parameter: Timepoint (hr) Value: 6
  misc_feature: MA Experiment 20000173 PARAMETER Experiment Name: At_42deg_Heat_P Parameter: Tissue Value: Aerial
  misc_feature: MA Experiment ID: 20000179 Result: Up-regulated in Transcription
  misc_feature: MA Experiment 20000179 PARAMETER Experiment Name: At_Germinating_Seeds_P Parameter: Age (hr) Value: 6 vs. 0
  misc_feature: MA Experiment 20000179 PARAMETER Experiment Name: At_Germinating_Seeds_P Parameter: Tissue Value: Germinating Seeds
  misc_feature: MA Experiment ID: 20000227 Result: Down-regulated in Transcription
  misc_feature: MA Experiment 20000227 PARAMETER Experiment Name: At_Root-Tips-vs-Tops_P Parameter: Tissue Value: Root Tips vs. Root Tops
  misc_feature: MA Experiment ID: 20000265 Result: Down-regulated in Transcription
  misc_feature: MA Experiment 20000265 PARAMETER Experiment Name: At_Open_Flower_P Parameter: Age (day) Value: 21
  misc_feature: MA Experiment 20000265 PARAMETER Experiment Name: At_Open_Flower_P Parameter: Plant Line Value: WS
  misc_feature: MA Experiment 20000265 PARAMETER Experiment Name: At_Open_Flower_P Parameter: Tissue Value: Closed Flower vs. Whole Plant
  misc_feature: MA Experiment ID: 20000436 Result: Up-regulated in Transcription
  misc_feature: MA Experiment 20000436 PARAMETER Experiment Name: At_Drought_P Parameter: Age (day) Value: 7
  misc_feature: MA Experiment 20000436 PARAMETER Experiment Name: At_Drought_P Parameter: Organism Value: A. thaliana
  misc_feature: MA Experiment 20000436 PARAMETER Experiment Name: At_Drought_P Parameter: Plant Line Value: WS
  misc_feature: MA Experiment 20000436 PARAMETER Experiment Name: At_Drought_P Parameter: Timepoint (hr) Value: 12
  misc_feature: MA Experiment 20000436 PARAMETER Experiment Name: At_Drought_P Parameter: Tissue Value: Whole Plant
  misc_feature: MA Experiment 20000436 PARAMETER Experiment Name: At_Drought_P Parameter: Treatment Value: Drought vs. No Drought
  misc_feature: MA Experiment ID: 20000437 Result: Up-regulated in Transcription
  misc_feature: MA Experiment 20000437 PARAMETER Experiment Name: At_Drought_P Parameter: Age (day) Value: 8
  misc_feature: MA Experiment 20000437 PARAMETER Experiment Name: At_Drought_P Parameter: Organism Value: A. thaliana
  misc_feature: MA Experiment 20000437 PARAMETER Experiment Name: At_Drought_P Parameter: Plant Line Value: WS
  misc_feature: MA Experiment 20000437 PARAMETER Experiment Name: At_Drought_P Parameter: Timepoint (hr) Value: 24
  misc_feature: MA Experiment 20000437 PARAMETER Experiment Name: At_Drought_P Parameter: Tissue Value: Whole Plant
  misc_feature: MA Experiment 20000437 PARAMETER Experiment Name: At_Drought_P Parameter: Treatment Value: Drought vs. No Drought
  misc_feature: MA Experiment ID: 20000794 Result: Up-regulated in Transcription
  misc_feature: MA Experiment 20000794 PARAMETER Experiment Name: At_Petals_P Parameter: Age (day) Value: 23-25 days
  misc_feature: MA Experiment 20000794 PARAMETER Experiment Name: At_Petals_P Parameter: Plant Line Value: WS
  misc_feature: MA Experiment 20000794 PARAMETER Experiment Name: At_Petals_P Parameter: Tissue Value: Petals vs. Whole plant
  misc_feature: MA Experiment ID: 20001451 Result: Up-regulated in Transcription
  misc_feature: MA Experiment 20001451 PARAMETER Experiment Name: At_Far-red-induction_P Parameter: Age (day) Value: 7
  misc_feature: MA Experiment 20001451 PARAMETER Experiment Name: At_Far-red-induction_P Parameter: Light Value: Far-red vs. White
  misc_feature: MA Experiment 20001451 PARAMETER Experiment Name: At_Far-red-induction_P Parameter: Organism Value: A. thaliana
  misc_feature: MA Experiment 20001451 PARAMETER Experiment Name: At_Far-red-induction_P Parameter: Plant Line Value: Columbia
  misc_feature: MA Experiment 20001451 PARAMETER Experiment Name: At_Far-red-induction_P Parameter: Timepoint (hr) Value: 24
  misc_feature: MA Experiment 20001451 PARAMETER Experiment Name: At_Far-red-induction_P Parameter: Tissue Value: Whole Plant
  misc_feature: MA Experiment ID: 20001554 Result: Up-regulated in Transcription
  misc_feature: MA Experiment 20001554 PARAMETER Experiment Name: At_Drought_Soil_Dry_P Parameter: Age (day) Value: 21
  misc_feature: MA Experiment 20001554 PARAMETER Experiment Name: At_Drought_Soil_Dry_P Parameter: Organism Value: A. thaliana
  misc_feature: MA Experiment 20001554 PARAMETER Experiment Name: At_Drought_Soil_Dry_P Parameter: Plant Line Value: WS
  misc_feature: MA Experiment 20001554 PARAMETER Experiment Name: At_Drought_Soil_Dry_P Parameter: Post Timepoint (hr) Value: None
  misc_feature: MA Experiment 20001554 PARAMETER Experiment Name: At_Drought_Soil_Dry_P Parameter: Post-Treatment Value: None
  misc_feature: MA Experiment 20001554 PARAMETER Experiment Name: At_Drought_Soil_Dry_P Parameter: Timepoint (day) Value: 7
  misc_feature: MA Experiment 20001554 PARAMETER Experiment Name: At_Drought_Soil_Dry_P Parameter: Treatment Value: Drought vs. No Drought
  misc_feature: MA Experiment ID: 20001908 Result: Up-regulated in Transcription
  misc_feature: MA Experiment 20001908 PARAMETER Experiment Name: At_Drought_Reproduction_P Parameter: Age (day) Value: 40
  misc_feature: MA Experiment 20001908 PARAMETER Experiment Name: At_Drought_Reproduction_P Parameter: Organism Value: A. thaliana
  misc_feature: MA Experiment 20001908 PARAMETER Experiment Name: At_Drought_Reproduction_P Parameter: Plant Line Value: WS
  misc_feature: MA Experiment 20001908 PARAMETER Experiment Name: At_Drought_Reproduction_P Parameter: Timepoint (day) Value: 10
  misc_feature: MA Experiment 20001908 PARAMETER Experiment Name: At_Drought_Reproduction_P Parameter: Tissue Value: Siliques
  misc_feature: MA Experiment 20001908 PARAMETER Experiment Name: At_Drought_Reproduction_P Parameter: Treatment Value: Drought vs. No Drought
  misc_feature: MA Experiment ID: 20001911 Result: Up-regulated in Transcription
  misc_feature: MA Experiment 20001911 PARAMETER Experiment Name: At_Drought_Reproduction_P Parameter: Age (day) Value: 40
  misc_feature: MA Experiment 20001911 PARAMETER Experiment Name: At_Drought_Reproduction_P Parameter: Organism Value: A. thaliana
  misc_feature: MA Experiment 20001911 PARAMETER Experiment Name: At_Drought_Reproduction_P Parameter: Plant Line Value: WS
  misc_feature: MA Experiment 20001911 PARAMETER Experiment Name: At_Drought_Reproduction_P Parameter: Timepoint (day) Value: 10
  misc_feature: MA Experiment 20001911 PARAMETER Experiment Name: At_Drought_Reproduction_P Parameter: Tissue Value: Flowers
  misc_feature: MA Experiment 20001911 PARAMETER Experiment Name: At_Drought_Reproduction_P Parameter: Treatment Value: Drought vs. No Drought

SEQ ID NO: 37770 - protein, 217 aa, Arabidopsis thaliana; identical to SEQ ID NO: 22246
  peptide (1)..(217): Ceres Seq. ID no. 12385679
  misc_feature (135)..(214): Homolog of NCBI NO: 30017516 NR Description: hypothetical protein [Oryza sativa (japonica
  misc_feature (42)..(207): Homolog of NCBI NO: 15241329 NR Description: putative protein; protein id: At5g20370.1
  misc_feature (2)..(216): Homolog of NCBI NO: 24461857 NR Description: CTV.15 [Poncirus trifoliata]
  misc_feature (1)..(216): Homolog of NCBI NO: 21618161 NR Description: serine-rich protein [Arabidopsis thaliana]
  misc_feature (1)..(216): Homolog of NCBI NO: 15238753 NR Description: serine-rich protein; protein id: At5g25280.1
  misc_feature (1)..(217): Homolog of NCBI NO: 15238947 NR Description: putative protein
  misc_feature (135)..(214): Homolog of NCBI NO: 30017516 NR Description: hypothetical protein [Oryza sativa (japonica
  misc_feature (42)..(207): Homolog of NCBI NO: 15241329 NR Description: putative protein; protein id: At5g20370.1
  misc_feature (2)..(216): Homolog of NCBI NO: 24461857 NR Description: CTV.15 [Poncirus trifoliata]
  misc_feature (1)..(216): Homolog of NCBI NO: 21618161 NR Description: serine-rich protein [Arabidopsis thaliana]
  misc_feature (1)..(216): Homolog of NCBI NO: 15238753 NR Description: serine-rich protein; protein id: At5g25280.1
  misc_feature (1)..(217): Homolog of NCBI NO: 15238947 NR Description: putative protein

SEQ ID NO: 37771 - protein, 133 aa, Arabidopsis thaliana; identical to SEQ ID NO: 22247
  peptide (1)..(133): Ceres Seq. ID no. 12385680
  misc_feature (51)..(130): Homolog of NCBI NO: 30017516 NR Description: hypothetical protein [Oryza sativa (japonica
  misc_feature (1)..(123): Homolog of NCBI NO: 15241329 NR Description: putative protein; protein id: At5g20370.1
  misc_feature (1)..(132): Homolog of NCBI NO: 24461857 NR Description: CTV.15 [Poncirus trifoliata]
  misc_feature (1)..(132): Homolog of NCBI NO: 21618161 NR Description: serine-rich protein [Arabidopsis thaliana]
  misc_feature (1)..(132): Homolog of NCBI NO: 15238753 NR Description: serine-rich protein; protein id: At5g25280.1
  misc_feature (1)..(133): Homolog of NCBI NO: 15238947 NR Description: putative protein
  misc_feature (51)..(130): Homolog of NCBI NO: 30017516 NR Description: hypothetical protein [Oryza sativa (japonica
  misc_feature (1)..(123): Homolog of NCBI NO: 15241329 NR Description: putative protein; protein id: At5g20370.1
  misc_feature (1)..(132): Homolog of NCBI NO: 24461857 NR Description: CTV.15 [Poncirus trifoliata]
  misc_feature (1)..(132): Homolog of NCBI NO: 21618161 NR Description: serine-rich protein [Arabidopsis thaliana]
  misc_feature (1)..(132): Homolog of NCBI NO: 15238753 NR Description: serine-rich protein; protein id: At5g25280.1
  misc_feature (1)..(133): Homolog of NCBI NO: 15238947 NR Description: putative protein

SEQ ID NO: 37772 - DNA, 1714 bp, Arabidopsis thaliana
  misc_feature (1)..(1714): Ceres Seq. ID no. 12369888
  misc_feature: MA Experiment ID: 108488 Result: Down-regulated in Transcription
  misc_feature: MA Experiment ID: 108576 Result: Up-regulated in Transcription
  misc_feature: MA Experiment 108576 PARAMETER Experiment Name: At_42deg_Heat_cDNA_P Parameter: Temperature (deg C) Value: 42 vs. 22
  misc_feature: MA Experiment 108576 PARAMETER Experiment Name: At_42deg_Heat_cDNA_P Parameter: Timepoint (hr) Value: 1
  misc_feature: MA Experiment 108576 PARAMETER Experiment Name: At_42deg_Heat_cDNA_P Parameter: Tissue Value: Aerial
  misc_feature: MA Experiment ID: 108608 Result: Up-regulated in Transcription
  misc_feature: MA Experiment 108608 PARAMETER Experiment Name: At_100uM_ABA_cDNA_P Parameter: Timepoint (hr) Value: 1
  misc_feature: MA Experiment 108608 PARAMETER Experiment Name: At_100uM_ABA_cDNA_P Parameter: Tissue Value: Aerial
  misc_feature: MA Experiment 108608 PARAMETER Experiment Name: At_100uM_ABA_cDNA_P Parameter: Treatment Value: 100uM ABA vs. No Treatment
  misc_feature: MA Experiment ID: 20000069 Result: Up-regulated in Transcription
  misc_feature: MA Experiment 20000069 PARAMETER Experiment Name: At_100uM_ABA_Mutants_cDNA_P Parameter: Plant Line Value: CS23
  misc_feature: MA Experiment 20000069 PARAMETER Experiment Name: At_100uM_ABA_Mutants_cDNA_P Parameter: Timepoint (hr) Value: 6
  misc_feature: MA Experiment 20000069 PARAMETER Experiment Name: At_100uM_ABA_Mutants_cDNA_P Parameter: Tissue Value: Aerial
  misc_feature: MA Experiment 20000069 PARAMETER Experiment Name: At_100uM_ABA_Mutants_cDNA_P Parameter: Treatment Value: 100uM ABA vs. No Treatment
  misc_feature: MA Experiment ID: 20000070 Result: Up-regulated in Transcription
  misc_feature: MA Experiment 20000070 PARAMETER Experiment Name: At_100uM_ABA_Mutants_cDNA_P Parameter: Plant Line Value: CS24
  misc_feature: MA Experiment 20000070 PARAMETER Experiment Name: At_100uM_ABA_Mutants_cDNA_P Parameter: Timepoint (hr) Value: 6
  misc_feature: MA Experiment 20000070 PARAMETER Experiment Name: At_100uM_ABA_Mutants_cDNA_P Parameter: Tissue Value: Aerial
  misc_feature: MA Experiment 20000070 PARAMETER Experiment Name: At_100uM_ABA_Mutants_cDNA_P Parameter: Treatment Value: 100uM ABA vs. No Treatment
  misc_feature: MA Experiment ID: 20000071 Result: Up-regulated in Transcription
  misc_feature: MA Experiment 20000071 PARAMETER Experiment Name: At_100uM_ABA_Mutants_cDNA_P Parameter: Plant Line Value: CS8104
  misc_feature: MA Experiment 20000071 PARAMETER Experiment Name: At_100uM_ABA_Mutants_cDNA_P Parameter: Timepoint (hr) Value: 6
  misc_feature: MA Experiment 20000071 PARAMETER Experiment Name: At_100uM_ABA_Mutants_cDNA_P Parameter: Tissue Value: Aerial
  misc_feature: MA Experiment 20000071 PARAMETER Experiment Name: At_100uM_ABA_Mutants_cDNA_P Parameter: Treatment Value: 100uM ABA vs. No Treatment
  misc_feature: MA Experiment ID: 20000072 Result: Up-regulated in Transcription
  misc_feature: MA Experiment 20000072 PARAMETER Experiment Name: At_100uM_ABA_Mutants_cDNA_P Parameter: Plant Line Value: CS8105
  misc_feature: MA Experiment 20000072 PARAMETER Experiment Name: At_100uM_ABA_Mutants_cDNA_P Parameter: Timepoint (hr) Value: 6
  misc_feature: MA Experiment 20000072 PARAMETER Experiment Name: At_100uM_ABA_Mutants_cDNA_P Parameter: Tissue Value: Aerial
  misc_feature: MA Experiment 20000072 PARAMETER Experiment Name: At_100uM_ABA_Mutants_cDNA_P Parameter: Treatment Value: 100uM ABA vs. No Treatment
  misc_feature: MA Experiment ID: 20000088 Result: Up-regulated in Transcription
  misc_feature: MA Experiment 20000088 PARAMETER Experiment Name: At_100uM_ABA_Mutants_cDNA_P Parameter: Plant Line Value: Landsberg
  misc_feature: MA Experiment 20000088 PARAMETER Experiment Name: At_100uM_ABA_Mutants_cDNA_P Parameter: Timepoint (hr) Value: 6
  misc_feature: MA Experiment 20000088 PARAMETER Experiment Name: At_100uM_ABA_Mutants_cDNA_P Parameter: Tissue Value: Aerial
  misc_feature: MA Experiment 20000088 PARAMETER Experiment Name: At_100uM_ABA_Mutants_cDNA_P Parameter: Treatment Value: 100uM ABA vs. No Treatment
  misc_feature: MA Experiment ID: 20000117 Result: Up-regulated in Transcription
  misc_feature: MA Experiment 20000117 PARAMETER Experiment Name: At_100uM_ABA_Mutants_cDNA_P Parameter: Plant Line Value: Columbia
  misc_feature: MA Experiment 20000117 PARAMETER Experiment Name: At_100uM_ABA_Mutants_cDNA_P Parameter: Timepoint (hr) Value: 6
  misc_feature: MA Experiment 20000117 PARAMETER Experiment Name: At_100uM_ABA_Mutants_cDNA_P Parameter: Tissue Value: Aerial
  misc_feature: MA Experiment 20000117 PARAMETER Experiment Name: At_100uM_ABA_Mutants_cDNA_P Parameter: Treatment Value: 100uM ABA vs. No Treatment
  misc_feature: MA Experiment ID: 20000166 Result: Up-regulated in Transcription
  misc_feature: MA Experiment 20000166 PARAMETER Experiment Name: At_100uM_ABA_P Parameter: Age (day) Value: 14
  misc_feature: MA Experiment 20000166 PARAMETER Experiment Name: At_100uM_ABA_P Parameter: Organism Value: A. thaliana
  misc_feature: MA Experiment 20000166 PARAMETER Experiment Name: At_100uM_ABA_P Parameter: Plant Line Value: WS
  misc_feature: MA Experiment 20000166 PARAMETER Experiment Name: At_100uM_ABA_P Parameter: Timepoint (hr) Value: 1
  misc_feature: MA Experiment 20000166 PARAMETER Experiment Name: At_100uM_ABA_P Parameter: Tissue Value: Aerial
  misc_feature: MA Experiment 20000166 PARAMETER Experiment Name: At_100uM_ABA_P Parameter: Treatment Value: 100uM ABA vs. No Treatment
  misc_feature: MA Experiment ID: 20000184 Result: Down-regulated in Transcription
  misc_feature: MA Experiment 20000184 PARAMETER Experiment Name: At_Shoots__P Parameter: Age (day) Value: 7
  misc_feature: MA Experiment 20000184 PARAMETER Experiment Name: At_Shoots__P Parameter: Tissue Value: Shoots vs. Whole Plant
  misc_feature: MA Experiment ID: 20000227 Result: Down-regulated in Transcription
  misc_feature: MA Experiment 20000227 PARAMETER Experiment Name: At_Root-Tips-vs-Tops_P Parameter: Tissue Value: Root Tips vs. Root Tops
  misc_feature: MA Experiment ID: 20000264 Result: Up-regulated in Transcription
  misc_feature: MA Experiment 20000264 PARAMETER Experiment Name: At_Open_Flower_P Parameter: Age (day) Value: 21
  misc_feature: MA Experiment 20000264 PARAMETER Experiment Name: At_Open_Flower_P Parameter: Plant Line Value: WS
  misc_feature: MA Experiment 20000264 PARAMETER Experiment Name: At_Open_Flower_P Parameter: Tissue Value: Open Flower vs. Whole Plant
  misc_feature: MA Experiment ID: 20000267 Result: Up-regulated in Transcription
  misc_feature: MA Experiment 20000267 PARAMETER Experiment Name: At_Drought_P Parameter: Age (day) Value: 7
  misc_feature: MA Experiment 20000267 PARAMETER Experiment Name: At_Drought_P Parameter: Organism Value: A. thaliana
  misc_feature: MA Experiment 20000267 PARAMETER Experiment Name: At_Drought_P Parameter: Plant Line Value: WS
  misc_feature: MA Experiment 20000267 PARAMETER Experiment Name: At_Drought_P Parameter: Timepoint (hr) Value: 6
  misc_feature: MA Experiment 20000267 PARAMETER Experiment Name: At_Drought_P Parameter: Tissue Value: Whole Plant
  misc_feature: MA Experiment 20000267 PARAMETER Experiment Name: At_Drought_P Parameter: Treatment Value: Drought vs. No Drought
  misc_feature: MA Experiment ID: 20000268 Result: Up-regulated in Transcription
  misc_feature: MA Experiment 20000268 PARAMETER Experiment Name: At_100mM_NaCl__P Parameter: Age (day) Value: 14
  misc_feature: MA Experiment 20000268 PARAMETER Experiment Name: At_100mM_NaCl__P Parameter: Organism Value: A. thaliana
  misc_feature: MA Experiment 20000268 PARAMETER Experiment Name: At_100mM_NaCl__P Parameter: Plant Line Value: WS
  misc_feature: MA Experiment 20000268 PARAMETER Experiment Name: At_100mM_NaCl__P Parameter: Timepoint (hr) Value: 6
  misc_feature: MA Experiment 20000268 PARAMETER Experiment Name: At_100mM_NaCl__P Parameter: Tissue Value: Whole Plant
  misc_feature: MA Experiment 20000268 PARAMETER Experiment Name: At_100mM_NaCl__P Parameter: Treatment Value: 100mM NaCl vs. No Treatment
  misc_feature: MA Experiment ID: 20000286 Result: Up-regulated in Transcription
  misc_feature: MA Experiment 20000286 PARAMETER Experiment Name: At_Open_Flower_P Parameter: Age (day) Value: 21
  misc_feature: MA Experiment 20000286 PARAMETER Experiment Name: At_Open_Flower_P Parameter: Plant Line Value: WS
  misc_feature: MA Experiment 20000286 PARAMETER Experiment Name: At_Open_Flower_P Parameter: Tissue Value: Half Open vs. Whole Plant
  misc_feature: MA Experiment ID: 20000436 Result: Up-regulated in Transcription
  misc_feature: MA Experiment 20000436 PARAMETER Experiment Name: At_Drought_P Parameter: Age (day) Value: 7
  misc_feature: MA Experiment 20000436 PARAMETER Experiment Name: At_Drought_P Parameter: Organism Value: A. thaliana
  misc_feature: MA Experiment 20000436 PARAMETER Experiment Name: At_Drought_P Parameter: Plant Line Value: WS
  misc_feature: MA Experiment 20000436 PARAMETER Experiment Name: At_Drought_P Parameter: Timepoint (hr) Value: 12
  misc_feature: MA Experiment 20000436 PARAMETER Experiment Name: At_Drought_P Parameter: Tissue Value: Whole Plant
  misc_feature: MA Experiment 20000436 PARAMETER Experiment Name: At_Drought_P Parameter: Treatment Value: Drought vs. No Drought
  misc_feature: MA Experiment ID: 20000437 Result: Up-regulated in Transcription
  misc_feature: MA Experiment 20000437 PARAMETER Experiment Name: At_Drought_P Parameter: Age (day) Value: 8
  misc_feature: MA Experiment 20000437 PARAMETER Experiment Name: At_Drought_P Parameter: Organism Value: A. thaliana
  misc_feature: MA Experiment 20000437 PARAMETER Experiment Name: At_Drought_P Parameter: Plant Line Value: WS
  misc_feature: MA Experiment 20000437 PARAMETER Experiment Name: At_Drought_P Parameter: Timepoint (hr) Value: 24
  misc_feature: MA Experiment 20000437 PARAMETER Experiment Name: At_Drought_P Parameter: Tissue Value: Whole Plant
  misc_feature: MA Experiment 20000437 PARAMETER Experiment Name: At_Drought_P Parameter: Treatment Value: Drought vs. No Drought
  misc_feature: MA Experiment ID: 20000439 Result: Up-regulated in Transcription
  misc_feature: MA Experiment 20000439 PARAMETER Experiment Name: At_Roots__P Parameter: Age (day) Value: 14 vs. 21
  misc_feature: MA Experiment 20000439 PARAMETER Experiment Name: At_Roots__P Parameter: Organism Value: A. thaliana
  misc_feature: MA Experiment 20000439 PARAMETER Experiment Name: At_Roots__P Parameter: Tissue Value: Roots vs. Whole Plant
  misc_feature: MA Experiment ID: 20000453 Result: Up-regulated in Transcription
  misc_feature: MA Experiment 20000453 PARAMETER Experiment Name: At_100uM_ABA_P Parameter: Age (day) Value: 15
  misc_feature: MA Experiment 20000453 PARAMETER Experiment Name: At_100uM_ABA_P Parameter: Organism Value: A. thaliana
  misc_feature: MA Experiment 20000453 PARAMETER Experiment Name: At_100uM_ABA_P Parameter: Plant Line Value: WS
  misc_feature: MA Experiment 20000453 PARAMETER Experiment Name: At_100uM_ABA_P Parameter: Timepoint (hr) Value: 24
  misc_feature: MA Experiment 20000453 PARAMETER Experiment Name: At_100uM_ABA_P Parameter: Tissue Value: Aerial
  misc_feature: MA Experiment 20000453 PARAMETER Experiment Name: At_100uM_ABA_P Parameter: Treatment Value: 100uM ABA vs. No Treatment
  misc_feature: MA Experiment ID: 20000506 Result: Up-regulated in Transcription
  misc_feature: MA Experiment 20000506 PARAMETER Experiment Name: At_Wounding_P Parameter: Organism Value: A. thaliana
  misc_feature: MA Experiment 20000506 PARAMETER Experiment Name: At_Wounding_P Parameter: Plant Line Value: WS
  misc_feature: MA Experiment 20000506 PARAMETER Experiment Name: At_Wounding_P Parameter: Timepoint (hr) Value: 6
  misc_feature: MA Experiment 20000506 PARAMETER Experiment Name: At_Wounding_P Parameter: Tissue Value: Aerial
  misc_feature: MA Experiment 20000506 PARAMETER Experiment Name: At_Wounding_P Parameter: Treatment Value: Wounding vs. No Wounding
  misc_feature: MA Experiment ID: 20000573 Result: Down-regulated in Transcription
  misc_feature: MA Experiment 20000573 PARAMETER Experiment Name: At_100uM_ABA_Mutants__P Parameter: Organism Value: A. thaliana
  misc_feature: MA Experiment 20000573 PARAMETER Experiment Name: At_100uM_ABA_Mutants__P Parameter: Plant Line Value: CS22 vs. Ler wt
  misc_feature: MA Experiment 20000573 PARAMETER Experiment Name: At_100uM_ABA_Mutants__P Parameter: Timepoint (hr) Value: N/A
  misc_feature: MA Experiment 20000573 PARAMETER Experiment Name: At_100uM_ABA_Mutants__P Parameter: Tissue Value: Whole Plant
  misc_feature: MA Experiment 20000573 PARAMETER Experiment Name: At_100uM_ABA_Mutants__P Parameter: Treatment Value: None
  misc_feature: MA Experiment ID: 20000576 Result: Up-regulated in Transcription
  misc_feature: MA Experiment 20000576 PARAMETER Experiment Name: At_100uM_ABA_Mutants__P Parameter: Organism Value: A. thaliana
  misc_feature: MA Experiment 20000576 PARAMETER Experiment Name: At_100uM_ABA_Mutants__P Parameter: Plant Line Value: CS23
  misc_feature: MA Experiment 20000576 PARAMETER Experiment Name: At_100uM_ABA_Mutants__P Parameter: Timepoint (hr) Value: 6
  misc_feature: MA Experiment 20000576 PARAMETER Experiment Name: At_100uM_ABA_Mutants__P Parameter: Tissue Value: Whole Plant
  misc_feature: MA Experiment 20000576 PARAMETER Experiment Name: At_100uM_ABA_Mutants__P Parameter: Treatment Value: 1uM ABA vs. No Treatment
  misc_feature: MA Experiment ID: 20000709 Result: Down-regulated in Transcription
  misc_feature: MA Experiment 20000709 PARAMETER Experiment Name: At_15mM_NH4NO3_L-to-H_P Parameter: Age (hr) Value: 14
  misc_feature: MA Experiment 20000709 PARAMETER Experiment Name: At_15mM_NH4NO3_L-to-H_P Parameter: Organism Value: A. thaliana
  misc_feature: MA Experiment 20000709 PARAMETER Experiment Name: At_15mM_NH4NO3_L-to-H_P Parameter: Plant Line Value: WS
  misc_feature: MA Experiment 20000709 PARAMETER Experiment Name: At_15mM_NH4NO3_L-to-H_P Parameter: Timepoint (hr) Value: 4
  misc_feature: MA Experiment 20000709 PARAMETER Experiment Name: At_15mM_NH4NO3_L-to-H_P Parameter: Tissue Value: Aerial
  misc_feature: MA Experiment 20000709 PARAMETER Experiment Name: At_15mM_NH4NO3_L-to-H_P Parameter: Treatment Value: 15mM NH4NO3 vs. 30mM Mannitol
  misc_feature: MA Experiment ID: 20000794 Result: Up-regulated in Transcription
  misc_feature: MA Experiment 20000794 PARAMETER Experiment Name: At_Petals_P Parameter: Age (day) Value: 23-25 days
  misc_feature: MA Experiment 20000794 PARAMETER Experiment Name: At_Petals_P Parameter: Plant Line Value: WS
  misc_feature: MA Experiment 20000794 PARAMETER Experiment Name: At_Petals_P Parameter: Tissue Value: Petals vs. Whole plant
  misc_feature: MA Experiment ID: 20001554 Result: Up-regulated in Transcription
  misc_feature: MA Experiment 20001554 PARAMETER Experiment Name: At_Drought_Soil_Dry_P Parameter: Age (day) Value: 21
  misc_feature: MA Experiment 20001554 PARAMETER Experiment Name: At_Drought_Soil_Dry_P Parameter: Organism Value: A. thaliana
  misc_feature: MA Experiment 20001554 PARAMETER Experiment Name: At_Drought_Soil_Dry_P Parameter: Plant Line Value: WS
  misc_feature: MA Experiment 20001554 PARAMETER Experiment Name: At_Drought_Soil_Dry_P Parameter: Post Timepoint (hr) Value: None
  misc_feature: MA Experiment 20001554 PARAMETER Experiment Name: At_Drought_Soil_Dry_P Parameter: Post-Treatment Value: None
  misc_feature: MA Experiment 20001554 PARAMETER Experiment Name: At_Drought_Soil_Dry_P Parameter: Timepoint (day) Value: 7
  misc_feature: MA Experiment 20001554 PARAMETER Experiment Name: At_Drought_Soil_Dry_P Parameter: Treatment Value: Drought vs. No Drought
  misc_feature: MA Experiment ID: 20001555 Result: Up-regulated in Transcription
  misc_feature: MA Experiment 20001555 PARAMETER Experiment Name: At_Drought_Soil_Dry_P Parameter: Age (day) Value: 24
  misc_feature: MA Experiment 20001555 PARAMETER Experiment Name: At_Drought_Soil_Dry_P Parameter: Organism Value: A. thaliana
  misc_feature: MA Experiment 20001555 PARAMETER Experiment Name: At_Drought_Soil_Dry_P Parameter: Plant Line Value: WS
  misc_feature: MA Experiment 20001555 PARAMETER Experiment Name: At_Drought_Soil_Dry_P Parameter: Post Timepoint (hr) Value: None
  misc_feature: MA Experiment 20001555 PARAMETER Experiment Name: At_Drought_Soil_Dry_P Parameter: Post-Treatment Value: None
  misc_feature: MA Experiment 20001555 PARAMETER Experiment Name: At_Drought_Soil_Dry_P Parameter: Timepoint (day) Value: 10
  misc_feature: MA Experiment 20001555 PARAMETER Experiment Name: At_Drought_Soil_Dry_P Parameter: Treatment Value: Drought vs. No Drought
  misc_feature: MA Experiment ID: 20001558 Result: Down-regulated in Transcription
  misc_feature: MA Experiment 20001558 PARAMETER Experiment Name: At_Drought_Soil_Dry_P Parameter: Age (day) Value: 27
  misc_feature: MA Experiment 20001558 PARAMETER Experiment Name: At_Drought_Soil_Dry_P Parameter: Organism Value: A. thaliana
  misc_feature: MA Experiment 20001558 PARAMETER Experiment Name: At_Drought_Soil_Dry_P Parameter: Plant Line Value: WS
  misc_feature: MA Experiment 20001558 PARAMETER Experiment Name: At_Drought_Soil_Dry_P Parameter: Post Timepoint (hr) Value: 6
  misc_feature: MA Experiment 20001558 PARAMETER Experiment Name: At_Drought_Soil_Dry_P Parameter: Post-Treatment Value: Re-Water vs. No Drought
  misc_feature: MA Experiment 20001558 PARAMETER Experiment Name: At_Drought_Soil_Dry_P Parameter: Timepoint (day) Value: 13
  misc_feature: MA Experiment 20001558 PARAMETER Experiment Name: At_Drought_Soil_Dry_P Parameter: Treatment Value: Drought vs. No Drought
  misc_feature: MA Experiment ID: 20001559 Result: Up-regulated in Transcription
  misc_feature: MA Experiment 20001559 PARAMETER Experiment Name: At_Drought_Soil_Dry_P Parameter: Age (day) Value: 28
  misc_feature: MA Experiment 20001559 PARAMETER Experiment Name: At_Drought_Soil_Dry_P Parameter: Organism Value: A. thaliana
  misc_feature: MA Experiment 20001559 PARAMETER Experiment Name: At_Drought_Soil_Dry_P Parameter: Plant Line Value: WS
  misc_feature: MA Experiment 20001559 PARAMETER Experiment Name: At_Drought_Soil_Dry_P Parameter: Post Timepoint (hr) Value: 29
  misc_feature: MA Experiment 20001559 PARAMETER Experiment Name: At_Drought_Soil_Dry_P Parameter: Post-Treatment Value: Re-Water vs. No Drought
  misc_feature: MA Experiment 20001559 PARAMETER Experiment Name: At_Drought_Soil_Dry_P Parameter: Timepoint (day) Value: 14
  misc_feature: MA Experiment 20001559 PARAMETER Experiment Name: At_Drought_Soil_Dry_P Parameter: Treatment Value: Drought vs. No Drought
  misc_feature: MA Experiment ID: 20001560 Result: Down-regulated in Transcription
  misc_feature: MA Experiment 20001560 PARAMETER Experiment Name: At_Drought_Soil_Dry_P Parameter: Age (day) Value: 28
  misc_feature: MA Experiment 20001560 PARAMETER Experiment Name: At_Drought_Soil_Dry_P Parameter: Organism Value: A. thaliana
  misc_feature: MA Experiment 20001560 PARAMETER Experiment Name: At_Drought_Soil_Dry_P Parameter: Plant Line Value: WS
  misc_feature: MA Experiment 20001560 PARAMETER Experiment Name: At_Drought_Soil_Dry_P Parameter: Post Timepoint (hr) Value: None
  misc_feature: MA Experiment 20001560 PARAMETER Experiment Name: At_Drought_Soil_Dry_P Parameter: Post-Treatment Value: None
  misc_feature: MA Experiment 20001560 PARAMETER Experiment Name: At_Drought_Soil_Dry_P Parameter: Timepoint (day) Value: 14
  misc_feature: MA Experiment 20001560 PARAMETER Experiment Name: At_Drought_Soil_Dry_P Parameter: Treatment Value: Drought vs. No Drought
  misc_feature: MA Experiment ID: 20001757 Result: Down-regulated in Transcription
  misc_feature: MA Experiment 20001757 PARAMETER Experiment Name: At_50mM_NH4NO3_L-to-H_P Parameter: Timepoint (hr) Value: 6
  misc_feature: MA Experiment 20001757 PARAMETER Experiment Name: At_50mM_NH4NO3_L-to-H_P Parameter: Tissue Value: Leaf
  misc_feature: MA Experiment 20001757 PARAMETER Experiment Name: At_50mM_NH4NO3_L-to-H_P Parameter: Treatment Value: 50mM NH4NO3 vs 100mM Mannitol
  misc_feature: MA Experiment ID: 20001904 Result: Up-regulated in Transcription
  misc_feature: MA Experiment 20001904 PARAMETER Experiment Name: At_Drought_Reproduction_P Parameter: Age (day) Value: 37
  misc_feature: MA Experiment 20001904 PARAMETER Experiment Name: At_Drought_Reproduction_P Parameter: Organism Value: A. thaliana
  misc_feature: MA Experiment 20001904 PARAMETER Experiment Name: At_Drought_Reproduction_P Parameter: Plant Line Value: WS
  misc_feature: MA Experiment 20001904 PARAMETER Experiment Name: At_Drought_Reproduction_P Parameter: Timepoint (day) Value: 7
  misc_feature: MA Experiment 20001904 PARAMETER Experiment Name: At_Drought_Reproduction_P Parameter: Tissue Value: Rosettes
  misc_feature: MA Experiment 20001904 PARAMETER Experiment Name: At_Drought_Reproduction_P Parameter: Treatment Value: Drought vs. No Drought
  misc_feature: MA Experiment ID: 20001905 Result: Up-regulated in Transcription
  misc_feature: MA Experiment 20001905 PARAMETER Experiment Name: At_Drought_Reproduction_P Parameter: Age (day) Value: 40
  misc_feature: MA Experiment 20001905 PARAMETER Experiment Name: At_Drought_Reproduction_P Parameter: Organism Value: A. thaliana
  misc_feature: MA Experiment 20001905 PARAMETER Experiment Name: At_Drought_Reproduction_P Parameter: Plant Line Value: WS
  misc_feature: MA Experiment 20001905 PARAMETER Experiment Name: At_Drought_Reproduction_P Parameter: Timepoint (day) Value: 10
  misc_feature: MA Experiment 20001905 PARAMETER Experiment Name: At_Drought_Reproduction_P Parameter: Tissue Value: Rosettes
  misc_feature: MA Experiment 20001905 PARAMETER Experiment Name: At_Drought_Reproduction_P Parameter: Treatment Value: Drought vs. No Drought
  misc_feature: MA Experiment ID: 20001906 Result: Up-regulated in Transcription
  misc_feature: MA Experiment 20001906 PARAMETER Experiment Name: At_Drought_Reproduction_P Parameter: Age (day) Value: 35
  misc_feature: MA Experiment 20001906 PARAMETER Experiment Name: At_Drought_Reproduction_P Parameter: Organism Value: A. thaliana
  misc_feature: MA Experiment 20001906 PARAMETER Experiment Name: At_Drought_Reproduction_P Parameter: Plant Line Value: WS
  misc_feature: MA Experiment 20001906 PARAMETER Experiment Name: At_Drought_Reproduction_P Parameter: Timepoint (day) Value: 5
  misc_feature: MA Experiment 20001906 PARAMETER Experiment Name: At_Drought_Reproduction_P Parameter: Tissue Value: Siliques
  misc_feature: MA Experiment 20001906 PARAMETER Experiment Name: At_Drought_Reproduction_P Parameter: Treatment Value: Drought vs. No Drought
  misc_feature: MA Experiment ID: 20001907 Result: Up-regulated in Transcription
  misc_feature: MA Experiment 20001907 PARAMETER Experiment Name: At_Drought_Reproduction_P Parameter: Age (day) Value: 37
  misc_feature: MA Experiment 20001907 PARAMETER Experiment Name: At_Drought_Reproduction_P Parameter: Organism Value: A. thaliana
  misc_feature: MA Experiment 20001907 PARAMETER Experiment Name: At_Drought_Reproduction_P Parameter: Plant Line Value: WS
  misc_feature: MA Experiment 20001907 PARAMETER Experiment Name: At_Drought_Reproduction_P Parameter: Timepoint (day) Value: 7
  misc_feature: MA Experiment 20001907 PARAMETER Experiment Name: At_Drought_Reproduction_P Parameter: Tissue Value: Siliques
  misc_feature: MA Experiment 20001907 PARAMETER Experiment Name: At_Drought_Reproduction_P Parameter: Treatment Value: Drought vs. No Drought
  misc_feature: MA Experiment ID: 20001908 Result: Up-regulated in Transcription
  misc_feature: MA Experiment 20001908 PARAMETER Experiment Name: At_Drought_Reproduction_P Parameter: Age (day) Value: 40
  misc_feature: MA Experiment 20001908 PARAMETER Experiment Name: At_Drought_Reproduction_P Parameter: Organism Value: A. thaliana
  misc_feature: MA Experiment 20001908 PARAMETER Experiment Name: At_Drought_Reproduction_P Parameter: Plant Line Value: WS
  misc_feature: MA Experiment 20001908 PARAMETER Experiment Name: At_Drought_Reproduction_P Parameter: Timepoint (day) Value: 10
  misc_feature: MA Experiment 20001908 PARAMETER Experiment Name: At_Drought_Reproduction_P Parameter: Tissue Value: Siliques
  misc_feature: MA Experiment 20001908 PARAMETER Experiment Name: At_Drought_Reproduction_P Parameter: Treatment Value: Drought vs. No Drought
  misc_feature: MA Experiment ID: 20001911 Result: Up-regulated in Transcription
  misc_feature: MA Experiment 20001911 PARAMETER Experiment Name: At_Drought_Reproduction_P Parameter: Age (day) Value: 40
  misc_feature: MA Experiment 20001911 PARAMETER Experiment Name: At_Drought_Reproduction_P Parameter: Organism Value: A. thaliana
  misc_feature: MA Experiment 20001911 PARAMETER Experiment Name: At_Drought_Reproduction_P Parameter: Plant Line Value: WS
  misc_feature: MA Experiment 20001911 PARAMETER Experiment Name: At_Drought_Reproduction_P Parameter: Timepoint (day) Value: 10
  misc_feature: MA Experiment 20001911 PARAMETER Experiment Name: At_Drought_Reproduction_P Parameter: Tissue Value: Flowers
  misc_feature: MA Experiment 20001911 PARAMETER Experiment Name: At_Drought_Reproduction_P Parameter: Treatment Value: Drought vs. No Drought
aaagtcctttgcttcatttcttataaaactaaaccaccttcttcatcatcattcatcaccaatctatctcatattcaatatactgaatatggactcattctacttctgtatatacacatgggatccaaacttaaactttaccctctcttaaatcactcatccgtttttcacccagacagtcgttaccaatcggcccctacaatggaggaagagcaacaacaacttcgtgttctcttcgcgaaatacgagatgggaaggttactaggcaaaggaacattcggaaaagtttattacggcaaagagataacaaccggagaaagcgttgcaatcaaaatcatcaacaaagatcaagtcaaacgtgaaggtatgatggaacaaatcaaacgagagatctcaatcatgagacttgttcgtcatccaaacatcgttgagttaaaagaagtcatggctacaaaaacaaagatcttctttatcatggaatacgttaaaggcggtgaacttttctccaagatcgttaatggaaagcttaaagaagactctgctcgtaagtatttccaacaattaatctcagccgttgatttttgtcatagtagaggcgtttctcaccgagatctaaaaccggagaatctcttagttgacgagaacggagatcttaaggtttcagattttggtctctctgctttaccggaacagattttacaagacggtttgcttcatactcagtgtggaactccggcgtatgttgcaccggaggttttgaggaagaaaggttacgacggagctaaagctgatatttggtcgtgtggtttatcttgtacgtgcttctcgctggattcttaccgtttcaagatgagaacctaatgaaaatgtatcggaagatcttcaaatcggagtttgagtatccgccgtggttttcaccggagtccaagaggttgatttcaaagcttttagttgttgatcctaacaaacggatctcgataccggcgattatgcgaacaccgtggtttcgtaaaaacatcaactctccgatcgagttcaagatcgatgagctcgagatccaaaacgtagaagacgaaacaccaacaacaacagcaacaacagcaacaacagcaacaacaacaacaacaccggtctcgccgaagttctttaacgcgtttgaattcatctcttctatgtcatcaggatttgatctatcaagtttgttcgagagtaagaggaagctgagatctatgtttacgtcacggtggtcggcgtcggagataatggggaagcttgaagggatagggaaagagatgaatatgaaggtgaagaggactaaagactttaaggtgaagttgtttgggaaaacggaagggaggaaaggacagattgcggtgacggctgaggttttcgaggttgcgccggaggttgccgtcgttgagttgtgtaagtcggcgggagatactttggagtataataggttgtatgaagaacatgtccggccagcgttggaggagatagtgtggtcgtggcacggtgataatcataataataatattgttaagagtaatggtaattatgttagtgatgaaaattctggtagtgactgctaagagaatgtaatgatagttatgtaaattaaactgtgtatttttgttaatcagttggtagattcaaggaagtttttgtaaattgtgtatatagaagttgaggtttattattattctctttgagc

SEQ ID NO: 37773 - protein, 286 aa, Arabidopsis thaliana
  peptide (1)..(286): Ceres Seq. ID no. 12369889
  misc_feature (82)..(270): Pfam Name: Protein kinase domain Pfam Description: Protein kinase domain
  misc_feature (77)..(270): Homolog of NCBI NO: 34907870 NR Description: putative serine/threonine protein kinase
  misc_feature (77)..(270): Homolog of NCBI NO: 23428550 NR Description: Serine/threonine Kinase [Persea americana]
  misc_feature (72)..(270): Homolog of NCBI NO: 34903780 NR Description: unnamed protein product [Oryza sativa (japonica
  misc_feature (72)..(270): Homolog of NCBI NO: 33146431 NR Description: putative Serine/threonine Kinase
  misc_feature (77)..(270): Homolog of NCBI NO: 15242509 NR Description: serine threonine protein kinase
  misc_feature (68)..(270): Homolog of NCBI NO: 15224679 NR Description: putative protein kinase
  misc_feature (68)..(270): Homolog of NCBI NO: 24899813 NR Description: serine/threonine protein kinase-like protein
  misc_feature (68)..(270): Homolog of NCBI NO: 30683398 NR Description: CBL-interacting protein kinase 5 [Arabidopsis
  misc_feature (40)..(270): Homolog of NCBI NO: 15215664 NR Description: AT5g25110/T11H3_120 [Arabidopsis thaliana]
  misc_feature (40)..(270): Homolog of NCBI NO: 18420882 NR Description: serine/threonine protein kinase-like protein
KVLCFISYKTKPPSSSSFITNLSHIQYTEYGLILLLYIHMGSKLKLYPLLNHSSVFHPDSRYQSAPTMEEEQQQLRVLFAKYEMGRLLGKGTFGKVYYGKEITTGESVAIKIINKDQVKREGMMEQIKREISIMRLVRHPNIVELKEVMATKTKIFFIMEYVKGGELFSKIVNGKLKEDSARKYFQQLISAVDFCHSRGVSHRDLKPENLLVDENGDLKVSDFGLSALPEQILQDGLLHTQCGTPAYVAPEVLRKKGYDGAKADIWSCGLSCTCFSLDSYRFKMRT

SEQ ID NO: 37774 - protein, 247 aa, Arabidopsis thaliana
  peptide (1)..(247): Ceres Seq. ID no. 12369890
  misc_feature (43)..(231): Pfam Name: Protein kinase domain Pfam Description: Protein kinase domain
  misc_feature (38)..(231): Homolog of NCBI NO: 34907870 NR Description: putative serine/threonine protein kinase
  misc_feature (38)..(231): Homolog of NCBI NO: 23428550 NR Description: Serine/threonine Kinase [Persea americana]
  misc_feature (33)..(231): Homolog of NCBI NO: 34903780 NR Description: unnamed protein product [Oryza sativa (japonica
  misc_feature (33)..(231): Homolog of NCBI NO: 33146431 NR Description: putative Serine/threonine Kinase
  misc_feature (38)..(231): Homolog of NCBI NO: 15242509 NR Description: serine threonine protein kinase
  misc_feature (29)..(231): Homolog of NCBI NO: 15224679 NR Description: putative protein kinase
  misc_feature (29)..(231): Homolog of NCBI NO: 24899813 NR Description: serine/threonine protein kinase-like protein
  misc_feature (29)..(231): Homolog of NCBI NO: 30683398 NR Description: CBL-interacting protein kinase 5 [Arabidopsis
  misc_feature (1)..(231): Homolog of NCBI NO: 15215664 NR Description: AT5g25110/T11H3_120 [Arabidopsis thaliana]
  misc_feature (1)..(231): Homolog of NCBI NO: 18420882 NR Description: serine/threonine protein kinase-like protein
MGSKLKLYPLLNHSSVFHPDSRYQSAPTMEEEQQQLRVLFAKYEMGRLLGKGTFGKVYYGKEITTGESVAIKIINKDQVKREGMMEQIKREISIMRLVRHPNIVELKEVMATKTKIFFIMEYVKGGELFSKIVNGKLKEDSARKYFQQLISAVDFCHSRGVSHRDLKPENLLVDENGDLKVSDFGLSALPEQILQDGLLHTQCGTPAYVAPEVLRKKGYDGAKADIWSCGLSCTCFSLDSYRFKMRT

SEQ ID NO: 37775 - protein, 243 aa, Arabidopsis thaliana
  peptide (1)..(243): Ceres Seq. ID no. 12369891
  misc_feature (92)..(151): Pfam Name: NAF domain Pfam Description: NAF domain
  misc_feature (1)..(225): Homolog of NCBI NO: 34907870 NR Description: putative serine/threonine protein kinase
  misc_feature (1)..(220): Homolog of NCBI NO: 23428550 NR Description: Serine/threonine Kinase [Persea americana]
  misc_feature (1)..(230): Homolog of NCBI NO: 34903780 NR Description: unnamed protein product [Oryza sativa (japonica
  misc_feature (1)..(220): Homolog of NCBI NO: 33146431 NR Description: putative Serine/threonine Kinase
  misc_feature (1)..(225): Homolog of NCBI NO: 15242509 NR Description: serine threonine protein kinase
  misc_feature (1)..(238): Homolog of NCBI NO: 15224679 NR Description: putative protein kinase
  misc_feature (1)..(216): Homolog of NCBI NO: 24899813 NR Description: serine/threonine protein kinase-like protein
  misc_feature (1)..(225): Homolog of NCBI NO: 30683398 NR Description: CBL-interacting protein kinase 5 [Arabidopsis
  misc_feature (1)..(243): Homolog of NCBI NO: 15215664 NR Description: AT5g25110/T11H3_120 [Arabidopsis thaliana]
  misc_feature (1)..(243): Homolog of NCBI NO: 18420882 NR Description: serine/threonine protein kinase-like protein
MKMYRKIFKSEFEYPPWFSPESKRLISKLLVVDPNKRISIPAIMRTPWFRKNINSPIEFKIDELEIQNVEDETPTTTATTATTATTTTTPVSPKFFNAFEFISSMSSGFDLSSLFESKRKLRSMFTSRWSASEIMGKLEGIGKEMNMKVKRTKDFKVKLFGKTEGRKGQIAVTAEVFEVAPEVAVVELCKSAGDTLEYNRLYEEHVRPALEEIVWSWHGDNHNNNIVKSNGNYVSDENSGSDC

SEQ ID NO: 37776 - DNA, 1060 bp, Arabidopsis thaliana
  misc_feature (1)..(1060): Ceres Seq. ID no. 12389046
  misc_feature: MA Experiment ID: 108434 Result: Up-regulated in Transcription
  misc_feature: MA Experiment 108434 PARAMETER Experiment Name: At_Root_Tips_cDNA_P Parameter: Tissue Value: Root Tips
  misc_feature: MA Experiment ID: 108461 Result: Down-regulated in Transcription
  misc_feature: MA Experiment 108461 PARAMETER Experiment Name: At_Germinating_Seeds_cDNA_P Parameter: Age (day) Value: 1 vs. 0
  misc_feature: MA Experiment 108461 PARAMETER Experiment Name: At_Germinating_Seeds_cDNA_P Parameter: Tissue Value: Germinating Seeds
  misc_feature: MA Experiment ID: 108462 Result: Down-regulated in Transcription
  misc_feature: MA Experiment 108462 PARAMETER Experiment Name: At_Germinating_Seeds_cDNA_P Parameter: Age (day) Value: 2 vs. 0
  misc_feature: MA Experiment 108462 PARAMETER Experiment Name: At_Germinating_Seeds_cDNA_P Parameter: Tissue Value: Germinating Seeds
  misc_feature: MA Experiment ID: 108463 Result: Down-regulated in Transcription
  misc_feature: MA Experiment 108463 PARAMETER Experiment Name: At_Germinating_Seeds_cDNA_P Parameter: Age (day) Value: 3 vs. 0
  misc_feature: MA Experiment 108463 PARAMETER Experiment Name: At_Germinating_Seeds_cDNA_P Parameter: Tissue Value: Germinating Seeds
  misc_feature: MA Experiment ID: 108464 Result: Down-regulated in Transcription
  misc_feature: MA Experiment 108464 PARAMETER Experiment Name: At_Germinating_Seeds_cDNA_P Parameter: Age (day) Value: 4 vs. 0
  misc_feature: MA Experiment 108464 PARAMETER Experiment Name: At_Germinating_Seeds_cDNA_P Parameter: Tissue Value: Germinating Seeds
  misc_feature: MA Experiment ID: 20000112 Result: Down-regulated in Transcription
  misc_feature: MA Experiment 20000112 PARAMETER Experiment Name: At_42deg_Heat_cDNA_P Parameter: Temperature (deg C) Value: 42 vs. 22
  misc_feature: MA Experiment 20000112 PARAMETER Experiment Name: At_42deg_Heat_cDNA_P Parameter: Timepoint (hr) Value: 2
  misc_feature: MA Experiment 20000112 PARAMETER Experiment Name: At_42deg_Heat_cDNA_P Parameter: Tissue Value: Aerial
  misc_feature: MA Experiment ID: 20000117 Result: Down-regulated in Transcription
  misc_feature: MA Experiment 20000117 PARAMETER Experiment Name: At_100uM_ABA_Mutants_cDNA_P Parameter: Plant Line Value: Columbia
  misc_feature: MA Experiment 20000117 PARAMETER Experiment Name: At_100uM_ABA_Mutants_cDNA_P Parameter: Timepoint (hr) Value: 6
  misc_feature: MA Experiment 20000117 PARAMETER Experiment Name: At_100uM_ABA_Mutants_cDNA_P Parameter: Tissue Value: Aerial
  misc_feature: MA Experiment 20000117 PARAMETER Experiment Name: At_100uM_ABA_Mutants_cDNA_P Parameter: Treatment Value: 100uM ABA vs. No Treatment
  misc_feature: MA Experiment ID: 20000180 Result: Down-regulated in Transcription
  misc_feature: MA Experiment 20000180 PARAMETER Experiment Name: At_Germinating_Seeds_P Parameter: Age (hr) Value: 24 vs. 0
  misc_feature: MA Experiment 20000180 PARAMETER Experiment Name: At_Germinating_Seeds_P Parameter: Tissue Value: Germinating Seeds
  misc_feature: MA Experiment ID: 20000184 Result: Up-regulated in Transcription
  misc_feature: MA Experiment 20000184 PARAMETER Experiment Name: At_Shoots__P Parameter: Age (day) Value: 7
  misc_feature: MA Experiment 20000184 PARAMETER Experiment Name: At_Shoots__P Parameter: Tissue Value: Shoots vs. Whole Plant
  misc_feature: MA Experiment ID: 20000227 Result: Up-regulated in Transcription
  misc_feature: MA Experiment 20000227 PARAMETER Experiment Name: At_Root-Tips-vs-Tops_P Parameter: Tissue Value: Root Tips vs. Root Tops
  misc_feature: MA Experiment ID: 20001247 Result: Down-regulated in Transcription
  misc_feature: MA Experiment 20001247 PARAMETER Experiment Name: At_Far-red-induction_P Parameter: Age (day) Value: 7
  misc_feature: MA Experiment 20001247 PARAMETER Experiment Name: At_Far-red-induction_P Parameter: Light Value: Far-red vs. White
  misc_feature: MA Experiment 20001247 PARAMETER Experiment Name: At_Far-red-induction_P Parameter: Organism Value: A. thaliana
  misc_feature: MA Experiment 20001247 PARAMETER Experiment Name: At_Far-red-induction_P Parameter: Plant Line Value: Columbia
  misc_feature: MA Experiment 20001247 PARAMETER Experiment Name: At_Far-red-induction_P Parameter: Timepoint (hr) Value: 1
  misc_feature: MA Experiment 20001247 PARAMETER Experiment Name: At_Far-red-induction_P Parameter: Tissue Value: Whole Plant
  misc_feature: MA Experiment ID: 20001451 Result: Down-regulated in Transcription
  misc_feature: MA Experiment 20001451 PARAMETER Experiment Name: At_Far-red-induction_P Parameter: Age (day) Value: 7
  misc_feature: MA Experiment 20001451 PARAMETER Experiment Name: At_Far-red-induction_P Parameter: Light Value: Far-red vs. White
  misc_feature: MA Experiment 20001451 PARAMETER Experiment Name: At_Far-red-induction_P Parameter: Organism Value: A. thaliana
  misc_feature: MA Experiment 20001451 PARAMETER Experiment Name: At_Far-red-induction_P Parameter: Plant Line Value: Columbia
  misc_feature: MA Experiment 20001451 PARAMETER Experiment Name: At_Far-red-induction_P Parameter: Timepoint (hr) Value: 24
  misc_feature: MA Experiment 20001451 PARAMETER Experiment Name: At_Far-red-induction_P Parameter: Tissue Value: Whole Plant
  misc_feature: MA Experiment ID: 20001560 Result: Up-regulated in Transcription
  misc_feature: MA Experiment 20001560 PARAMETER Experiment Name: At_Drought_Soil_Dry_P Parameter: Age (day) Value: 28
  misc_feature: MA Experiment 20001560 PARAMETER Experiment Name: At_Drought_Soil_Dry_P Parameter: Organism Value: A. thaliana
  misc_feature: MA Experiment 20001560 PARAMETER Experiment Name: At_Drought_Soil_Dry_P Parameter: Plant Line Value: WS
  misc_feature: MA Experiment 20001560 PARAMETER Experiment Name: At_Drought_Soil_Dry_P Parameter: Post Timepoint (hr) Value: None
  misc_feature: MA Experiment 20001560 PARAMETER Experiment Name: At_Drought_Soil_Dry_P Parameter: Post-Treatment Value: None
  misc_feature: MA Experiment 20001560 PARAMETER Experiment Name: At_Drought_Soil_Dry_P Parameter: Timepoint (day) Value: 14
  misc_feature: MA Experiment 20001560 PARAMETER Experiment Name: At_Drought_Soil_Dry_P Parameter: Treatment Value: Drought vs. No Drought
gcataaagagaaactaacattttcaattcaatgacaaagccacatagctaataaatcgaaacctcaaaaaacaaacaagagcttatgacattgtcagattgtctctcactgttgtttagcttcgaccttcttcttctgccagagcctgtccacgccactgtctgcgtctccctgagcacggacaaatccgcagagagcaaaagtggtgaattggccagtgtagagaccattagcatcaagatgaccaatgttaagctgaactgaagcatgatcctttgatgtgatcattctgtttgttgccgagcatttccttggaatgtagagctctgtgacctgacctgcgtcgttctccatttttgagatttagcttcaaaaaaaaatcgatctgcgaggaagaagaagaatctgagagaggtttggcggcgacaaagatagcagattctcagctttcgataacaataatggatcttgttcaacaagctactaactacaagcagcttaagaagggagctaatgaagctaccaaaacattgaaccgtggaatctctgagttcgttgttatggctgctgatgctgaaccacttgagattcttcttcatcttcctttgcttgccgaagataagaatgtgccatatgtgtttgtaccttcgaaacaagcattgggaagagcatgtggagtaacaagacctgttattgcttgttcagtgacatcgaatgaggcaagccagttgaaatcgcagattcagcatctcaaggatgcgattgagaagctcctgatctaaggatttctgctcagtatgaagagtctctgcaatgtggaatggctctgactgaagttagtttgtgtgatttacctatttgaagaatgtattgtgactggtgttaatgcttagtatgtggatcatcatcgctcatttgtgcaattgagtttcttagatttttattttggtgcttgccaagcactgcttggtttgtgttgagacataacaggtaaagagccgtcatggttctttaactgtctgtttattacactaacgatctatccttaagtcccattacg

SEQ ID NO: 37777 - protein, 106 aa, Arabidopsis thaliana; identical to SEQ ID NO: 26406
  peptide (1)..(106): Ceres Seq. ID no. 12389047
  misc_feature (1)..(92): Pfam Name: Ribosomal protein L7Ae/L30e/S12e/Gadd45 family Pfam Description: Ribosomal protein L7Ae/L30e/S12e/Gadd45 family
  misc_feature (1)..(106): Homolog of NCBI NO: 17535189 NR Description: Ribosomal protein L7Ae/L30e/S12e/Gadd45 family
  misc_feature (1)..(106): Homolog of NCBI NO: 28302201 NR Description: Similar to NHP2 non-histone chromosome protein
  misc_feature (1)..(86): Homolog of NCBI NO: 25295061 NR Description: Ribosomal protein L7Ae-like (partial)
  misc_feature (1)..(106): Homolog of NCBI NO: 37530712 NR Description: putative ribosomal protein L7Ae-like
  misc_feature (1)..(24): Homolog of NCBI NO: 30687670 NR Description: ribosomal protein L7Ae family [Arabidopsis
  misc_feature (20)..(106): Homolog of NCBI NO: 30687670 NR Description: ribosomal protein L7Ae family [Arabidopsis
  misc_feature (1)..(106): Homolog of NCBI NO: 15235416 NR Description: Ribosomal protein L7Ae -like
  misc_feature (1)..(106): Homolog of NCBI NO: 21592866 NR Description: Ribosomal protein L7Ae-like [Arabidopsis thaliana]
  misc_feature (1)..(106): Homolog of NCBI NO: 15241276 NR Description: ribosomal protein L7Ae-like
  misc_feature (1)..(106): Homolog of NCBI NO: 15236127 NR Description: Ribosomal protein L7Ae - like; protein id:

SEQ ID NO: 37778 - protein, 73 aa, Arabidopsis thaliana; identical to SEQ ID NO: 21543
  peptide (1)..(73): Ceres Seq. ID no. 12389048
  misc_feature (1)..(59): Pfam Name: Ribosomal protein L7Ae/L30e/S12e/Gadd45 family Pfam Description: Ribosomal protein L7Ae/L30e/S12e/Gadd45 family
  misc_feature (1)..(73): Homolog of NCBI NO: 38174386 NR Description: Unknown (protein for MGC:75724) [Silurana
  misc_feature (1)..(73): Homolog of NCBI NO: 17535189 NR Description: Ribosomal protein L7Ae/L30e/S12e/Gadd45 family
  misc_feature (1)..(73): Homolog of NCBI NO: 28302201 NR Description: Similar to NHP2 non-histone chromosome protein
  misc_feature (1)..(53): Homolog of NCBI NO: 25295061 NR Description: Ribosomal protein L7Ae-like (partial)
  misc_feature (1)..(73): Homolog of NCBI NO: 37530712 NR Description: putative ribosomal protein L7Ae-like
  misc_feature (1)..(73): Homolog of NCBI NO: 30687670 NR Description: ribosomal protein L7Ae family [Arabidopsis
  misc_feature (1)..(73): Homolog of NCBI NO: 15235416 NR Description: Ribosomal protein L7Ae -like
  misc_feature (1)..(73): Homolog of NCBI NO: 21592866 NR Description: Ribosomal protein L7Ae-like [Arabidopsis thaliana]
  misc_feature (1)..(73): Homolog of NCBI NO: 15241276 NR Description: ribosomal protein L7Ae-like
  misc_feature (1)..(73): Homolog of NCBI NO: 15236127 NR Description: Ribosomal protein L7Ae - like; protein id:

SEQ ID NO: 37779 - protein, 59 aa, Arabidopsis thaliana
  peptide (1)..(59): Ceres Seq. ID no. 12389049
MTLSDCLSLLFSFDLLLLPEPVHATVCVSLSTDKSAESKSGELASVETISIKMTNVKLN

SEQ ID NO: 37780 - DNA, 1028 bp, Arabidopsis thaliana
  misc_feature (1)..(1028): Ceres Seq. ID no. 12331321
  misc_feature: MA Experiment ID: 108461 Result: Up-regulated in Transcription
  misc_feature: MA Experiment 108461 PARAMETER Experiment Name: At_Germinating_Seeds_cDNA_P Parameter: Age (day) Value: 1 vs. 0
  misc_feature: MA Experiment 108461 PARAMETER Experiment Name: At_Germinating_Seeds_cDNA_P Parameter: Tissue Value: Germinating Seeds
  misc_feature: MA Experiment ID: 108462 Result: Up-regulated in Transcription
  misc_feature: MA Experiment 108462 PARAMETER Experiment Name: At_Germinating_Seeds_cDNA_P Parameter: Age (day) Value: 2 vs. 0
  misc_feature: MA Experiment 108462 PARAMETER Experiment Name: At_Germinating_Seeds_cDNA_P Parameter: Tissue Value: Germinating Seeds
  misc_feature: MA Experiment ID: 108463 Result: Up-regulated in Transcription
  misc_feature: MA Experiment 108463 PARAMETER Experiment Name: At_Germinating_Seeds_cDNA_P Parameter: Age (day) Value: 3 vs. 0
  misc_feature: MA Experiment 108463 PARAMETER Experiment Name: At_Germinating_Seeds_cDNA_P Parameter: Tissue Value: Germinating Seeds
  misc_feature: MA Experiment ID: 108464 Result: Up-regulated in Transcription
  misc_feature: MA Experiment 108464 PARAMETER Experiment Name: At_Germinating_Seeds_cDNA_P Parameter: Age (day) Value: 4 vs. 0
  misc_feature: MA Experiment 108464 PARAMETER Experiment Name: At_Germinating_Seeds_cDNA_P Parameter: Tissue Value: Germinating Seeds
  misc_feature: MA Experiment ID: 108501 Result: Up-regulated in Transcription
  misc_feature: MA Experiment 108501 PARAMETER Experiment Name: At_ap2_floral_buds_cDNA_P Parameter: Plant Line Value: ap2 (Ler.)
  misc_feature: MA Experiment 108501 PARAMETER Experiment Name: At_ap2_floral_buds_cDNA_P Parameter: Tissue Value: Closed Flower
  misc_feature: MA Experiment ID: 20000111 Result: Down-regulated in Transcription
  misc_feature: MA Experiment 20000111 PARAMETER Experiment Name: At_42deg_Heat_cDNA_P Parameter: Temperature (deg C) Value: 42 vs. 22
  misc_feature: MA Experiment 20000111 PARAMETER Experiment Name: At_42deg_Heat_cDNA_P Parameter: Timepoint (hr) Value: 6
  misc_feature: MA Experiment 20000111 PARAMETER Experiment Name: At_42deg_Heat_cDNA_P Parameter: Tissue Value: Aerial
  misc_feature: MA Experiment ID: 20000113 Result: Down-regulated in Transcription
  misc_feature: MA Experiment 20000113 PARAMETER Experiment Name: At_42deg_Heat_cDNA_P Parameter: Temperature (deg C) Value: 42 vs. 22
  misc_feature: MA Experiment 20000113 PARAMETER Experiment Name: At_42deg_Heat_cDNA_P Parameter: Timepoint (hr) Value: 8
  misc_feature: MA Experiment 20000113 PARAMETER Experiment Name: At_42deg_Heat_cDNA_P Parameter: Tissue Value: Aerial
  misc_feature: MA Experiment ID: 20000224 Result: Up-regulated in Transcription
  misc_feature: MA Experiment ID: 20000307 Result: Up-regulated in Transcription
  misc_feature: MA Experiment 20000307 PARAMETER Experiment Name: At_Germinating_Seeds_Sub_P Parameter: Age (hr) Value: 24 vs. 0
  misc_feature: MA Experiment 20000307 PARAMETER Experiment Name: At_Germinating_Seeds_Sub_P Parameter: Organism Value: A. thaliana
  misc_feature: MA Experiment 20000307 PARAMETER Experiment Name: At_Germinating_Seeds_Sub_P Parameter: Plant Line Value: WS
  misc_feature: MA Experiment 20000307 PARAMETER Experiment Name: At_Germinating_Seeds_Sub_P Parameter: Tissue Value: Germinating Seeds
  misc_feature: MA Experiment ID: 20000314 Result: Up-regulated in Transcription
  misc_feature: MA Experiment 20000314 PARAMETER Experiment Name: At_14day_Shoots-Roots_Sub_P Parameter: Age (day) Value: 14
  misc_feature: MA Experiment 20000314 PARAMETER Experiment Name: At_14day_Shoots-Roots_Sub_P Parameter: Organism Value: A. thaliana
  misc_feature: MA Experiment 20000314 PARAMETER Experiment Name: At_14day_Shoots-Roots_Sub_P Parameter: Plant Line Value: WS
  misc_feature: MA Experiment 20000314 PARAMETER Experiment Name: At_14day_Shoots-Roots_Sub_P Parameter: Tissue Value: Roots vs. Whole Plant
  misc_feature: MA Experiment ID: 20000328 Result: Down-regulated in Transcription
  misc_feature: MA Experiment 20000328 PARAMETER Experiment Name: At_42deg_Heat_Sub_P Parameter: Age (day) Value: 14
  misc_feature: MA Experiment 20000328 PARAMETER Experiment Name: At_42deg_Heat_Sub_P Parameter: Organism Value: A. thaliana
  misc_feature: MA Experiment 20000328 PARAMETER Experiment Name: At_42deg_Heat_Sub_P Parameter: Plant Line Value: WS
  misc_feature: MA Experiment 20000328 PARAMETER Experiment Name: At_42deg_Heat_Sub_P Parameter: Temperature (deg C) Value: 42 vs. 22
  misc_feature: MA Experiment 20000328 PARAMETER Experiment Name: At_42deg_Heat_Sub_P Parameter: Timepoint (hr) Value: 6
  misc_feature: MA Experiment 20000328 PARAMETER Experiment Name: At_42deg_Heat_Sub_P Parameter: Tissue Value: Aerial
  misc_feature: MA Experiment ID: 20000355 Result: Up-regulated in Transcription
  misc_feature: MA Experiment 20000355 PARAMETER Experiment Name: At_Siliques_Sub_P Parameter: Age (day) Value: 21
  misc_feature: MA Experiment 20000355 PARAMETER Experiment Name: At_Siliques_Sub_P Parameter: Organism Value: A. thaliana
  misc_feature: MA Experiment 20000355 PARAMETER Experiment Name: At_Siliques_Sub_P Parameter: Plant Line Value: WS
  misc_feature: MA Experiment 20000355 PARAMETER Experiment Name: At_Siliques_Sub_P Parameter: Tissue Value: Less Than 5mm Siliques vs. Whole Plant
  misc_feature: MA Experiment ID: 20000440 Result: Up-regulated in Transcription
  misc_feature: MA Experiment 20000440 PARAMETER Experiment Name: At_Closed-Flower__Sub_P Parameter: Tissue Value: Closed Flower vs. Whole Plant
atgacaaaatgtttgttttttgggtttggtctgaaacaggatggggtaccaacgagaagctgatcatatcaatactagctcacaggaacgcagcacaacgcagcttgatccgcagcgtttatgcagctacctacaatgaggatcttctcaaagcattagacaaagagctttctagcgactttgagagagctgtgatgttgtggactcttgatccaccagagagagatgcttatttggctaaagaatccaccaagatgttcaccaagaacaattgggttcttgttgaaatcgcttgcacaaggcctgctcttgagcttatcaaggtcaagcaagcttaccaagctcgatacaagaaatcaatcgaggaagatgtcgcgcaacacacatctggtgaccttcgtaagctcttggcttcctcttgtgagcactttcaggtatgaaggagatgatgtgaacatgatgcttgcaagatctgaagctaagatacttcacgagaaggtctcagagaaatcctacagtgacgatgacttcatcagaatcttgacaacaagaagcaaagcacactcggtgcaacactcaaccactacaacaacgagtatggaaacgccattaacaagaacttgaaggaagagtcggacgacaatgactacatgaaactactaagagctgtaatcacatgtttgacataccctgagaagcattttgagaaggttcttcgtctatcaatcaacaaaatgggaacagacgaatggggactaacccgagtcgtgactacacgaactgaagttgacatggaacgcatcaaagaggaatatcagcgaagaaacagcattcctttggaccgtgctatcgccaaagacacttctggtgactatgaggacatgcttgttgctcttctcggacatggcgatgcttgaaactgtttcaactttcgagttcctcctttctcttactgcatggtttgttttaaataaaagagttgtgaaactggttctgcaactatttatcaatgatcgtttgagtttgtc

SEQ ID NO: 37781 - protein, 145 aa, Arabidopsis thaliana
  peptide (1)..(145): Ceres Seq. ID no. 12331322
  misc_feature (10)..(145): Homolog of NCBI NO: 21264397 NR Description: Annexin-like protein RJ4
  misc_feature (12)..(145): Homolog of NCBI NO: 7441510 NR Description: annexin - upland cotton (fragment)
  misc_feature (13)..(136): Homolog of NCBI NO: 3979715 NR Description: annexin cap32 [Capsicum annuum]
  misc_feature (13)..(136): Homolog of NCBI NO: 2467253 NR Description: annexin [Nicotiana tabacum]
  misc_feature (13)..(136): Homolog of NCBI NO: 12084607 NR Description: Chain A, Crystal Structure Of Annexin 24(Ca32)
  misc_feature (13)..(136): Homolog of NCBI NO: 2129923 NR Description: annexin - pepper
  misc_feature (13)..(136): Homolog of NCBI NO: 8247363 NR Description: annexin p34 [Solanum tuberosum]
  misc_feature (13)..(136): Homolog of NCBI NO: 3378208 NR Description: annexin p34 [Lycopersicon esculentum]
  misc_feature (13)..(136): Homolog of NCBI NO: 3928134 NR Description: annexin P38 [Capsicum annuum]
  misc_feature (13)..(136): Homolog of NCBI NO: 7441509 NR Description: annexin - alfalfa (fragment)
DKMFVFWVWSETGWGTNEKLIISILAHRNAAQRSLIRSVYAATYNEDLLKALDKELSSDFERAVMLWTLDPPERDAYLAKESTKMFTKNNWVLVEIACTRPALELIKVKQAYQARYKKSIEEDVAQHTSGDLRKLLASSCEHFQV

SEQ ID NO: 37782 - protein, 143 aa, Arabidopsis thaliana
  peptide (1)..(143): Ceres Seq. ID no. 12331323
  misc_feature (8)..(143): Homolog of NCBI NO: 21264397 NR Description: Annexin-like protein RJ4
  misc_feature (10)..(143): Homolog of NCBI NO: 7441510 NR Description: annexin - upland cotton (fragment)
  misc_feature (11)..(134): Homolog of NCBI NO: 3979715 NR Description: annexin cap32 [Capsicum annuum]
  misc_feature (11)..(134): Homolog of NCBI NO: 2467253 NR Description: annexin [Nicotiana tabacum]
  misc_feature (11)..(134): Homolog of NCBI NO: 12084607 NR Description: Chain A, Crystal Structure Of Annexin 24(Ca32)
  misc_feature (11)..(134): Homolog of NCBI NO: 2129923 NR Description: annexin - pepper
  misc_feature (11)..(134): Homolog of NCBI NO: 8247363 NR Description: annexin p34 [Solanum tuberosum]
  misc_feature (11)..(134): Homolog of NCBI NO: 3378208 NR Description: annexin p34 [Lycopersicon esculentum]
  misc_feature (11)..(134): Homolog of NCBI NO: 3928134 NR Description: annexin P38 [Capsicum annuum]
  misc_feature (11)..(134): Homolog of NCBI NO: 7441509 NR Description: annexin - alfalfa (fragment)
MFVFWVWSETGWGTNEKLIISILAHRNAAQRSLIRSVYAATYNEDLLKALDKELSSDFERAVMLWTLDPPERDAYLAKESTKMFTKNNWVLVEIACTRPALELIKVKQAYQARYKKSIEEDVAQHTSGDLRKLLASSCEHFQV

SEQ ID NO: 37783 - protein, 132 aa, Arabidopsis thaliana
  peptide (1)..(132): Ceres Seq. ID no. 12331324
  misc_feature (63)..(112): Homolog of NCBI NO: 15238105 NR Description: annexin -like protein
  misc_feature (63)..(112): Homolog of NCBI NO: 15238320 NR Description: annexin
  misc_feature (63)..(112): Homolog of NCBI NO: 3979715 NR Description: annexin cap32 [Capsicum annuum]
  misc_feature (63)..(112): Homolog of NCBI NO: 2467253 NR Description: annexin [Nicotiana tabacum]
  misc_feature (63)..(112): Homolog of NCBI NO: 12084607 NR Description: Chain A, Crystal Structure Of Annexin 24(Ca32)
  misc_feature (63)..(112): Homolog of NCBI NO: 2129923 NR Description: annexin - pepper
  misc_feature (63)..(112): Homolog of NCBI NO: 8247363 NR Description: annexin p34 [Solanum tuberosum]
  misc_feature (63)..(112): Homolog of NCBI NO: 3378208 NR Description: annexin p34 [Lycopersicon esculentum]
  misc_feature (63)..(111): Homolog of NCBI NO: 3928134 NR Description: annexin P38 [Capsicum annuum]
  misc_feature (63)..(112): Homolog of NCBI NO: 7441509 NR Description: annexin - alfalfa (fragment)
MLIWLKNPPRCSPRTIGFLLKSLAQGLLLSLSRSSKLTKLDTRNQSRKMSRNTHLVTFVSSWLPLVSTFRYEGDDVNMMLARSEAKILHEKVSEKSYSDDDFIRILTTRSKAHSVQHSTTTTTSMETPLTRT

SEQ ID NO: 37784 - DNA, 1249 bp, Arabidopsis thaliana
  misc_feature (1)..(1249): Ceres Seq. ID no. 12369904
  misc_feature: MA Experiment ID: 20000224 Result: Down-regulated in Transcription
attctaaagatttttctctccggagacgttaagagaagaaacagccaacggattagggatcttaccgttctgcgattcgccgagtttgaagctttttttagagacttcaatggtgagccaaggaatggtatctcttacaaagtctctatgcactatgactccaagagtccgtctcaagaatccgaatatgttgcagaaactaaagactggatcttgtaatttccgtttcagaaatctccgtgtcttatgcacaacaaagctgtctcagtgggaaccgtcacctttcattcatgcttctgcagaagaagctgctgatatagtattggacaaaaccgcgaatgtgttcgaatctattgtctccgagagtgcagaggaagagaaagtagatatgtcagcgcaacaacgaactaattctcaagttcaggtacttaaatggccaatatggcttttgggtccatctgttctcctcacaagcggtatggcgcctactttatggcttccgttgtcatcggtttttctcggttccaacgtggttagtctactttctttgatcggtctagattgcattttcaatcttggagcaacccttttcctcttaatggctgattcttgcgcacgtcctaaagacccatcacagtcctgcaacagcaaaccaccatttagctataagttctggaacatgttttcactcataatcgggtttctagtcccaatgttacttctcttcggatcccaatctggccttctcgcttctctccagccccagattcctttcctctcgtccgctgttatcctcttcccgtacttcattctccttgctgttcagacattaacagagatcctcacatggcactggcaatcaccggtctggctagtcacaccagttgtctacgaggcttacagaatcttgcaactgatgagagggttgacacttagtgcagaggtcaacgcaccggtttgggtggttcatatgcttcgtgggcttgtctcttggtgggtattgatcttgggaatgcaactcatgagagttgcttggtttgctggttttgcatctagaacaacaacaggtcagcaaccacaatctgttgcttctaagtaaagacagataaatgtttcttcgtttagtttttaaagtcatgtcaaagatttgtaactctttcttcactgtatagcttttattattcgtgggttggtgataaggattaaaaaaaaacacatattctttatgatcatattcgctcttttagtg

SEQ ID NO: 37785 - protein, 329 aa, Arabidopsis thaliana
  peptide (1)..(329): Ceres Seq. ID no. 12369905
  misc_feature (43)..(274): Homolog of NCBI NO: 25405928 NR Description: protein T1N15.7 [imported] - Arabidopsis thaliana
  misc_feature (142)..(297): Homolog of NCBI NO: 23127993 NR Description: hypothetical protein [Nostoc punctiforme]
  misc_feature (43)..(274): Homolog of NCBI NO: 15221197 NR Description: unknown protein; protein id: At1g48460.1
  misc_feature (111)..(275): Homolog of NCBI NO: 34910348 NR Description: P0684B02.8 [Oryza sativa (japonica
  misc_feature (40)..(319): Homolog of NCBI NO: 38605903 NR Description: OSJNBb0020O11.15 [Oryza sativa (japonica
  misc_feature (164)..(329): Homolog of NCBI NO: 30695238 NR Description: expressed protein [Arabidopsis thaliana]
  misc_feature (94)..(329): Homolog of NCBI NO: 30695235 NR Description: expressed protein [Arabidopsis thaliana]
  misc_feature (1)..(329): Homolog of NCBI NO: 11281196 NR Description: hypothetical protein T8B10.250 - Arabidopsis
MVSQGMVSLTKSLCTMTPRVRLKNPNMLQKLKTGSCNFRFRNLRVLCTTKLSQWEPSPFIHASAEEAADIVLDKTANVFESIVSESAEEEKVDMSAQQRTNSQVQVLKWPIWLLGPSVLLTSGMAPTLWLPLSSVFLGSNVVSLLSLIGLDCIFNLGATLFLLMADSCARPKDPSQSCNSKPPFSYKFWNMFSLIIGFLVPMLLLFGSQSGLLASLQPQIPFLSSAVILFPYFILLAVQTLTEILTWHWQSPVWLVTPVVYEAYRILQLMRGLTLSAEVNAPVWVVHMLRGLVSWWVLILGMQLMRVAWFAGFASRTTTGQQPQSVASK

SEQ ID NO: 37786 - protein, 324 aa, Arabidopsis thaliana
  peptide (1)..(324): Ceres Seq. ID no. 12369906
  misc_feature (38)..(269): Homolog of NCBI NO: 25405928 NR Description: protein T1N15.7 [imported] - Arabidopsis thaliana
  misc_feature (137)..(292): Homolog of NCBI NO: 23127993 NR Description: hypothetical protein [Nostoc punctiforme]
  misc_feature (38)..(269): Homolog of NCBI NO: 15221197 NR Description: unknown protein; protein id: At1g48460.1
  misc_feature (106)..(270): Homolog of NCBI NO: 34910348 NR Description: P0684B02.8 [Oryza sativa (japonica
  misc_feature (35)..(314): Homolog of NCBI NO: 38605903 NR Description: OSJNBb0020O11.15 [Oryza sativa (japonica
  misc_feature (159)..(324): Homolog of NCBI NO: 30695238 NR Description: expressed protein [Arabidopsis thaliana]
  misc_feature (89)..(324): Homolog of NCBI NO: 30695235 NR Description: expressed protein [Arabidopsis thaliana]
  misc_feature (1)..(324): Homolog of NCBI NO: 11281196 NR Description: hypothetical protein T8B10.250 - Arabidopsis
MVSLTKSLCTMTPRVRLKNPNMLQKLKTGSCNFRFRNLRVLCTTKLSQWEPSPFIHASAEEAADIVLDKTANVFESIVSESAEEEKVDMSAQQRTNSQVQVLKWPIWLLGPSVLLTSGMAPTLWLPLSSVFLGSNVVSLLSLIGLDCIFNLGATLFLLMADSCARPKDPSQSCNSKPPFSYKFWNMFSLIIGFLVPMLLLFGSQSGLLASLQPQIPFLSSAVILFPYFILLAVQTLTEILTWHWQSPVWLVTPVVYEAYRILQLMRGLTLSAEVNAPVWVVHMLRGLVSWWVLILGMQLMRVAWFAGFASRTTTGQQPQSVASK

SEQ ID NO: 37787 - protein, 314 aa, Arabidopsis thaliana
  peptide (1)..(314): Ceres Seq. ID no. 12369907
  misc_feature (28)..(259): Homolog of NCBI NO: 25405928 NR Description: protein T1N15.7 [imported] - Arabidopsis thaliana
  misc_feature (127)..(282): Homolog of NCBI NO: 23127993 NR Description: hypothetical protein [Nostoc punctiforme]
  misc_feature (28)..(259): Homolog of NCBI NO: 15221197 NR Description: unknown protein; protein id: At1g48460.1
  misc_feature (96)..(260): Homolog of NCBI NO: 34910348 NR Description: P0684B02.8 [Oryza sativa (japonica
  misc_feature (25)..(304): Homolog of NCBI NO: 38605903 NR Description: OSJNBb0020O11.15 [Oryza sativa (japonica
  misc_feature (149)..(314): Homolog of NCBI NO: 30695238 NR Description: expressed protein [Arabidopsis thaliana]
  misc_feature (79)..(314): Homolog of NCBI NO: 30695235 NR Description: expressed protein [Arabidopsis thaliana]
  misc_feature (1)..(314): Homolog of NCBI NO: 11281196 NR Description: hypothetical protein T8B10.250 - Arabidopsis
MTPRVRLKNPNMLQKLKTGSCNFRFRNLRVLCTTKLSQWEPSPFIHASAEEAADIVLDKTANVFESIVSESAEEEKVDMSAQQRTNSQVQVLKWPIWLLGPSVLLTSGMAPTLWLPLSSVFLGSNVVSLLSLIGLDCIFNLGATLFLLMADSCARPKDPSQSCNSKPPFSYKFWNMFSLIIGFLVPMLLLFGSQSGLLASLQPQIPFLSSAVILFPYFILLAVQTLTEILTWHWQSPVWLVTPVVYEAYRILQLMRGLTLSAEVNAPVWVVHMLRGLVSWWVLILGMQLMRVAWFAGFASRTTTGQQPQSVASK

SEQ ID NO: 37788 - DNA, 1502 bp, Arabidopsis thaliana
  misc_feature (1)..(1502): Ceres Seq. ID no. 12576395
  misc_feature: MA Experiment ID: 108434 Result: Up-regulated in Transcription
  misc_feature: MA Experiment 108434 PARAMETER Experiment Name: At_Root_Tips_cDNA_P Parameter: Tissue Value: Root Tips
  misc_feature: MA Experiment ID: 108595 Result: Up-regulated in Transcription
  misc_feature: MA Experiment 108595 PARAMETER Experiment Name: At_Ler-pi_Ovule_cDNA_P Parameter: Plant Line Value: null
  misc_feature: MA Experiment ID: 20000069 Result: Down-regulated in Transcription
  misc_feature: MA Experiment 20000069 PARAMETER Experiment Name: At_100uM_ABA_Mutants_cDNA_P Parameter: Plant Line Value: CS23
  misc_feature: MA Experiment 20000069 PARAMETER Experiment Name: At_100uM_ABA_Mutants_cDNA_P Parameter: Timepoint (hr) Value: 6
  misc_feature: MA Experiment 20000069 PARAMETER Experiment Name: At_100uM_ABA_Mutants_cDNA_P Parameter: Tissue Value: Aerial
  misc_feature: MA Experiment 20000069 PARAMETER Experiment Name: At_100uM_ABA_Mutants_cDNA_P Parameter: Treatment Value: 100uM ABA vs. No Treatment
  misc_feature: MA Experiment ID: 20000070 Result: Down-regulated in Transcription
  misc_feature: MA Experiment 20000070 PARAMETER Experiment Name: At_100uM_ABA_Mutants_cDNA_P Parameter: Plant Line Value: CS24
  misc_feature: MA Experiment 20000070 PARAMETER Experiment Name: At_100uM_ABA_Mutants_cDNA_P Parameter: Timepoint (hr) Value: 6
  misc_feature: MA Experiment 20000070 PARAMETER Experiment Name: At_100uM_ABA_Mutants_cDNA_P Parameter: Tissue Value: Aerial
  misc_feature: MA Experiment 20000070 PARAMETER Experiment Name: At_100uM_ABA_Mutants_cDNA_P Parameter: Treatment Value: 100uM ABA vs. No Treatment
  misc_feature: MA Experiment ID: 20000071 Result: Down-regulated in Transcription
  misc_feature: MA Experiment 20000071 PARAMETER Experiment Name: At_100uM_ABA_Mutants_cDNA_P Parameter: Plant Line Value: CS8104
  misc_feature: MA Experiment 20000071 PARAMETER Experiment Name: At_100uM_ABA_Mutants_cDNA_P Parameter: Timepoint (hr) Value: 6
  misc_feature: MA Experiment 20000071 PARAMETER Experiment Name: At_100uM_ABA_Mutants_cDNA_P Parameter: Tissue Value: Aerial
  misc_feature: MA Experiment 20000071 PARAMETER Experiment Name: At_100uM_ABA_Mutants_cDNA_P Parameter: Treatment Value: 100uM ABA vs. No Treatment
  misc_feature: MA Experiment ID: 20000072 Result: Down-regulated in Transcription
  misc_feature: MA Experiment 20000072 PARAMETER Experiment Name: At_100uM_ABA_Mutants_cDNA_P Parameter: Plant Line Value: CS8105
  misc_feature: MA Experiment 20000072 PARAMETER Experiment Name: At_100uM_ABA_Mutants_cDNA_P Parameter: Timepoint (hr) Value: 6
  misc_feature: MA Experiment 20000072 PARAMETER Experiment Name: At_100uM_ABA_Mutants_cDNA_P Parameter: Tissue Value: Aerial
  misc_feature: MA Experiment 20000072 PARAMETER Experiment Name: At_100uM_ABA_Mutants_cDNA_P Parameter: Treatment Value: 100uM ABA vs. No Treatment
  misc_feature: MA Experiment ID: 20000087 Result: Down-regulated in Transcription
  misc_feature: MA Experiment 20000087 PARAMETER Experiment Name: At_100uM_ABA_Mutants_cDNA_P Parameter: Plant Line Value: WS
  misc_feature: MA Experiment 20000087 PARAMETER Experiment Name: At_100uM_ABA_Mutants_cDNA_P Parameter: Timepoint (hr) Value: 6
  misc_feature: MA Experiment 20000087 PARAMETER Experiment Name: At_100uM_ABA_Mutants_cDNA_P Parameter: Tissue Value: Aerial
  misc_feature: MA Experiment 20000087 PARAMETER Experiment Name: At_100uM_ABA_Mutants_cDNA_P Parameter: Treatment Value: 100uM ABA vs. No Treatment
  misc_feature: MA Experiment ID: 20000089 Result: Down-regulated in Transcription
  misc_feature: MA Experiment ID: 20000090 Result: Down-regulated in Transcription
  misc_feature: MA Experiment ID: 20000113 Result: Down-regulated in Transcription
  misc_feature: MA Experiment 20000113 PARAMETER Experiment Name: At_42deg_Heat_cDNA_P Parameter: Temperature (deg C) Value: 42 vs. 22
  misc_feature: MA Experiment 20000113 PARAMETER Experiment Name: At_42deg_Heat_cDNA_P Parameter: Timepoint (hr) Value: 8
  misc_feature: MA Experiment 20000113 PARAMETER Experiment Name: At_42deg_Heat_cDNA_P Parameter: Tissue Value: Aerial
  misc_feature: MA Experiment ID: 20000117 Result: Down-regulated in Transcription
  misc_feature: MA Experiment 20000117 PARAMETER Experiment Name: At_100uM_ABA_Mutants_cDNA_P Parameter: Plant Line Value: Columbia
  misc_feature: MA Experiment 20000117 PARAMETER Experiment Name: At_100uM_ABA_Mutants_cDNA_P Parameter: Timepoint (hr) Value: 6
  misc_feature: MA Experiment 20000117 PARAMETER Experiment Name: At_100uM_ABA_Mutants_cDNA_P Parameter: Tissue Value: Aerial
  misc_feature: MA Experiment 20000117 PARAMETER Experiment Name: At_100uM_ABA_Mutants_cDNA_P Parameter: Treatment Value: 100uM ABA vs. No Treatment
  misc_feature: MA Experiment ID: 20000264 Result: Up-regulated in Transcription
  misc_feature: MA Experiment 20000264 PARAMETER Experiment Name: At_Open_Flower_P Parameter: Age (day) Value: 21
  misc_feature: MA Experiment 20000264 PARAMETER Experiment Name: At_Open_Flower_P Parameter: Plant Line Value: WS
  misc_feature: MA Experiment 20000264 PARAMETER Experiment Name: At_Open_Flower_P Parameter: Tissue Value: Open Flower vs. Whole Plant
  misc_feature: MA Experiment ID: 20000286 Result: Up-regulated in Transcription
  misc_feature: MA Experiment 20000286 PARAMETER Experiment Name: At_Open_Flower_P Parameter: Age (day) Value: 21
  misc_feature: MA Experiment 20000286 PARAMETER Experiment Name: At_Open_Flower_P Parameter: Plant Line Value: WS
  misc_feature: MA Experiment 20000286 PARAMETER Experiment Name: At_Open_Flower_P Parameter: Tissue Value: Half Open vs. Whole Plant
aaggtatctatttgcctagccagagttatatataggattgattgtctagtcttttcttatatgatttttgttctcatttactaatcaaagttctgcaaacttgtagttgttgtaggatttgttgctctggctctggtggtaggtctatgaaatcaacccatatcgtgaatggactgcaacatggtatcttcgtcccagtgggattgggagcatttgatcatgtccaatccgtcaaggactgaagatgacagcaaacagctacctactgagtgggaaattgaaaaaggtgaaggaattgaatctatagttccacatttctcaggccttgagagagtcagtagtggctctgccaccagcttctggcacactgctgtatcgaaaagctcacagtcgacctctatcaactcatcatctcccgaagccaaacgatgcaagcttgcatcagaaagttcccctggagattcttgcagcaacatagactttgtccaggtgaaggctcccacagctctcgaggtatccgttgcctcagctgaatcagatctttgtttaaaactaggaaagcggacatactctgaagaatactggggtagaaacaataatgaaatttcagcggtttctatgaagttgttaactccatctgttgtcgctgggaaatccaaattgtgtggtcagagcatgccagtcccgcgttgccaaattgatggctgtgaactggatctctcatctgctaagggttatcatcgtaagcacaaagtctgcgaaaagcattcaaagtgcccaaaagttagcgtgagtggcctggaacgtcggttctgccaacagtgtagcaggttccatgctgtctctgaatttgatgagaagaaacgaagctgccgaaaacgtctttctcatcataatgcgaggcgtcgtaagccacaaggagtattttcaatgaatcccgagagggtgtatgatcgaagacagcatacaaatatgttgtggaatggggtgtcccttaacgcgagatctgaagaaatgtatgaatggggtaataacacttatgatacaaagcctagacaaacggaaaaaagctttactctgagcttccagagaggtaatggctctgaggaccagctggttgctagtagcagccgtatgttctctacatctcaaacctcaggtgggttcccagcaggaaagtccaagtttcaacttcatggcgaagatgtgggagaatactcaggagtcctccatgaatctcaagatatccaccgtgctctctctcttctgtcaacctcttcggatcccctggcccaaccacatgtgcagccattttctctactctgttcatatgatgttgtaccaaaatagatgagtaagtaatgtgtaatttgtaaacctgttactcagttggtggatacttttccaaacctatgataaaaacctcgtcctagatcccgttaaatgccaaactttcggctactataactatgttatcgttatcattatcattgtttaacacc

SEQ ID NO: 37789 - protein, 393 aa, Arabidopsis thaliana; identical to SEQ ID NO: 24209
  peptide (1)..(393): Ceres Seq. ID no. 12576396
  misc_feature (174)..(252): Pfam Name: SBP domain Pfam Description: SBP domain
  misc_feature (127)..(373): Homolog of NCBI NO: 15227896 NR Description: putative squamosa-promoter binding protein
  misc_feature (117)..(381): Homolog of NCBI NO: 21536841 NR Description: unknown [Arabidopsis thaliana]
  misc_feature (117)..(381): Homolog of NCBI NO: 18423163 NR Description: putative protein
  misc_feature (1)..(291): Homolog of NCBI NO: 15239820 NR Description: squamosa promoter binding protein-like 2
  misc_feature (1)..(371): Homolog of NCBI NO: 25456646 NR Description: squamosa promoter binding protein 2
  misc_feature (5)..(378): Homolog of NCBI NO: 9802546 NR Description: F17L21.15 [Arabidopsis thaliana]
  misc_feature (1)..(378): Homolog of NCBI NO: 18650611 NR Description: At1g27370/F17L21_16 [Arabidopsis thaliana]
  misc_feature (1)..(378): Homolog of NCBI NO: 22329813 NR Description: putative squamosa-promoter binding protein 2
  misc_feature (5)..(393): Homolog of NCBI NO: 25403307 NR Description: protein F17L21.14 [imported] - Arabidopsis
  misc_feature (1)..(393): Homolog of NCBI NO: 18396302 NR Description: putative squamosa-promoter binding protein 2

SEQ ID NO: 37790 - protein, 389 aa, Arabidopsis thaliana; identical to SEQ ID NO: 24210
  peptide (1)..(389): Ceres Seq. ID no. 12576397
  misc_feature (170)..(248): Pfam Name: SBP domain Pfam Description: SBP domain
  misc_feature (123)..(369): Homolog of NCBI NO: 15227896 NR Description: putative squamosa-promoter binding protein
  misc_feature (113)..(377): Homolog of NCBI NO: 21536841 NR Description: unknown [Arabidopsis thaliana]
  misc_feature (113)..(377): Homolog of NCBI NO: 18423163 NR Description: putative protein
  misc_feature (1)..(287): Homolog of NCBI NO: 15239820 NR Description: squamosa promoter binding protein-like 2
  misc_feature (1)..(367): Homolog of NCBI NO: 25456646 NR Description: squamosa promoter binding protein 2
  misc_feature (1)..(374): Homolog of NCBI NO: 9802546 NR Description: F17L21.15 [Arabidopsis thaliana]
  misc_feature (1)..(374): Homolog of NCBI NO: 18650611 NR Description: At1g27370/F17L21_16 [Arabidopsis thaliana]
  misc_feature (1)..(374): Homolog of NCBI NO: 22329813 NR Description: putative squamosa-promoter binding protein 2
  misc_feature (1)..(389): Homolog of NCBI NO: 25403307 NR Description: protein F17L21.14 [imported] - Arabidopsis
  misc_feature (1)..(389): Homolog of NCBI NO: 18396302 NR Description: putative squamosa-promoter binding protein 2

SEQ ID NO: 37791 - protein, 376 aa, Arabidopsis thaliana; identical to SEQ ID NO: 24211
  peptide (1)..(376): Ceres Seq. ID no. 12576398
  misc_feature (157)..(235): Pfam Name: SBP domain Pfam Description: SBP domain
  misc_feature (110)..(356): Homolog of NCBI NO: 15227896 NR Description: putative squamosa-promoter binding protein
  misc_feature (100)..(364): Homolog of NCBI NO: 21536841 NR Description: unknown [Arabidopsis thaliana]
  misc_feature (100)..(364): Homolog of NCBI NO: 18423163 NR Description: putative protein
  misc_feature (1)..(274): Homolog of NCBI NO: 15239820 NR Description: squamosa promoter binding protein-like 2
  misc_feature (1)..(354): Homolog of NCBI NO: 25456646 NR Description: squamosa promoter binding protein 2
  misc_feature (1)..(361): Homolog of NCBI NO: 9802546 NR Description: F17L21.15 [Arabidopsis thaliana]
  misc_feature (1)..(361): Homolog of NCBI NO: 18650611 NR Description: At1g27370/F17L21_16 [Arabidopsis thaliana]
  misc_feature (1)..(361): Homolog of NCBI NO: 22329813 NR Description: putative squamosa-promoter binding protein 2
  misc_feature (1)..(376): Homolog of NCBI NO: 25403307 NR Description: protein F17L21.14 [imported] - Arabidopsis
  misc_feature (1)..(376): Homolog of NCBI NO: 18396302 NR Description: putative squamosa-promoter binding protein 2

SEQ ID NO: 37792 - DNA, 787 bp, Arabidopsis thaliana
  misc_feature (1)..(787): Ceres Seq. ID no. 12327422
  misc_feature: MA Experiment ID: 108434 Result: Up-regulated in Transcription
  misc_feature: MA Experiment 108434 PARAMETER Experiment Name: At_Root_Tips_cDNA_P Parameter: Tissue Value: Root Tips
  misc_feature: MA Experiment ID: 108461 Result: Up-regulated in Transcription
  misc_feature: MA Experiment 108461 PARAMETER Experiment Name: At_Germinating_Seeds_cDNA_P Parameter: Age (day) Value: 1 vs. 0
  misc_feature: MA Experiment 108461 PARAMETER Experiment Name: At_Germinating_Seeds_cDNA_P Parameter: Tissue Value: Germinating Seeds
  misc_feature: MA Experiment ID: 108573 Result: Down-regulated in Transcription
  misc_feature: MA Experiment 108573 PARAMETER Experiment Name: At_Drought_cDNA_P Parameter: Timepoint (hr) Value: 6
  misc_feature: MA Experiment 108573 PARAMETER Experiment Name: At_Drought_cDNA_P Parameter: Tissue Value: Aerial
  misc_feature: MA Experiment 108573 PARAMETER Experiment Name: At_Drought_cDNA_P Parameter: Treatment Value: Drought vs. No Drought
  misc_feature: MA Experiment ID: 108585 Result: Down-regulated in Transcription
  misc_feature: MA Experiment 108585 PARAMETER Experiment Name: At_5mM_NaNP_cDNA_P Parameter: Timepoint (hr) Value: 6
  misc_feature: MA Experiment 108585 PARAMETER Experiment Name: At_5mM_NaNP_cDNA_P Parameter: Tissue Value: Aerial
  misc_feature: MA Experiment 108585 PARAMETER Experiment Name: At_5mM_NaNP_cDNA_P Parameter: Treatment Value: null
  misc_feature: MA Experiment ID: 20000179 Result: Up-regulated in Transcription
  misc_feature: MA Experiment 20000179 PARAMETER Experiment Name: At_Germinating_Seeds_P Parameter: Age (hr) Value: 6 vs. 0
  misc_feature: MA Experiment 20000179 PARAMETER Experiment Name: At_Germinating_Seeds_P Parameter: Tissue Value: Germinating Seeds
  misc_feature: MA Experiment ID: 20000180 Result: Up-regulated in Transcription
  misc_feature: MA Experiment 20000180 PARAMETER Experiment Name: At_Germinating_Seeds_P Parameter: Age (hr) Value: 24 vs. 0
  misc_feature: MA Experiment 20000180 PARAMETER Experiment Name: At_Germinating_Seeds_P Parameter: Tissue Value: Germinating Seeds
  misc_feature: MA Experiment ID: 20000224 Result: Up-regulated in Transcription
  misc_feature: MA Experiment ID: 20000227 Result: Up-regulated in Transcription
  misc_feature: MA Experiment 20000227 PARAMETER Experiment Name: At_Root-Tips-vs-Tops_P Parameter: Tissue Value: Root Tips vs. Root Tops
  misc_feature: MA Experiment ID: 20000234 Result: Up-regulated in Transcription
  misc_feature: MA Experiment 20000234 PARAMETER Experiment Name: At_Siliques_P Parameter: Age (day) Value: 21
  misc_feature: MA Experiment 20000234 PARAMETER Experiment Name: At_Siliques_P Parameter: Organism Value: A. thaliana
  misc_feature: MA Experiment 20000234 PARAMETER Experiment Name: At_Siliques_P Parameter: Plant Line Value: WS
  misc_feature: MA Experiment 20000234 PARAMETER Experiment Name: At_Siliques_P Parameter: Tissue Value: Less Than 5mm Siliques vs. Whole Plant
  misc_feature: MA Experiment ID: 20000264 Result: Up-regulated in Transcription
  misc_feature: MA Experiment 20000264 PARAMETER Experiment Name: At_Open_Flower_P Parameter: Age (day) Value: 21
  misc_feature: MA Experiment 20000264 PARAMETER Experiment Name: At_Open_Flower_P Parameter: Plant Line Value: WS
  misc_feature: MA Experiment 20000264 PARAMETER Experiment Name: At_Open_Flower_P Parameter: Tissue Value: Open Flower vs. Whole Plant
  misc_feature: MA Experiment ID: 20000265 Result: Up-regulated in Transcription
  misc_feature: MA Experiment 20000265 PARAMETER Experiment Name: At_Open_Flower_P Parameter: Age (day) Value: 21
  misc_feature: MA Experiment 20000265 PARAMETER Experiment Name: At_Open_Flower_P Parameter: Plant Line Value: WS
  misc_feature: MA Experiment 20000265 PARAMETER Experiment Name: At_Open_Flower_P Parameter: Tissue Value: Closed Flower vs. Whole Plant
  misc_feature: MA Experiment ID: 20000286 Result: Up-regulated in Transcription
  misc_feature: MA Experiment 20000286 PARAMETER Experiment Name: At_Open_Flower_P Parameter: Age (day) Value: 21
  misc_feature: MA Experiment 20000286 PARAMETER Experiment Name: At_Open_Flower_P Parameter: Plant Line Value: WS
  misc_feature: MA Experiment 20000286 PARAMETER Experiment Name: At_Open_Flower_P Parameter: Tissue Value: Half Open vs. Whole Plant
  misc_feature: MA Experiment ID: 20000495 Result: Up-regulated in Transcription
  misc_feature: MA Experiment 20000495 PARAMETER Experiment Name: At_Guard_Cells_P Parameter: Harvest Date Value: 8/2/2002
  misc_feature: MA Experiment 20000495 PARAMETER Experiment Name: At_Guard_Cells_P Parameter: Organism Value: A. thaliana
  misc_feature: MA Experiment 20000495 PARAMETER Experiment Name: At_Guard_Cells_P Parameter: Tissue Value: Guard Cells vs. Leaves
acatttttcaaaaatctcttttgcccagagagagaagaagagacagatcggaaggagttgagtaagaatggcgaagctggtgctcttcaccgccgtaattatcgctattttctcccatggatcctccgtcgatgacaaatgcgccgcttgcaacgccgtcgctgaggaattagagttacagcttttaaaggaaaagccacgaaaccatcttgatatgagaaaccggctcaattctaaaggccagcgtgaaggaaaggtcattgattacagaataagcgacctgagggtggttgatttgttggacggtctgtgtgatagaatgcaggactatactctacaaaaggtggaacctaagaatagacaatgggtgaaagtaggaaattttgacaatctaacaaataaacaggaagcgaaagcgcatgcaaatgacatttcaacttattgtggaagattgctggaggaaactgaagatgagctaggtgaggtgataaagaatggctccctaaaagcaggagaagtccgaaaggttctgtgtcaaactttgagtaaccactgccgacaatcaagtgaaacagactcagaggatgaggaggacgacgatgcagatgaattataactcaatccagtgaaaagttcacgtcaaattaagatcccatcttagtagctatgttatagatacatccatccacaactcatatgtaacttaagacacctttcactttttaagttatgtcgaaactcgggtctagattcttatttatattgtggcaattgttcgttttccccc

SEQ ID NO: 37793 - protein, 182 aa, Arabidopsis thaliana
  peptide (1)..(182): Ceres Seq. ID no. 12327423
  misc_feature (73)..(110): Homolog of NCBI NO: 25373216 NR Description: unknown protein [imported] - Arabidopsis thaliana
  misc_feature (1)..(64): Homolog of NCBI NO: 25373216 NR Description: unknown protein [imported] - Arabidopsis thaliana
  misc_feature (112)..(182): Homolog of NCBI NO: 25373216 NR Description: unknown protein [imported] - Arabidopsis thaliana
  misc_feature (1)..(182): Homolog of NCBI NO: 21593763 NR Description: unknown [Arabidopsis thaliana]
  misc_feature (1)..(182): Homolog of NCBI NO: 18400653 NR Description: expressed protein
MAKLVLFTAVIIAIFSHGSSVDDKCAACNAVAEELELQLLKEKPRNHLDMRNRLNSKGQREGKVIDYRISDLRVVDLLDGLCDRMQDYTLQKVEPKNRQWVKVGNFDNLTNKQEAKAHANDISTYCGRLLEETEDELGEVIKNGSLKAGEVRKVLCQTLSNHCRQSSETDSEDEEDDDADEL

SEQ ID NO: 37794 - protein, 133 aa, Arabidopsis thaliana
  peptide (1)..(133): Ceres Seq. ID no. 12327424
  misc_feature (24)..(61): Homolog of NCBI NO: 25373216 NR Description: unknown protein [imported] - Arabidopsis thaliana
  misc_feature (1)..(15): Homolog of NCBI NO: 25373216 NR Description: unknown protein [imported] - Arabidopsis thaliana
  misc_feature (63)..(133): Homolog of NCBI NO: 25373216 NR Description: unknown protein [imported] - Arabidopsis thaliana
  misc_feature (1)..(133): Homolog of NCBI NO: 21593763 NR Description: unknown [Arabidopsis thaliana]
  misc_feature (1)..(133): Homolog of NCBI NO: 18400653 NR Description: expressed protein
MRNRLNSKGQREGKVIDYRISDLRVVDLLDGLCDRMQDYTLQKVEPKNRQWVKVGNFDNLTNKQEAKAHANDISTYCGRLLEETEDELGEVIKNGSLKAGEVRKVLCQTLSNHCRQSSETDSEDEEDDDADEL

SEQ ID NO: 37795 - protein, 98 aa, Arabidopsis thaliana
  peptide (1)..(98): Ceres Seq. ID no. 12327425
  misc_feature (1)..(26): Homolog of NCBI NO: 25373216 NR Description: unknown protein [imported] - Arabidopsis thaliana
  misc_feature (28)..(98): Homolog of NCBI NO: 25373216 NR Description: unknown protein [imported] - Arabidopsis thaliana
  misc_feature (1)..(98): Homolog of NCBI NO: 21593763 NR Description: unknown [Arabidopsis thaliana]
  misc_feature (1)..(98): Homolog of NCBI NO: 18400653 NR Description: expressed protein
MQDYTLQKVEPKNRQWVKVGNFDNLTNKQEAKAHANDISTYCGRLLEETEDELGEVIKNGSLKAGEVRKVLCQTLSNHCRQSSETDSEDEEDDDADEL

SEQ ID NO: 37796 - DNA, 936 bp, Arabidopsis thaliana; identical to SEQ ID NO: 20986
  misc_feature (1)..(936): Ceres Seq. ID no. 13493724
  misc_feature: MA Experiment ID: 20000227 Result: Down-regulated in Transcription
  misc_feature: MA Experiment 20000227 PARAMETER Experiment Name: At_Root-Tips-vs-Tops_P Parameter: Tissue Value: Root Tips vs. Root Tops
  misc_feature: MA Experiment ID: 20000794 Result: Up-regulated in Transcription
  misc_feature: MA Experiment 20000794 PARAMETER Experiment Name: At_Petals_P Parameter: Age (day) Value: 23-25 days
  misc_feature: MA Experiment 20000794 PARAMETER Experiment Name: At_Petals_P Parameter: Plant Line Value: WS
  misc_feature: MA Experiment 20000794 PARAMETER Experiment Name: At_Petals_P Parameter: Tissue Value: Petals vs. Whole plant
  misc_feature: MA Experiment ID: 20001247 Result: Up-regulated in Transcription
  misc_feature: MA Experiment 20001247 PARAMETER Experiment Name: At_Far-red-induction_P Parameter: Age (day) Value: 7
  misc_feature: MA Experiment 20001247 PARAMETER Experiment Name: At_Far-red-induction_P Parameter: Light Value: Far-red vs. White
  misc_feature: MA Experiment 20001247 PARAMETER Experiment Name: At_Far-red-induction_P Parameter: Organism Value: A. thaliana
  misc_feature: MA Experiment 20001247 PARAMETER Experiment Name: At_Far-red-induction_P Parameter: Plant Line Value: Columbia
  misc_feature: MA Experiment 20001247 PARAMETER Experiment Name: At_Far-red-induction_P Parameter: Timepoint (hr) Value: 1
  misc_feature: MA Experiment 20001247 PARAMETER Experiment Name: At_Far-red-induction_P Parameter: Tissue Value: Whole Plant
  misc_feature: MA Experiment ID: 20001450 Result: Up-regulated in Transcription
  misc_feature: MA Experiment 20001450 PARAMETER Experiment Name: At_Far-red-induction_P Parameter: Age (day) Value: 7
  misc_feature: MA Experiment 20001450 PARAMETER Experiment Name: At_Far-red-induction_P Parameter: Light Value: Far-red vs. White
  misc_feature: MA Experiment 20001450 PARAMETER Experiment Name: At_Far-red-induction_P Parameter: Organism Value: A. thaliana
  misc_feature: MA Experiment 20001450 PARAMETER Experiment Name: At_Far-red-induction_P Parameter: Plant Line Value: Columbia
  misc_feature: MA Experiment 20001450 PARAMETER Experiment Name: At_Far-red-induction_P Parameter: Timepoint (hr) Value: 8
  misc_feature: MA Experiment 20001450 PARAMETER Experiment Name: At_Far-red-induction_P Parameter: Tissue Value: Whole Plant
  misc_feature: MA Experiment ID: 20001451 Result: Up-regulated in Transcription
  misc_feature: MA Experiment 20001451 PARAMETER Experiment Name: At_Far-red-induction_P Parameter: Age (day) Value: 7
  misc_feature: MA Experiment 20001451 PARAMETER Experiment Name: At_Far-red-induction_P Parameter: Light Value: Far-red vs. White
  misc_feature: MA Experiment 20001451 PARAMETER Experiment Name: At_Far-red-induction_P Parameter: Organism Value: A. thaliana
  misc_feature: MA Experiment 20001451 PARAMETER Experiment Name: At_Far-red-induction_P Parameter: Plant Line Value: Columbia
  misc_feature: MA Experiment 20001451 PARAMETER Experiment Name: At_Far-red-induction_P Parameter: Timepoint (hr) Value: 24
  misc_feature: MA Experiment 20001451 PARAMETER Experiment Name: At_Far-red-induction_P Parameter: Tissue Value: Whole Plant
  misc_feature: MA Experiment ID: 20001554 Result: Down-regulated in Transcription
  misc_feature: MA Experiment 20001554 PARAMETER Experiment Name: At_Drought_Soil_Dry_P Parameter: Age (day) Value: 21
  misc_feature: MA Experiment 20001554 PARAMETER Experiment Name: At_Drought_Soil_Dry_P Parameter: Organism Value: A. thaliana
  misc_feature: MA Experiment 20001554 PARAMETER Experiment Name: At_Drought_Soil_Dry_P Parameter: Plant Line Value: WS
  misc_feature: MA Experiment 20001554 PARAMETER Experiment Name: At_Drought_Soil_Dry_P Parameter: Post Timepoint (hr) Value: None
  misc_feature: MA Experiment 20001554 PARAMETER Experiment Name: At_Drought_Soil_Dry_P Parameter: Post-Treatment Value: None
  misc_feature: MA Experiment 20001554 PARAMETER Experiment Name: At_Drought_Soil_Dry_P Parameter: Timepoint (day) Value: 7
  misc_feature: MA Experiment 20001554 PARAMETER Experiment Name: At_Drought_Soil_Dry_P Parameter: Treatment Value: Drought vs. No Drought
  misc_feature: MA Experiment ID: 20001555 Result: Down-regulated in Transcription
  misc_feature: MA Experiment 20001555 PARAMETER Experiment Name: At_Drought_Soil_Dry_P Parameter: Age (day) Value: 24
  misc_feature: MA Experiment 20001555 PARAMETER Experiment Name: At_Drought_Soil_Dry_P Parameter: Organism Value: A. thaliana
  misc_feature: MA Experiment 20001555 PARAMETER Experiment Name: At_Drought_Soil_Dry_P Parameter: Plant Line Value: WS
  misc_feature: MA Experiment 20001555 PARAMETER Experiment Name: At_Drought_Soil_Dry_P Parameter: Post Timepoint (hr) Value: None
  misc_feature: MA Experiment 20001555 PARAMETER Experiment Name: At_Drought_Soil_Dry_P Parameter: Post-Treatment Value: None
  misc_feature: MA Experiment 20001555 PARAMETER Experiment Name: At_Drought_Soil_Dry_P Parameter: Timepoint (day) Value: 10
  misc_feature: MA Experiment 20001555 PARAMETER Experiment Name: At_Drought_Soil_Dry_P Parameter: Treatment Value: Drought vs. No Drought
  misc_feature: MA Experiment ID: 20001556 Result: Down-regulated in Transcription
  misc_feature: MA Experiment 20001556 PARAMETER Experiment Name: At_Drought_Soil_Dry_P Parameter: Age (day) Value: 26
  misc_feature: MA Experiment 20001556 PARAMETER Experiment Name: At_Drought_Soil_Dry_P Parameter: Organism Value: A. thaliana
  misc_feature: MA Experiment 20001556 PARAMETER Experiment Name: At_Drought_Soil_Dry_P Parameter: Plant Line Value: WS
  misc_feature: MA Experiment 20001556 PARAMETER Experiment Name: At_Drought_Soil_Dry_P Parameter: Post Timepoint (hr) Value: None
  misc_feature: MA Experiment 20001556 PARAMETER Experiment Name: At_Drought_Soil_Dry_P Parameter: Post-Treatment Value: None
  misc_feature: MA Experiment 20001556 PARAMETER Experiment Name: At_Drought_Soil_Dry_P Parameter: Timepoint (day) Value: 12
  misc_feature: MA Experiment 20001556 PARAMETER Experiment Name: At_Drought_Soil_Dry_P Parameter: Treatment Value: Drought vs. No Drought
  misc_feature: MA Experiment ID: 20001906 Result: Down-regulated in Transcription
  misc_feature: MA Experiment 20001906 PARAMETER Experiment Name: At_Drought_Reproduction_P Parameter: Age (day) Value: 35
  misc_feature: MA Experiment 20001906 PARAMETER Experiment Name: At_Drought_Reproduction_P Parameter: Organism Value: A. thaliana
  misc_feature: MA Experiment 20001906 PARAMETER Experiment Name: At_Drought_Reproduction_P Parameter: Plant Line Value: WS
  misc_feature: MA Experiment 20001906 PARAMETER Experiment Name: At_Drought_Reproduction_P Parameter: Timepoint (day) Value: 5
  misc_feature: MA Experiment 20001906 PARAMETER Experiment Name: At_Drought_Reproduction_P Parameter: Tissue Value: Siliques
  misc_feature: MA Experiment 20001906 PARAMETER Experiment Name: At_Drought_Reproduction_P Parameter: Treatment Value: Drought vs. No Drought
  misc_feature: MA Experiment ID: 20001911 Result: Down-regulated in Transcription
  misc_feature: MA Experiment 20001911 PARAMETER Experiment Name: At_Drought_Reproduction_P Parameter: Age (day) Value: 40
  misc_feature: MA Experiment 20001911 PARAMETER Experiment Name: At_Drought_Reproduction_P Parameter: Organism Value: A. thaliana
  misc_feature: MA Experiment 20001911 PARAMETER Experiment Name: At_Drought_Reproduction_P Parameter: Plant Line Value: WS
  misc_feature: MA Experiment 20001911 PARAMETER Experiment Name: At_Drought_Reproduction_P Parameter: Timepoint (day) Value: 10
  misc_feature: MA Experiment 20001911 PARAMETER Experiment Name: At_Drought_Reproduction_P Parameter: Tissue Value: Flowers
  misc_feature: MA Experiment 20001911 PARAMETER Experiment Name: At_Drought_Reproduction_P Parameter: Treatment Value: Drought vs. No Drought

SEQ ID NO: 37797 - protein, 236 aa, Arabidopsis thaliana; identical to SEQ ID NO: 20987
  peptide (1)..(236): Ceres Seq. ID no. 13493725
  misc_feature (14)..(61): Pfam Name: Myb-like DNA-binding domain Pfam Description: Myb-like DNA-binding domain
  misc_feature (14)..(61): Pfam Name: Myb-like DNA-binding domain Pfam Description: Myb-like DNA-binding domain
  misc_feature (1)..(225): Homolog of NCBI NO: 15233968 NR Description: transcription factor (MYB4) -related [Arabidopsis
  misc_feature (1)..(225): Homolog of NCBI NO: 11273985 NR Description: myb-related transcription factor MYB4
  misc_feature (1)..(179): Homolog of NCBI NO: 7438345 NR Description: myb-related protein A - upland cotton
  misc_feature (1)..(182): Homolog of NCBI NO: 23476279 NR Description: myb-like transcription factor 1 [Gossypium
  misc_feature (1)..(224): Homolog of NCBI NO: 30687964 NR Description: myb family transcription factor [Arabidopsis
  misc_feature (1)..(225): Homolog of NCBI NO: 15233968 NR Description: transcription factor (MYB4) -related [Arabidopsis
  misc_feature (1)..(179): Homolog of NCBI NO: 7438345 NR Description: myb-related protein A - upland cotton
  misc_feature (1)..(224): Homolog of NCBI NO: 30687964 NR Description: myb family transcription factor [Arabidopsis
  misc_feature (1)..(236): Homolog of NCBI NO: 15233894 NR Description: myb family transcription factor [Arabidopsis
  misc_feature (1)..(217): Homolog of NCBI NO: 30693208 NR Description: myb family transcription factor [Arabidopsis
  misc_feature (84)..(217): Homolog of NCBI NO: 25403442 NR Description: protein F15O4.43 [imported] - Arabidopsis
  misc_feature (1)..(88): Homolog of NCBI NO: 25403442 NR Description: protein F15O4.43 [imported] - Arabidopsis
  misc_feature (1)..(219): Homolog of NCBI NO: 82310 NR Description: myb-related protein 330 - garden snapdragon
  misc_feature (1)..(182): Homolog of NCBI NO: 23476279 NR Description: myb-like transcription factor 1 [Gossypium
  misc_feature (1)..(225): Homolog of NCBI NO: 11273985 NR Description: myb-related transcription factor MYB4
  misc_feature (1)..(219): Homolog of NCBI NO: 82310 NR Description: myb-related protein 330 - garden snapdragon
  misc_feature (1)..(88): Homolog of NCBI NO: 25403442 NR Description: protein F15O4.43 [imported] - Arabidopsis
  misc_feature (84)..(217): Homolog of NCBI NO: 25403442 NR Description: protein F15O4.43 [imported] - Arabidopsis
  misc_feature (1)..(217): Homolog of NCBI NO: 30693208 NR Description: myb family transcription factor [Arabidopsis
  misc_feature (1)..(236): Homolog of NCBI NO: 15233894 NR Description: myb family transcription factor [Arabidopsis

SEQ ID NO: 37798 - DNA, 1110 bp, Arabidopsis thaliana
  misc_feature (1)..(1110): Ceres Seq. ID no. 13487022
  misc_feature: MA Experiment ID: 108433 Result: Down-regulated in Transcription
  misc_feature: MA Experiment 108433 PARAMETER Experiment Name: At_rhl_Mutant2_cDNA_P Parameter: Age (day) Value: 7
  misc_feature: MA Experiment 108433 PARAMETER Experiment Name: At_rhl_Mutant2_cDNA_P Parameter: Organism Value: A. thaliana
  misc_feature: MA Experiment 108433 PARAMETER Experiment Name: At_rhl_Mutant2_cDNA_P Parameter: Plant Line Value: rhl Mutant vs. wt landsburg
  misc_feature: MA Experiment 108433 PARAMETER Experiment Name: At_rhl_Mutant2_cDNA_P Parameter: Tissue Value: Roots
  misc_feature: MA Experiment ID: 108435 Result: Down-regulated in Transcription
  misc_feature: MA Experiment 108435 PARAMETER Experiment Name: At_stm_Mutants_cDNA_P Parameter: Plant Line Value: wt Landsburg vs stm
  misc_feature: MA Experiment 108435 PARAMETER Experiment Name: At_stm_Mutants_cDNA_P Parameter: Tissue Value: Shoot Apical Meristem Region
  misc_feature: MA Experiment ID: 108462 Result: Down-regulated in Transcription
  misc_feature: MA Experiment 108462 PARAMETER Experiment Name: At_Germinating_Seeds_cDNA_P Parameter: Age (day) Value: 2 vs. 0
  misc_feature: MA Experiment 108462 PARAMETER Experiment Name: At_Germinating_Seeds_cDNA_P Parameter: Tissue Value: Germinating Seeds
  misc_feature: MA Experiment ID: 108501 Result: Down-regulated in Transcription
  misc_feature: MA Experiment 108501 PARAMETER Experiment Name: At_ap2_floral_buds_cDNA_P Parameter: Plant Line Value: ap2 (Ler.)
  misc_feature: MA Experiment 108501 PARAMETER Experiment Name: At_ap2_floral_buds_cDNA_P Parameter: Tissue Value: Closed Flower
  misc_feature: MA Experiment ID: 20000069 Result: Up-regulated in Transcription
  misc_feature: MA Experiment 20000069 PARAMETER Experiment Name: At_100uM_ABA_Mutants_cDNA_P Parameter: Plant Line Value: CS23
  misc_feature: MA Experiment 20000069 PARAMETER Experiment Name: At_100uM_ABA_Mutants_cDNA_P Parameter: Timepoint (hr) Value: 6
  misc_feature: MA Experiment 20000069 PARAMETER Experiment Name: At_100uM_ABA_Mutants_cDNA_P Parameter: Tissue Value: Aerial
  misc_feature: MA Experiment 20000069 PARAMETER Experiment Name: At_100uM_ABA_Mutants_cDNA_P Parameter: Treatment Value: 100uM ABA vs. No Treatment
  misc_feature: MA Experiment ID: 20000071 Result: Up-regulated in Transcription
  misc_feature: MA Experiment 20000071 PARAMETER Experiment Name: At_100uM_ABA_Mutants_cDNA_P Parameter: Plant Line Value: CS8104
  misc_feature: MA Experiment 20000071 PARAMETER Experiment Name: At_100uM_ABA_Mutants_cDNA_P Parameter: Timepoint (hr) Value: 6
  misc_feature: MA Experiment 20000071 PARAMETER Experiment Name: At_100uM_ABA_Mutants_cDNA_P Parameter: Tissue Value: Aerial
  misc_feature: MA Experiment 20000071 PARAMETER Experiment Name: At_100uM_ABA_Mutants_cDNA_P Parameter: Treatment Value: 100uM ABA vs. No Treatment
  misc_feature: MA Experiment ID: 20000072 Result: Up-regulated in Transcription
  misc_feature: MA Experiment 20000072 PARAMETER Experiment Name: At_100uM_ABA_Mutants_cDNA_P Parameter: Plant Line Value: CS8105
  misc_feature: MA Experiment 20000072 PARAMETER Experiment Name: At_100uM_ABA_Mutants_cDNA_P Parameter: Timepoint (hr) Value: 6
  misc_feature: MA Experiment 20000072 PARAMETER Experiment Name: At_100uM_ABA_Mutants_cDNA_P Parameter: Tissue Value: Aerial
  misc_feature: MA Experiment 20000072 PARAMETER Experiment Name: At_100uM_ABA_Mutants_cDNA_P Parameter: Treatment Value: 100uM ABA vs. No Treatment
  misc_feature: MA Experiment ID: 20000086 Result: Up-regulated in Transcription
  misc_feature: MA Experiment 20000086 PARAMETER Experiment Name: At_100uM_ABA_Mutants_cDNA_P Parameter: Plant Line Value: CS22
  misc_feature: MA Experiment 20000086 PARAMETER Experiment Name: At_100uM_ABA_Mutants_cDNA_P Parameter: Timepoint (hr) Value: 6
  misc_feature: MA Experiment 20000086 PARAMETER Experiment Name: At_100uM_ABA_Mutants_cDNA_P Parameter: Tissue Value: Aerial
  misc_feature: MA Experiment 20000086 PARAMETER Experiment Name: At_100uM_ABA_Mutants_cDNA_P Parameter: Treatment Value: 100uM ABA vs. No Treatment
  misc_feature: MA Experiment ID: 20000087 Result: Up-regulated in Transcription
  misc_feature: MA Experiment 20000087 PARAMETER Experiment Name: At_100uM_ABA_Mutants_cDNA_P Parameter: Plant Line Value: WS
  misc_feature: MA Experiment 20000087 PARAMETER Experiment Name: At_100uM_ABA_Mutants_cDNA_P Parameter: Timepoint (hr) Value: 6
  misc_feature: MA Experiment 20000087 PARAMETER Experiment Name: At_100uM_ABA_Mutants_cDNA_P Parameter: Tissue Value: Aerial
  misc_feature: MA Experiment 20000087 PARAMETER Experiment Name: At_100uM_ABA_Mutants_cDNA_P Parameter: Treatment Value: 100uM ABA vs. No Treatment
  misc_feature: MA Experiment ID: 20000088 Result: Up-regulated in Transcription
  misc_feature: MA Experiment 20000088 PARAMETER Experiment Name: At_100uM_ABA_Mutants_cDNA_P Parameter: Plant Line Value: Landsberg
  misc_feature: MA Experiment 20000088 PARAMETER Experiment Name: At_100uM_ABA_Mutants_cDNA_P Parameter: Timepoint (hr) Value: 6
  misc_feature: MA Experiment 20000088 PARAMETER Experiment Name: At_100uM_ABA_Mutants_cDNA_P Parameter: Tissue Value: Aerial
  misc_feature: MA Experiment 20000088 PARAMETER Experiment Name: At_100uM_ABA_Mutants_cDNA_P Parameter: Treatment Value: 100uM ABA vs. No Treatment
  misc_feature: MA Experiment ID: 20000089 Result: Up-regulated in Transcription
  misc_feature: MA Experiment ID: 20000090 Result: Up-regulated in Transcription
  misc_feature: MA Experiment ID: 20000144 Result: Up-regulated in Transcription
  misc_feature: MA Experiment 20000144 PARAMETER Experiment Name: At_42deg_Heat_cDNA_P Parameter: Temperature (deg C) Value: 42 vs. 22
  misc_feature: MA Experiment 20000144 PARAMETER Experiment Name: At_42deg_Heat_cDNA_P Parameter: Timepoint (hr) Value: 1
  misc_feature: MA Experiment 20000144 PARAMETER Experiment Name: At_42deg_Heat_cDNA_P Parameter: Tissue Value: Aerial
  misc_feature: MA Experiment ID: 20000179 Result: Down-regulated in Transcription
  misc_feature: MA Experiment 20000179 PARAMETER Experiment Name: At_Germinating_Seeds_P Parameter: Age (hr) Value: 6 vs. 0
  misc_feature: MA Experiment 20000179 PARAMETER Experiment Name: At_Germinating_Seeds_P Parameter: Tissue Value: Germinating Seeds
  misc_feature: MA Experiment ID: 20000185 Result: Down-regulated in Transcription
  misc_feature: MA Experiment 20000185 PARAMETER Experiment Name: At_Roots__P Parameter: Age (day) Value: 7 vs. 21
  misc_feature: MA Experiment 20000185 PARAMETER Experiment Name: At_Roots__P Parameter: Organism Value: A. thaliana
  misc_feature: MA Experiment 20000185 PARAMETER Experiment Name: At_Roots__P Parameter: Tissue Value: Roots vs. Whole Plant
  misc_feature: MA Experiment ID: 20000224 Result: Down-regulated in Transcription
  misc_feature: MA Experiment ID: 20000234 Result: Down-regulated in Transcription
  misc_feature: MA Experiment 20000234 PARAMETER Experiment Name: At_Siliques_P Parameter: Age (day) Value: 21
  misc_feature: MA Experiment 20000234 PARAMETER Experiment Name: At_Siliques_P Parameter: Organism Value: A. thaliana
  misc_feature: MA Experiment 20000234 PARAMETER Experiment Name: At_Siliques_P Parameter: Plant Line Value: WS
  misc_feature: MA Experiment 20000234 PARAMETER Experiment Name: At_Siliques_P Parameter: Tissue Value: Less Than 5mm Siliques vs. Whole Plant
  misc_feature: MA Experiment ID: 20000264 Result: Down-regulated in Transcription
  misc_feature: MA Experiment 20000264 PARAMETER Experiment Name: At_Open_Flower_P Parameter: Age (day) Value: 21
  misc_feature: MA Experiment 20000264 PARAMETER Experiment Name: At_Open_Flower_P Parameter: Plant Line Value: WS
  misc_feature: MA Experiment 20000264 PARAMETER Experiment Name: At_Open_Flower_P Parameter: Tissue Value: Open Flower vs. Whole Plant
  misc_feature: MA Experiment ID: 20000265 Result: Down-regulated in Transcription
  misc_feature: MA Experiment 20000265 PARAMETER Experiment Name: At_Open_Flower_P Parameter: Age (day) Value: 21
  misc_feature: MA Experiment 20000265 PARAMETER Experiment Name: At_Open_Flower_P Parameter: Plant Line Value: WS
  misc_feature: MA Experiment 20000265 PARAMETER Experiment Name: At_Open_Flower_P Parameter: Tissue Value: Closed Flower vs. Whole Plant
  misc_feature: MA Experiment ID: 20000286 Result: Down-regulated in Transcription
  misc_feature: MA Experiment 20000286 PARAMETER Experiment Name: At_Open_Flower_P Parameter: Age (day) Value: 21
  misc_feature: MA Experiment 20000286 PARAMETER Experiment Name: At_Open_Flower_P Parameter: Plant Line Value: WS
  misc_feature: MA Experiment 20000286 PARAMETER Experiment Name: At_Open_Flower_P Parameter: Tissue Value: Half Open vs. Whole Plant
  misc_feature: MA Experiment ID: 20000437 Result: Down-regulated in Transcription
  misc_feature: MA Experiment 20000437 PARAMETER Experiment Name: At_Drought_P Parameter: Age (day) Value: 8
  misc_feature: MA Experiment 20000437 PARAMETER Experiment Name: At_Drought_P Parameter: Organism Value: A. thaliana
  misc_feature: MA Experiment 20000437 PARAMETER Experiment Name: At_Drought_P Parameter: Plant Line Value: WS
  misc_feature: MA Experiment 20000437 PARAMETER Experiment Name: At_Drought_P Parameter: Timepoint (hr) Value: 24
  misc_feature: MA Experiment 20000437 PARAMETER Experiment Name: At_Drought_P Parameter: Tissue Value: Whole Plant
  misc_feature: MA Experiment 20000437 PARAMETER Experiment Name: At_Drought_P Parameter: Treatment Value: Drought vs. No Drought
  misc_feature: MA Experiment ID: 20000439 Result: Down-regulated in Transcription
  misc_feature: MA Experiment 20000439 PARAMETER Experiment Name: At_Roots__P Parameter: Age (day) Value: 14 vs. 21
  misc_feature: MA Experiment 20000439 PARAMETER Experiment Name: At_Roots__P Parameter: Organism Value: A. thaliana
  misc_feature: MA Experiment 20000439 PARAMETER Experiment Name: At_Roots__P Parameter: Tissue Value: Roots vs. Whole Plant
  misc_feature: MA Experiment ID: 20000441 Result: Up-regulated in Transcription
  misc_feature: MA Experiment 20000441 PARAMETER Experiment Name: At_1uM_BR-BRZ__P Parameter: Tissue Value: Shoot Apices
  misc_feature: MA Experiment 20000441 PARAMETER Experiment Name: At_1uM_BR-BRZ__P Parameter: Treatment Value: 1uM BR vs. No Treatment
  misc_feature: MA Experiment ID: 20000460 Result: Up-regulated in Transcription
  misc_feature: MA Experiment 20000460 PARAMETER Experiment Name: At_10percent_PEG_P Parameter: Age (day) Value: 12
  misc_feature: MA Experiment 20000460 PARAMETER Experiment Name: At_10percent_PEG_P Parameter: Organism Value: A. thaliana
  misc_feature: MA Experiment 20000460 PARAMETER Experiment Name: At_10percent_PEG_P Parameter: Plant Line Value: WS
  misc_feature: MA Experiment 20000460 PARAMETER Experiment Name: At_10percent_PEG_P Parameter: Timepoint (day) Value: 12
  misc_feature: MA Experiment 20000460 PARAMETER Experiment Name: At_10percent_PEG_P Parameter: Tissue Value: Whole Plant
  misc_feature: MA Experiment 20000460 PARAMETER Experiment Name: At_10percent_PEG_P Parameter: Treatment Value: 10percent PEG vs. No Treatment
  misc_feature: MA Experiment ID: 20000527 Result: Up-regulated in Transcription
  misc_feature: MA Experiment 20000527 PARAMETER Experiment Name: At_10percent_PEG_P Parameter: Age (day) Value: 20
  misc_feature: MA Experiment 20000527 PARAMETER Experiment Name: At_10percent_PEG_P Parameter: Organism Value: A. thaliana
  misc_feature: MA Experiment 20000527 PARAMETER Experiment Name: At_10percent_PEG_P Parameter: Plant Line Value: WS
  misc_feature: MA Experiment 20000527 PARAMETER Experiment Name: At_10percent_PEG_P Parameter: Timepoint (day) Value: 20
  misc_feature: MA Experiment 20000527 PARAMETER Experiment Name: At_10percent_PEG_P Parameter: Tissue Value: Whole Plant
  misc_feature: MA Experiment 20000527 PARAMETER Experiment Name: At_10percent_PEG_P Parameter: Treatment Value: 10percent PEG vs. No Treatment
  misc_feature: MA Experiment ID: 20001248 Result: Up-regulated in Transcription
  misc_feature: MA Experiment 20001248 PARAMETER Experiment Name: At_Far-red-induction_P Parameter: Age (day) Value: 7
  misc_feature: MA Experiment 20001248 PARAMETER Experiment Name: At_Far-red-induction_P Parameter: Light Value: Far-red vs. White
  misc_feature: MA Experiment 20001248 PARAMETER Experiment Name: At_Far-red-induction_P Parameter: Organism Value: A. thaliana
  misc_feature: MA Experiment 20001248 PARAMETER Experiment Name: At_Far-red-induction_P Parameter: Plant Line Value: Columbia
  misc_feature: MA Experiment 20001248 PARAMETER Experiment Name: At_Far-red-induction_P Parameter: Timepoint (hr) Value: 4
  misc_feature: MA Experiment 20001248 PARAMETER Experiment Name: At_Far-red-induction_P Parameter: Tissue Value: Whole Plant
  misc_feature: MA Experiment ID: 20001911 Result: Down-regulated in Transcription
  misc_feature: MA Experiment 20001911 PARAMETER Experiment Name: At_Drought_Reproduction_P Parameter: Age (day) Value: 40
  misc_feature: MA Experiment 20001911 PARAMETER Experiment Name: At_Drought_Reproduction_P Parameter: Organism Value: A. thaliana
  misc_feature: MA Experiment 20001911 PARAMETER Experiment Name: At_Drought_Reproduction_P Parameter: Plant Line Value: WS
  misc_feature: MA Experiment 20001911 PARAMETER Experiment Name: At_Drought_Reproduction_P Parameter: Timepoint (day) Value: 10
  misc_feature: MA Experiment 20001911 PARAMETER Experiment Name: At_Drought_Reproduction_P Parameter: Tissue Value: Flowers
  misc_feature: MA Experiment 20001911 PARAMETER Experiment Name: At_Drought_Reproduction_P Parameter: Treatment Value: Drought vs. No Drought
tacattgtcgacattggtaggataagtaggactctttctcattgcttttcgcttcgtcttcttctctctaaaactctttctctgcaagaaaaccaatctctctctctttcactttcttaaaccctttatctctctaaaaccctcctttttaggtaaaaaagttttggtgctgactcaaaaaaggttcggtcttttactgcattttgaaatggcgattgaagattacgagaacccaaatcgagaaatcaaacctaagaacagaagattcatggaaggagagaatcagtggcctatatggctcaaacctttactaaaccaacacttttttgctcaatgcaagtttcatggacacttacctagaaccgaatgcaaaatgtattgcttagactgtaccaatgactcgttttgttctctctgtctttctgaacacgagaatcatcgtaccattcagataaggatatcatcttatcataatgtgacaaaggtcgatgagatacagaaatacttagacatatcaagcattcagacatatgtgatcaatagctcaaaggttttgttcttgaatgagaggcctcagtctaagcctggtaaaggttttactaatgcctgcatggtctgttatcgtggccttgccgaaaactgcttccgcttctgctctattggctgcaaggttgcaggaacatctggagtcttccagaagagagtgaagcatacaacgaatgactcagataattcaaacaacagttctggagtggagaataacagttctggagcagagaatggtaattcaaatctgcagagtctcagtccgcctacacctcaatttcctcctcgttctctgcgaaagcgactaaggaagggaattcctcaccgagctccatttagttgagattgtgatcaagaaaaagaagaagaagcttgtgttacgtagtgctatggattagtcaaacaactagtaagtgtatatatatatatacaatatcttcttgtaaagttttggtgtgatgcaatgagactagacagtgagtggtttatggtgtttttatgactatttccttgttctaaattttgtttttgattagattatatgacaaaaatagataattagtc

SEQ ID NO: 37799 - protein, 226 aa, Arabidopsis thaliana
  peptide (1)..(226): Ceres Seq. ID no. 15218717
  misc_feature (25)..(219): Pfam Name: Protein of unknown function, DUF597 Pfam Description: Protein of unknown function, DUF597
  misc_feature (28)..(168): Homolog of NCBI NO: 25337904 NR Description: unknown protein F14G6.19 [imported] - Arabidopsis
  misc_feature (28)..(168): Homolog of NCBI NO: 18411153 NR Description: expressed protein [Arabidopsis thaliana]
  misc_feature (21)..(225): Homolog of NCBI NO: 15217560 NR Description: hypothetical protein [Arabidopsis thaliana]
  misc_feature (14)..(225): Homolog of NCBI NO: 37537092 NR Description: unknown protein [Oryza sativa (japonica
  misc_feature (24)..(225): Homolog of NCBI NO: 38346725 NR Description: OSJNBa0086O06.23 [Oryza sativa (japonica
  misc_feature (22)..(225): Homolog of NCBI NO: 21554139 NR Description: unknown [Arabidopsis thaliana]
  misc_feature (22)..(225): Homolog of NCBI NO: 18398555 NR Description: expressed protein [Arabidopsis thaliana]
  misc_feature (1)..(225): Homolog of NCBI NO: 6714272 NR Description: F6N18.8 [Arabidopsis thaliana]
  misc_feature (1)..(196): Homolog of NCBI NO: 15236696 NR Description: expressed protein [Arabidopsis thaliana]
  misc_feature (1)..(226): Homolog of NCBI NO: 15237491 NR Description: expressed protein [Arabidopsis thaliana]
MAIEDYENPNREIKPKNRRFMEGENQWPIWLKPLLNQHFFAQCKFHGHLPRTECKMYCLDCTNDSFCSLCLSEHENHRTIQIRISSYHNVTKVDEIQKYLDISSIQTYVINSSKVLFLNERPQSKPGKGFTNACMVCYRGLAENCFRFCSIGCKVAGTSGVFQKRVKHTTNDSDNSNNSSGVENNSSGAENGNSNLQSLSPPTPQFPPRSLRKRLRKGIPHRAPFS

SEQ ID NO: 37800 - protein, 206 aa, Arabidopsis thaliana
  peptide (1)..(206): Ceres Seq. ID no. 15218718
  misc_feature (5)..(199): Pfam Name: Protein of unknown function, DUF597 Pfam Description: Protein of unknown function, DUF597
  misc_feature (8)..(148): Homolog of NCBI NO: 25337904 NR Description: unknown protein F14G6.19 [imported] - Arabidopsis
  misc_feature (8)..(148): Homolog of NCBI NO: 18411153 NR Description: expressed protein [Arabidopsis thaliana]
  misc_feature (1)..(205): Homolog of NCBI NO: 15217560 NR Description: hypothetical protein [Arabidopsis thaliana]
  misc_feature (1)..(205): Homolog of NCBI NO: 37537092 NR Description: unknown protein [Oryza sativa (japonica
  misc_feature (4)..(205): Homolog of NCBI NO: 38346725 NR Description: OSJNBa0086O06.23 [Oryza sativa (japonica
  misc_feature (2)..(205): Homolog of NCBI NO: 21554139 NR Description: unknown [Arabidopsis thaliana]
  misc_feature (2)..(205): Homolog of NCBI NO: 18398555 NR Description: expressed protein [Arabidopsis thaliana]
  misc_feature (1)..(205): Homolog of NCBI NO: 6714272 NR Description: F6N18.8 [Arabidopsis thaliana]
  misc_feature (1)..(176): Homolog of NCBI NO: 15236696 NR Description: expressed protein [Arabidopsis thaliana]
  misc_feature (1)..(206): Homolog of NCBI NO: 15237491 NR Description: expressed protein [Arabidopsis thaliana]
MEGENQWPIWLKPLLNQHFFAQCKFHGHLPRTECKMYCLDCTNDSFCSLCLSEHENHRTIQIRISSYHNVTKVDEIQKYLDISSIQTYVINSSKVLFLNERPQSKPGKGFTNACMVCYRGLAENCFRFCSIGCKVAGTSGVFQKRVKHTTNDSDNSNNSSGVENNSSGAENGNSNLQSLSPPTPQFPPRSLRKRLRKGIPHRAPFS

SEQ ID NO: 37801 - protein, 171 aa, Arabidopsis thaliana
  peptide (1)..(171): Ceres Seq. ID no. 15218719
  misc_feature (1)..(164): Pfam Name: Protein of unknown function, DUF597 Pfam Description: Protein of unknown function, DUF597
  misc_feature (1)..(113): Homolog of NCBI NO: 25337904 NR Description: unknown protein F14G6.19 [imported] - Arabidopsis
  misc_feature (1)..(113): Homolog of NCBI NO: 18411153 NR Description: expressed protein [Arabidopsis thaliana]
  misc_feature (1)..(170): Homolog of NCBI NO: 15217560 NR Description: hypothetical protein [Arabidopsis thaliana]
  misc_feature (1)..(170): Homolog of NCBI NO: 37537092 NR Description: unknown protein [Oryza sativa (japonica
  misc_feature (1)..(170): Homolog of NCBI NO: 38346725 NR Description: OSJNBa0086O06.23 [Oryza sativa (japonica
  misc_feature (1)..(170): Homolog of NCBI NO: 21554139 NR Description: unknown [Arabidopsis thaliana]
  misc_feature (1)..(170): Homolog of NCBI NO: 18398555 NR Description: expressed protein [Arabidopsis thaliana]
  misc_feature (1)..(170): Homolog of NCBI NO: 6714272 NR Description: F6N18.8 [Arabidopsis thaliana]
  misc_feature (1)..(141): Homolog of NCBI NO: 15236696 NR Description: expressed protein [Arabidopsis thaliana]
  misc_feature (1)..(171): Homolog of NCBI NO: 15237491 NR Description: expressed protein [Arabidopsis thaliana]
MYCLDCTNDSFCSLCLSEHENHRTIQIRISSYHNVTKVDEIQKYLDISSIQTYVINSSKVLFLNERPQSKPGKGFTNACMVCYRGLAENCFRFCSIGCKVAGTSGVFQKRVKHTTNDSDNSNNSSGVENNSSGAENGNSNLQSLSPPTPQFPPRSLRKRLRKGIPHRAPFS

SEQ ID NO: 37802 - DNA, 1433 bp, Arabidopsis thaliana
  misc_feature (1)..(1433): Ceres Seq. ID no. 12324669
  misc_feature: MA Experiment ID: 108434 Result: Up-regulated in Transcription
  misc_feature: MA Experiment 108434 PARAMETER Experiment Name: At_Root_Tips_cDNA_P Parameter: Tissue Value: Root Tips
  misc_feature: MA Experiment ID: 108464 Result: Down-regulated in Transcription
  misc_feature: MA Experiment 108464 PARAMETER Experiment Name: At_Germinating_Seeds_cDNA_P Parameter: Age (day) Value: 4 vs. 0
  misc_feature: MA Experiment 108464 PARAMETER Experiment Name: At_Germinating_Seeds_cDNA_P Parameter: Tissue Value: Germinating Seeds
  misc_feature: MA Experiment ID: 108576 Result: Up-regulated in Transcription
  misc_feature: MA Experiment 108576 PARAMETER Experiment Name: At_42deg_Heat_cDNA_P Parameter: Temperature (deg C) Value: 42 vs. 22
  misc_feature: MA Experiment 108576 PARAMETER Experiment Name: At_42deg_Heat_cDNA_P Parameter: Timepoint (hr) Value: 1
  misc_feature: MA Experiment 108576 PARAMETER Experiment Name: At_42deg_Heat_cDNA_P Parameter: Tissue Value: Aerial
  misc_feature: MA Experiment ID: 108577 Result: Up-regulated in Transcription
  misc_feature: MA Experiment 108577 PARAMETER Experiment Name: At_42deg_Heat_cDNA_P Parameter: Temperature (deg C) Value: 42 vs. 22
  misc_feature: MA Experiment 108577 PARAMETER Experiment Name: At_42deg_Heat_cDNA_P Parameter: Timepoint (hr) Value: 6
  misc_feature: MA Experiment 108577 PARAMETER Experiment Name: At_42deg_Heat_cDNA_P Parameter: Tissue Value: Aerial
  misc_feature: MA Experiment ID: 20000093 Result: Up-regulated in Transcription
  misc_feature: MA Experiment 20000093 PARAMETER Experiment Name: At_42deg_Heat_cDNA_P Parameter: Temperature (deg C) Value: 42 vs. 22
  misc_feature: MA Experiment 20000093 PARAMETER Experiment Name: At_42deg_Heat_cDNA_P Parameter: Timepoint (hr) Value: 0.5
  misc_feature: MA Experiment 20000093 PARAMETER Experiment Name: At_42deg_Heat_cDNA_P Parameter: Tissue Value: Aerial
  misc_feature: MA Experiment ID: 20000111 Result: Up-regulated in Transcription
  misc_feature: MA Experiment 20000111 PARAMETER Experiment Name: At_42deg_Heat_cDNA_P Parameter: Temperature (deg C) Value: 42 vs. 22
  misc_feature: MA Experiment 20000111 PARAMETER Experiment Name: At_42deg_Heat_cDNA_P Parameter: Timepoint (hr) Value: 6
  misc_feature: MA Experiment 20000111 PARAMETER Experiment Name: At_42deg_Heat_cDNA_P Parameter: Tissue Value: Aerial
  misc_feature: MA Experiment ID: 20000112 Result: Up-regulated in Transcription
  misc_feature: MA Experiment 20000112 PARAMETER Experiment Name: At_42deg_Heat_cDNA_P Parameter: Temperature (deg C) Value: 42 vs. 22
  misc_feature: MA Experiment 20000112 PARAMETER Experiment Name: At_42deg_Heat_cDNA_P Parameter: Timepoint (hr) Value: 2
  misc_feature: MA Experiment 20000112 PARAMETER Experiment Name: At_42deg_Heat_cDNA_P Parameter: Tissue Value: Aerial
  misc_feature: MA Experiment ID: 20000144 Result: Up-regulated in Transcription
  misc_feature: MA Experiment 20000144 PARAMETER Experiment Name: At_42deg_Heat_cDNA_P Parameter: Temperature (deg C) Value: 42 vs. 22
  misc_feature: MA Experiment 20000144 PARAMETER Experiment Name: At_42deg_Heat_cDNA_P Parameter: Timepoint (hr) Value: 1
  misc_feature: MA Experiment 20000144 PARAMETER Experiment Name: At_42deg_Heat_cDNA_P Parameter: Tissue Value: Aerial
  misc_feature: MA Experiment ID: 20000171 Result: Up-regulated in Transcription
  misc_feature: MA Experiment 20000171 PARAMETER Experiment Name: At_42deg_Heat_P Parameter: Age (day) Value: 14
  misc_feature: MA Experiment 20000171 PARAMETER Experiment Name: At_42deg_Heat_P Parameter: Organism Value: A. thaliana
  misc_feature: MA Experiment 20000171 PARAMETER Experiment Name: At_42deg_Heat_P Parameter: Plant Line Value: WS
  misc_feature: MA Experiment 20000171 PARAMETER Experiment Name: At_42deg_Heat_P Parameter: Temperature (deg C) Value: 42 vs. 22
  misc_feature: MA Experiment 20000171 PARAMETER Experiment Name: At_42deg_Heat_P Parameter: Timepoint (hr) Value: 1
  misc_feature: MA Experiment 20000171 PARAMETER Experiment Name: At_42deg_Heat_P Parameter: Tissue Value: Aerial
  misc_feature: MA Experiment ID: 20000173 Result: Up-regulated in Transcription
  misc_feature: MA Experiment 20000173 PARAMETER Experiment Name: At_42deg_Heat_P Parameter: Age (day) Value: 14
  misc_feature: MA Experiment 20000173 PARAMETER Experiment Name: At_42deg_Heat_P Parameter: Organism Value: A. thaliana
  misc_feature: MA Experiment 20000173 PARAMETER Experiment Name: At_42deg_Heat_P Parameter: Plant Line Value: WS
  misc_feature: MA Experiment 20000173 PARAMETER Experiment Name: At_42deg_Heat_P Parameter: Temperature (deg C) Value: 42 vs. 22
  misc_feature: MA Experiment 20000173 PARAMETER Experiment Name: At_42deg_Heat_P Parameter: Timepoint (hr) Value: 6
  misc_feature: MA Experiment 20000173 PARAMETER Experiment Name: At_42deg_Heat_P Parameter: Tissue Value: Aerial
  misc_feature: MA Experiment ID: 20000185 Result: Up-regulated in Transcription
  misc_feature: MA Experiment 20000185 PARAMETER Experiment Name: At_Roots__P Parameter: Age (day) Value: 7 vs. 21
  misc_feature: MA Experiment 20000185 PARAMETER Experiment Name: At_Roots__P Parameter: Organism Value: A. thaliana
  misc_feature: MA Experiment 20000185 PARAMETER Experiment Name: At_Roots__P Parameter: Tissue Value: Roots vs. Whole Plant
  misc_feature: MA Experiment ID: 20000234 Result: Up-regulated in Transcription
  misc_feature: MA Experiment 20000234 PARAMETER Experiment Name: At_Siliques_P Parameter: Age (day) Value: 21
  misc_feature: MA Experiment 20000234 PARAMETER Experiment Name: At_Siliques_P Parameter: Organism Value: A. thaliana
  misc_feature: MA Experiment 20000234 PARAMETER Experiment Name: At_Siliques_P Parameter: Plant Line Value: WS
  misc_feature: MA Experiment 20000234 PARAMETER Experiment Name: At_Siliques_P Parameter: Tissue Value: Less Than 5mm Siliques vs. Whole Plant
  misc_feature: MA Experiment ID: 20000438 Result: Up-regulated in Transcription
  misc_feature: MA Experiment 20000438 PARAMETER Experiment Name: At_Shoots__P Parameter: Age (day) Value: 14
  misc_feature: MA Experiment 20000438 PARAMETER Experiment Name: At_Shoots__P Parameter: Tissue Value: Shoots vs. Whole Plant
  misc_feature: MA Experiment ID: 20000439 Result: Up-regulated in Transcription
  misc_feature: MA Experiment 20000439 PARAMETER Experiment Name: At_Roots__P Parameter: Age (day) Value: 14 vs. 21
  misc_feature: MA Experiment 20000439 PARAMETER Experiment Name: At_Roots__P Parameter: Organism Value: A. thaliana
  misc_feature: MA Experiment 20000439 PARAMETER Experiment Name: At_Roots__P Parameter: Tissue Value: Roots vs. Whole Plant
atgtgttatgtcccttactacacaagaatctccttctcctcaaccttctgctttcactcccgccttatctcctgattatcaacagagagagaaggaattgcataaacaagagagtaacaacatgagactggttatttcactagcagctacattttccttagttggtataatcttactttgctctctgctttattggttttgccataggagaagaaacctcaagagctcaggttgtgggtgtagtggaatcacattcttgaatcggtttagtcgctcaaaaacattagacaagagaactacaaagcagggaacagtgtcattgatcgattacaatatactagaagaaggaactagtggtttcaaggagagtaacattttgggtcaaggtggatttggatgtgtatattctgccacattagagaacaacatttcagctgcggttaagaagctagactgtgccaatgaagatgcagcaaaggaatttaagagtgaggttgagatattgagtaagctccagcacccgaacataatatcccttttgggttatagcacgaatgataaggcgagattcattgtctatgagctgatgccaaacgtttctctggaatctcatttgcacggatcttctcggggttcggcgatcacatggcctatgaggatgaagattgctcttgatgtaacaaggggattagaatatttgcatgaacattgtcatccagcaatcattcacagggacttgaaatcatccaacatcttattagatagcaatttcaatgctaagatttcagattttggtctagctgttgttgatgggccaaagaacaagaaccataaactttccgggacagttggctacgttgcaccagagtatcttctcaacggccaattgacagaaaagagcgacgtgtatgcttttggagtagtgttattagagcttttactcgggaaaaaacctgtgtagaaactagctcccggtgaatgccaatccatcatcacttgggcaatgccttatctcactgatagaaccaagttaccaagcgtcatagatcctgcgattaaagatacgatggacttgaaacacctttaccaggtagcggcagtggcgattttgtgcgtgcagccagaaccgagttatagaccgttgattacagacgtcttgcattctcttatacctttggttccaatggaacttggtggaaccttaaaaaccatcaaatgtgcttcaatggatcactgttaaacaccatagaaaaccggtgtttttttttatagaaattcggtttaatattgaccggtaggtggttttgatgtgtatattgggttagaagttgtaaccggaacattacagtatccttttgaaatgcttacttgcgcactgttgatgaactcttttctcatgtgatttctatttacgaaaaaaaatgaaaattatt

SEQ ID NO: 37803 - protein, 319 aa, Arabidopsis thaliana
  peptide (1)..(319): Ceres Seq. ID no. 12324670
  misc_feature (120)..(318): Pfam Name: Protein kinase domain Pfam Description: Protein kinase domain
  misc_feature (76)..(319): Homolog of NCBI NO: 34910468 NR Description: putative protein kinase [Oryza sativa (japonica
  misc_feature (207)..(319): Homolog of NCBI NO: 29367521 NR Description: protein kinase-like protein
  misc_feature (100)..(319): Homolog of NCBI NO: 11358842 NR Description: serine/threonine-specific protein kinase-like
  misc_feature (230)..(319): Homolog of NCBI NO: 30689231 NR Description: protein kinase family [Arabidopsis thaliana]
  misc_feature (2)..(177): Homolog of NCBI NO: 30689231 NR Description: protein kinase family [Arabidopsis thaliana]
  misc_feature (3)..(319): Homolog of NCBI NO: 15220195 NR Description: putative protein kinase; protein id: At1g80640.1
  misc_feature (102)..(319): Homolog of NCBI NO: 11259774 NR Description: ser/thr specific protein kinase-like protein -
  misc_feature (1)..(24): Homolog of NCBI NO: 11358833 NR Description: ser/thr specific protein kinase-like protein -
  misc_feature (102)..(319): Homolog of NCBI NO: 11358833 NR Description: ser/thr specific protein kinase-like protein -
  misc_feature (41)..(319): Homolog of NCBI NO: 30683447 NR Description: protein kinase family [Arabidopsis thaliana]
CVMSLTTQESPSPQPSAFTPALSPDYQQREKELHKQESNNMRLVISLAATFSLVGIILLCSLLYWFCHRRRNLKSSGCGCSGITFLNRFSRSKTLDKRTTKQGTVSLIDYNILEEGTSGFKESNILGQGGFGCVYSATLENNISAAVKKLDCANEDAAKEFKSEVEILSKLQHPNIISLLGYSTNDKARFIVYELMPNVSLESHLHGSSRGSAITWPMRMKIALDVTRGLEYLHEHCHPAIIHRDLKSSNILLDSNFNAKISDFGLAVVDGPKNKNHKLSGTVGYVAPEYLLNGQLTEKSDVYAFGVVLLELLLGKKPV

SEQ ID NO: 37804 - protein, 317 aa, Arabidopsis thaliana
  peptide (1)..(317): Ceres Seq. ID no. 12324671
  misc_feature (118)..(316): Pfam Name: Protein kinase domain Pfam Description: Protein kinase domain
  misc_feature (74)..(317): Homolog of NCBI NO: 34910468 NR Description: putative protein kinase [Oryza sativa (japonica
  misc_feature (205)..(317): Homolog of NCBI NO: 29367521 NR Description: protein kinase-like protein
  misc_feature (98)..(317): Homolog of NCBI NO: 11358842 NR Description: serine/threonine-specific protein kinase-like
  misc_feature (228)..(317): Homolog of NCBI NO: 30689231 NR Description: protein kinase family [Arabidopsis thaliana]
  misc_feature (1)..(175): Homolog of NCBI NO: 30689231 NR Description: protein kinase family [Arabidopsis thaliana]
  misc_feature (1)..(317): Homolog of NCBI NO: 15220195 NR Description: putative protein kinase; protein id: At1g80640.1
  misc_feature (100)..(317): Homolog of NCBI NO: 11259774 NR Description: ser/thr specific protein kinase-like protein -
  misc_feature (1)..(22): Homolog of NCBI NO: 11358833 NR Description: ser/thr specific protein kinase-like protein -
  misc_feature (100)..(317): Homolog of NCBI NO: 11358833 NR Description: ser/thr specific protein kinase-like protein -
  misc_feature (39)..(317): Homolog of NCBI NO: 30683447 NR Description: protein kinase family [Arabidopsis thaliana]
MSLTTQESPSPQPSAFTPALSPDYQQREKELHKQESNNMRLVISLAATFSLVGIILLCSLLYWFCHRRRNLKSSGCGCSGITFLNRFSRSKTLDKRTTKQGTVSLIDYNILEEGTSGFKESNILGQGGFGCVYSATLENNISAAVKKLDCANEDAAKEFKSEVEILSKLQHPNIISLLGYSTNDKARFIVYELMPNVSLESHLHGSSRGSAITWPMRMKIALDVTRGLEYLHEHCHPAIIHRDLKSSNILLDSNFNAKISDFGLAVVDGPKNKNHKLSGTVGYVAPEYLLNGQLTEKSDVYAFGVVLLELLLGKKPV

SEQ ID NO: 37805 - protein, 279 aa, Arabidopsis thaliana
  peptide (1)..(279): Ceres Seq. ID no. 12324672
  misc_feature (80)..(278): Pfam Name: Protein kinase domain Pfam Description: Protein kinase domain
  misc_feature (190)..(279): Homolog of NCBI NO: 7434336 NR Description: hypothetical protein F10N7.190 - Arabidopsis
  misc_feature (36)..(279): Homolog of NCBI NO: 34910468 NR Description: putative protein kinase [Oryza sativa (japonica
  misc_feature (167)..(279): Homolog of NCBI NO: 29367521 NR Description: protein kinase-like protein
  misc_feature (60)..(279): Homolog of NCBI NO: 11358842 NR Description: serine/threonine-specific protein kinase-like
  misc_feature (190)..(279): Homolog of NCBI NO: 30689231 NR Description: protein kinase family [Arabidopsis thaliana]
  misc_feature (1)..(137): Homolog of NCBI NO: 30689231 NR Description: protein kinase family [Arabidopsis thaliana]
  misc_feature (1)..(279): Homolog of NCBI NO: 15220195 NR Description: putative protein kinase; protein id: At1g80640.1
  misc_feature (62)..(279): Homolog of NCBI NO: 11259774 NR Description: ser/thr specific protein kinase-like protein -
  misc_feature (62)..(279): Homolog of NCBI NO: 11358833 NR Description: ser/thr specific protein kinase-like protein -
  misc_feature (1)..(279): Homolog of NCBI NO: 30683447 NR Description: protein kinase family [Arabidopsis thaliana]
MRLVISLAATFSLVGIILLCSLLYWFCHRRRNLKSSGCGCSGITFLNRFSRSKTLDKRTTKQGTVSLIDYNILEEGTSGFKESNILGQGGFGCVYSATLENNISAAVKKLDCANEDAAKEFKSEVEILSKLQHPNIISLLGYSTNDKARFIVYELMPNVSLESHLHGSSRGSAITWPMRMKIALDVTRGLEYLHEHCHPAIIHRDLKSSNILLDSNFNAKISDFGLAVVDGPKNKNHKLSGTVGYVAPEYLLNGQLTEKSDVYAFGVVLLELLLGKKPV

SEQ ID NO: 37806 - DNA, 663 bp, Arabidopsis thaliana; identical to SEQ ID NO: 26994
  misc_feature (1)..(663): Ceres Seq. ID no. 12323564
  misc_feature: MA Experiment ID: 108569 Result: Down-regulated in Transcription
  misc_feature: MA Experiment 108569 PARAMETER Experiment Name: At_0.001%_MeJA__cDNA_P Parameter: Timepoint (hr) Value: 6
  misc_feature: MA Experiment 108569 PARAMETER Experiment Name: At_0.001%_MeJA__cDNA_P Parameter: Tissue Value: Aerial
  misc_feature: MA Experiment 108569 PARAMETER Experiment Name: At_0.001%_MeJA__cDNA_P Parameter: Treatment Value: 0.001% MeJA vs. No Treatment
  misc_feature: MA Experiment ID: 20000087 Result: Up-regulated in Transcription
  misc_feature: MA Experiment 20000087 PARAMETER Experiment Name: At_100uM_ABA_Mutants_cDNA_P Parameter: Plant Line Value: WS
  misc_feature: MA Experiment 20000087 PARAMETER Experiment Name: At_100uM_ABA_Mutants_cDNA_P Parameter: Timepoint (hr) Value: 6
  misc_feature: MA Experiment 20000087 PARAMETER Experiment Name: At_100uM_ABA_Mutants_cDNA_P Parameter: Tissue Value: Aerial
  misc_feature: MA Experiment 20000087 PARAMETER Experiment Name: At_100uM_ABA_Mutants_cDNA_P Parameter: Treatment Value: 100uM ABA vs. No Treatment
  misc_feature: MA Experiment ID: 20000111 Result: Up-regulated in Transcription
  misc_feature: MA Experiment 20000111 PARAMETER Experiment Name: At_42deg_Heat_cDNA_P Parameter: Temperature (deg C) Value: 42 vs. 22
  misc_feature: MA Experiment 20000111 PARAMETER Experiment Name: At_42deg_Heat_cDNA_P Parameter: Timepoint (hr) Value: 6
  misc_feature: MA Experiment 20000111 PARAMETER Experiment Name: At_42deg_Heat_cDNA_P Parameter: Tissue Value: Aerial
  misc_feature: MA Experiment ID: 20000113 Result: Up-regulated in Transcription
  misc_feature: MA Experiment 20000113 PARAMETER Experiment Name: At_42deg_Heat_cDNA_P Parameter: Temperature (deg C) Value: 42 vs. 22
  misc_feature: MA Experiment 20000113 PARAMETER Experiment Name: At_42deg_Heat_cDNA_P Parameter: Timepoint (hr) Value: 8
  misc_feature: MA Experiment 20000113 PARAMETER Experiment Name: At_42deg_Heat_cDNA_P Parameter: Tissue Value: Aerial
  misc_feature: MA Experiment ID: 20000496 Result: Up-regulated in Transcription
  misc_feature: MA Experiment 20000496 PARAMETER Experiment Name: At_Guard_Cells_P Parameter: Harvest Date Value: 7/19/2002
  misc_feature: MA Experiment 20000496 PARAMETER Experiment Name: At_Guard_Cells_P Parameter: Organism Value: Canola
  misc_feature: MA Experiment 20000496 PARAMETER Experiment Name: At_Guard_Cells_P Parameter: Tissue Value: Guard Cells vs. Leaves

SEQ ID NO: 37807 - protein, 115 aa, Arabidopsis thaliana; identical to SEQ ID NO: 26995
  peptide (1)..(115): Ceres Seq. ID no. 12323565
  misc_feature (1)..(111): Homolog of NCBI NO: 21358275 NR Description: CG9922-PA [Drosophila melanogaster]
  misc_feature (1)..(105): Homolog of NCBI NO: 6841494 NR Description: HSPC136 [Homo sapiens]
  misc_feature (1)..(105): Homolog of NCBI NO: 3329429 NR Description: huntingtin interacting protein HYPK [Homo sapiens]
  misc_feature (1)..(105): Homolog of NCBI NO: 27734984 NR Description: Huntingtin interacting protein K; hypothetical
  misc_feature (1)..(105): Homolog of NCBI NO: 34856780 NR Description: similar to RIKEN cDNA 2310003F16 [Rattus
  misc_feature (1)..(105): Homolog of NCBI NO: 27229055 NR Description: RIKEN cDNA 2310003F16 [Mus musculus]
  misc_feature (1)..(105): Homolog of NCBI NO: 7020527 NR Description: unnamed protein product [Homo sapiens]
  misc_feature (1)..(115): Homolog of NCBI NO: 18397632 NR Description: expressed protein
  misc_feature (1)..(105): Homolog of NCBI NO: 3329429 NR Description: huntingtin interacting protein HYPK [Homo sapiens]
  misc_feature (1)..(105): Homolog of NCBI NO: 27734984 NR Description: Huntingtin interacting protein K; hypothetical
  misc_feature (1)..(105): Homolog of NCBI NO: 34856780 NR Description: similar to RIKEN cDNA 2310003F16 [Rattus
  misc_feature (1)..(105): Homolog of NCBI NO: 27229055 NR Description: RIKEN cDNA 2310003F16 [Mus musculus]
  misc_feature (1)..(105): Homolog of NCBI NO: 7020527 NR Description: unnamed protein product [Homo sapiens]
  misc_feature (1)..(115): Homolog of NCBI NO: 18397632 NR Description: expressed protein
  misc_feature (1)..(111): Homolog of NCBI NO: 21358275 NR Description: CG9922-PA [Drosophila melanogaster]
  misc_feature (1)..(105): Homolog of NCBI NO: 6841494 NR Description: HSPC136 [Homo sapiens]

SEQ ID NO: 37808 - protein, 70 aa, Arabidopsis thaliana; identical to SEQ ID NO: 26996
  peptide (1)..(70): Ceres Seq. ID no. 12323566
  misc_feature (1)..(66): Homolog of NCBI NO: 21358275 NR Description: CG9922-PA [Drosophila melanogaster]
  misc_feature (1)..(60): Homolog of NCBI NO: 6841494 NR Description: HSPC136 [Homo sapiens]
  misc_feature (1)..(60): Homolog of NCBI NO: 3329429 NR Description: huntingtin interacting protein HYPK [Homo sapiens]
  misc_feature (1)..(60): Homolog of NCBI NO: 27734984 NR Description: Huntingtin interacting protein K; hypothetical
  misc_feature (1)..(60): Homolog of NCBI NO: 34856780 NR Description: similar to RIKEN cDNA 2310003F16 [Rattus
  misc_feature (1)..(60): Homolog of NCBI NO: 27229055 NR Description: RIKEN cDNA 2310003F16 [Mus musculus]
  misc_feature (1)..(60): Homolog of NCBI NO: 7020527 NR Description: unnamed protein product [Homo sapiens]
  misc_feature (1)..(70): Homolog of NCBI NO: 18397632 NR Description: expressed protein
  misc_feature (1)..(66): Homolog of NCBI NO: 21358275 NR Description: CG9922-PA [Drosophila melanogaster]
  misc_feature (1)..(60): Homolog of NCBI NO: 6841494 NR Description: HSPC136 [Homo sapiens]
  misc_feature (1)..(60): Homolog of NCBI NO: 3329429 NR Description: huntingtin interacting protein HYPK [Homo sapiens]
  misc_feature (1)..(60): Homolog of NCBI NO: 27734984 NR Description: Huntingtin interacting protein K; hypothetical
  misc_feature (1)..(60): Homolog of NCBI NO: 34856780 NR Description: similar to RIKEN cDNA 2310003F16 [Rattus
  misc_feature (1)..(60): Homolog of NCBI NO: 27229055 NR Description: RIKEN cDNA 2310003F16 [Mus musculus]
  misc_feature (1)..(60): Homolog of NCBI NO: 7020527 NR Description: unnamed protein product [Homo sapiens]
  misc_feature (1)..(70): Homolog of NCBI NO: 18397632 NR Description: expressed protein

SEQ ID NO: 37809 - DNA, 1227 bp, Arabidopsis thaliana
  misc_feature (1)..(1227): Ceres Seq. ID no. 12340140
  misc_feature: MA Experiment ID: 108579 Result: Down-regulated in Transcription
  misc_feature: MA Experiment 108579 PARAMETER Experiment Name: At_4deg_Cold_cDNA_P Parameter: Temperature (deg C) Value: 4 vs. 22
  misc_feature: MA Experiment 108579 PARAMETER Experiment Name: At_4deg_Cold_cDNA_P Parameter: Timepoint (hr) Value: 6
  misc_feature: MA Experiment 108579 PARAMETER Experiment Name: At_4deg_Cold_cDNA_P Parameter: Tissue Value: Aerial
  misc_feature: MA Experiment ID: 20000794 Result: Up-regulated in Transcription
  misc_feature: MA Experiment 20000794 PARAMETER Experiment Name: At_Petals_P Parameter: Age (day) Value: 23-25 days
  misc_feature: MA Experiment 20000794 PARAMETER Experiment Name: At_Petals_P Parameter: Plant Line Value: WS
  misc_feature: MA Experiment 20000794 PARAMETER Experiment Name: At_Petals_P Parameter: Tissue Value: Petals vs. Whole plant
aagggttatattctcaaggaacccattggcgtagttggcatgattactccatggaactatccgttattgatggctgtctggaaagtcgctccttcacttgctgctgggtgcacggctatactgaaaccttcagagttggcctccctgacatgtttggagctcgctgatatttgccgcgaggtgggtctaccacctggtgttcttaatattctgactggtttaggaactgaagcaggtgctccactggcatcgcatccacatgttgacaagattgtattcactggaagcacaacaactggaagcagcattatgacttccgctgccaaattggtgaaaccagtttccttggagcttgggggtaaaagccctatcattgtctttgatgatgtcgatattgataaagctatggaatggactatgtttggttgtttctggacgaatgggcagatttgtagtgccacatctcgacttcttgtgcatgaaaggattgctgacgagtttttggacaagctggtaaagtggaccaagaacattaagatttcagatccttttgaagaaggctgtaggcttggtcctgttgtcagtaaaggacagtacgagagagttctaaagtttgtctcaaacgctaggaatgaaggtgcaactgttctttgtggaggagttcgtcctgagcatttaaagaagggatactttgttgaacctgcgattgtttcaaatgtgactacttcaatggaaatctggagagaggaagtctttggtcctgctctgtgtgtgaaaacattctccaccgaggatgaggcaattcagcttgcaaatgactctcaatatggattagcaggcgcagtattatcaaatgatctggagcggtgtgatcgtgttagtaaggctttccaggcgggaatagtgtgggtcaactgctctcagccatgcttctgccaagctccatggggtggaaccaaacgcagtggatttggccgtgaattgggagaatggggacttgagaactacttgagtgtgaagcaggtgactcagtatatctctgatgaaccatggggatggtacaaacctccttccaagctctgagacaaacactagttcctgatatttccttaaaacatgtactcatgagaatataccaataaagcaagagacccttctgtaagagaaatggtattgctactttaaattcttgaaaaaaatgaaaaataagatgagatgatatttctt

SEQ ID NO: 37810 - protein, 360 aa, Arabidopsis thaliana
  peptide (1)..(360): Ceres Seq. ID no. 12340141
  misc_feature (1)..(357): Homolog of NCBI NO: 24429929 NR Description: betaine aldehyde dehydrogenase [Spinacia oleracea]
  misc_feature (1)..(357): Homolog of NCBI NO: 118492 NR Description: Betaine-aldehyde dehydrogenase, chloroplast
  misc_feature (1)..(357): Homolog of NCBI NO: 2811031 NR Description: Betaine-aldehyde dehydrogenase, chloroplast
  misc_feature (1)..(357): Homolog of NCBI NO: 17936 NR Description: betaine aldehyd dehydrogenase [Beta vulgaris]
  misc_feature (1)..(357): Homolog of NCBI NO: 118490 NR Description: Betaine-aldehyde dehydrogenase, chloroplast
  misc_feature (1)..(357): Homolog of NCBI NO: 20135570 NR Description: betaine aldehyde dehydrogenase BADH2 [Atriplex
  misc_feature (1)..(360): Homolog of NCBI NO: 15131692 NR Description: putative aminoaldehyde dehydrogenase [Pisum
  misc_feature (1)..(358): Homolog of NCBI NO: 18410730 NR Description: betaine aldehyde dehydrogenase, putative
  misc_feature (1)..(357): Homolog of NCBI NO: 11251896 NR Description: betaine-aldehyde dehydrogenase (EC 1.2.1.8)
  misc_feature (1)..(360): Homolog of NCBI NO: 15228346 NR Description: betaine aldehyde dehydrogenase-like protein
KGYILKEPIGVVGMITPWNYPLLMAVWKVAPSLAAGCTAILKPSELASLTCLELADICREVGLPPGVLNILTGLGTEAGAPLASHPHVDKIVFTGSTTTGSSIMTSAAKLVKPVSLELGGKSPIIVFDDVDIDKAMEWTMFGCFWTNGQICSATSRLLVHERIADEFLDKLVKWTKNIKISDPFEEGCRLGPVVSKGQYERVLKFVSNARNEGATVLCGGVRPEHLKKGYFVEPAIVSNVTTSMEIWREEVFGPALCVKTFSTEDEAIQLANDSQYGLAGAVLSNDLERCDRVSKAFQAGIVWVNCSQPCFCQAPWGGTKRSGFGRELGEWGLENYLSVKQVTQYISDEPWGWYKPPSKL

SEQ ID NO: 37811 - protein, 347 aa, Arabidopsis thaliana
  peptide (1)..(347): Ceres Seq. ID no. 12340142
  misc_feature (1)..(344): Homolog of NCBI NO: 24429929 NR Description: betaine aldehyde dehydrogenase [Spinacia oleracea]
  misc_feature (1)..(344): Homolog of NCBI NO: 118492 NR Description: Betaine-aldehyde dehydrogenase, chloroplast
  misc_feature (1)..(344): Homolog of NCBI NO: 2811031 NR Description: Betaine-aldehyde dehydrogenase, chloroplast
  misc_feature (1)..(344): Homolog of NCBI NO: 17936 NR Description: betaine aldehyd dehydrogenase [Beta vulgaris]
  misc_feature (1)..(344): Homolog of NCBI NO: 118490 NR Description: Betaine-aldehyde dehydrogenase, chloroplast
  misc_feature (1)..(344): Homolog of NCBI NO: 20135570 NR Description: betaine aldehyde dehydrogenase BADH2 [Atriplex
  misc_feature (1)..(347): Homolog of NCBI NO: 15131692 NR Description: putative aminoaldehyde dehydrogenase [Pisum
  misc_feature (1)..(345): Homolog of NCBI NO: 18410730 NR Description: betaine aldehyde dehydrogenase, putative
  misc_feature (1)..(344): Homolog of NCBI NO: 11251896 NR Description: betaine-aldehyde dehydrogenase (EC 1.2.1.8)
  misc_feature (1)..(347): Homolog of NCBI NO: 15228346 NR Description: betaine aldehyde dehydrogenase-like protein
MITPWNYPLLMAVWKVAPSLAAGCTAILKPSELASLTCLELADICREVGLPPGVLNILTGLGTEAGAPLASHPHVDKIVFTGSTTTGSSIMTSAAKLVKPVSLELGGKSPIIVFDDVDIDKAMEWTMFGCFWTNGQICSATSRLLVHERIADEFLDKLVKWTKNIKISDPFEEGCRLGPVVSKGQYERVLKFVSNARNEGATVLCGGVRPEHLKKGYFVEPAIVSNVTTSMEIWREEVFGPALCVKTFSTEDEAIQLANDSQYGLAGAVLSNDLERCDRVSKAFQAGIVWVNCSQPCFCQAPWGGTKRSGFGRELGEWGLENYLSVKQVTQYISDEPWGWYKPPSKL

SEQ ID NO: 37812 - protein, 337 aa, Arabidopsis thaliana
  peptide (1)..(337): Ceres Seq. ID no. 12340143
  misc_feature (1)..(334): Homolog of NCBI NO: 24429929 NR Description: betaine aldehyde dehydrogenase [Spinacia oleracea]
  misc_feature (1)..(334): Homolog of NCBI NO: 118492 NR Description: Betaine-aldehyde dehydrogenase, chloroplast
  misc_feature (1)..(334): Homolog of NCBI NO: 2811031 NR Description: Betaine-aldehyde dehydrogenase, chloroplast
  misc_feature (1)..(334): Homolog of NCBI NO: 17936 NR Description: betaine aldehyd dehydrogenase [Beta vulgaris]
  misc_feature (1)..(334): Homolog of NCBI NO: 118490 NR Description: Betaine-aldehyde dehydrogenase, chloroplast
  misc_feature (1)..(334): Homolog of NCBI NO: 20135570 NR Description: betaine aldehyde dehydrogenase BADH2 [Atriplex
  misc_feature (1)..(337): Homolog of NCBI NO: 15131692 NR Description: putative aminoaldehyde dehydrogenase [Pisum
  misc_feature (1)..(335): Homolog of NCBI NO: 18410730 NR Description: betaine aldehyde dehydrogenase, putative
  misc_feature (1)..(334): Homolog of NCBI NO: 11251896 NR Description: betaine-aldehyde dehydrogenase (EC 1.2.1.8)
  misc_feature (1)..(337): Homolog of NCBI NO: 15228346 NR Description: betaine aldehyde dehydrogenase-like protein
MAVWKVAPSLAAGCTAILKPSELASLTCLELADICREVGLPPGVLNILTGLGTEAGAPLASHPHVDKIVFTGSTTTGSSIMTSAAKLVKPVSLELGGKSPIIVFDDVDIDKAMEWTMFGCFWTNGQICSATSRLLVHERIADEFLDKLVKWTKNIKISDPFEEGCRLGPVVSKGQYERVLKFVSNARNEGATVLCGGVRPEHLKKGYFVEPAIVSNVTTSMEIWREEVFGPALCVKTFSTEDEAIQLANDSQYGLAGAVLSNDLERCDRVSKAFQAGIVWVNCSQPCFCQAPWGGTKRSGFGRELGEWGLENYLSVKQVTQYISDEPWGWYKPPSKL

SEQ ID NO: 37813 - DNA, 1063 bp, Arabidopsis thaliana
  misc_feature (1)..(1063): Ceres Seq. ID no. 12327180
  misc_feature: MA Experiment ID: 108434 Result: Up-regulated in Transcription
  misc_feature: MA Experiment 108434 PARAMETER Experiment Name: At_Root_Tips_cDNA_P Parameter: Tissue Value: Root Tips
  misc_feature: MA Experiment ID: 108488 Result: Down-regulated in Transcription
  misc_feature: MA Experiment ID: 108489 Result: Up-regulated in Transcription
  misc_feature: MA Experiment ID: 108573 Result: Up-regulated in Transcription
  misc_feature: MA Experiment 108573 PARAMETER Experiment Name: At_Drought_cDNA_P Parameter: Timepoint (hr) Value: 6
  misc_feature: MA Experiment 108573 PARAMETER Experiment Name: At_Drought_cDNA_P Parameter: Tissue Value: Aerial
  misc_feature: MA Experiment 108573 PARAMETER Experiment Name: At_Drought_cDNA_P Parameter: Treatment Value: Drought vs. No Drought
  misc_feature: MA Experiment ID: 108579 Result: Down-regulated in Transcription
  misc_feature: MA Experiment 108579 PARAMETER Experiment Name: At_4deg_Cold_cDNA_P Parameter: Temperature (deg C) Value: 4 vs. 22
  misc_feature: MA Experiment 108579 PARAMETER Experiment Name: At_4deg_Cold_cDNA_P Parameter: Timepoint (hr) Value: 6
  misc_feature: MA Experiment 108579 PARAMETER Experiment Name: At_4deg_Cold_cDNA_P Parameter: Tissue Value: Aerial
  misc_feature: MA Experiment ID: 20000089 Result: Down-regulated in Transcription
aaaaattcaatctttctccgtcattcagatttcgaggagacagagacagagaaaaggattcgtgtaaggaaaagcttttaaacttctctttctatttatccctcctttcttctatctctctctctctcgatatcgatacaagagagatggagaaagaagaaggagaaacaacaacaacgatcggcgttgttccggcggcgccggcgaaattaccgactccgatatattctctgagcttttgggaggtcacggcagcttccggcgtcgttttagggtttattttgggtcttgtttgcgtttatctcacaatgcctcaatctgattacagctttctcaagctacctcgtaatctcgaagatcttcagattcttagagataatcttgagatatacacaagtgattacacagttcaagttcttgttgggtattgtctggtgtacgtttttatgcagacgtttatgattcctggaactgtgtttatgtctttgcttgctggtgctctctttggagttgtcaaaggaatggctcttgttgtctccactgcaacagctggtgcttcctcttgttatttcctctctaagctcattggtagacctttactcttatcgctttggcctgacaagctcgtattcttccaagatcaggttgcgagaagaaaagatcggttgctgaattatatgctgttcttgaggctaacaccaacattgcctaacactttcattaatgttgcttctccaattgttgatgttccttaccatatcttcttcctagctacattcatcggtctgattcctgctgcatttgtcactgtccgggctgggcttgctcttggagagctaaaatcattgggagatctctatgacttcagctccatggcgactctttgtctcattggtgtgctctctgtgactccaaccctaattggcaagaaacaagcatagaagatgaagatcaatacgatgatgatgatgatgaaaacagagcatttcaacagcctctttgtgtatatatcatgtagaatgttaagaacttaagatcaatcaatcataaaactctgttctct

SEQ ID NO: 37814 - protein, 312 aa, Arabidopsis thaliana
  peptide (1)..(312): Ceres Seq. ID no. 12327181
  misc_feature (75)..(216): Homolog of NCBI NO: 25407510 NR Description: hypothetical protein AT4g09580 [imported] -
  misc_feature (92)..(310): Homolog of NCBI NO: 22268065 NR Description: D7Ertd743e protein [Mus musculus]
  misc_feature (92)..(310): Homolog of NCBI NO: 34858940 NR Description: similar to D7Ertd743e protein [Rattus norvegicus]
  misc_feature (92)..(310): Homolog of NCBI NO: 20558053 NR Description: similar to KIAA0033 [Homo sapiens]
  misc_feature (92)..(310): Homolog of NCBI NO: 436224 NR Description: KIAA0033 [Homo sapiens]
  misc_feature (71)..(312): Homolog of NCBI NO: 28850296 NR Description: similar to Mus musculus (Mouse). Colon RCB-0549 cDNA, RIKEN full-length enriched library, clone:G430121L01 N-terminal nucleophile aminohydrolases (Ntn hydrolases) structure
  misc_feature (75)..(311): Homolog of NCBI NO: 30681121 NR Description: expressed protein [Arabidopsis thaliana]
  misc_feature (75)..(311): Homolog of NCBI NO: 18409951 NR Description: expressed protein
  misc_feature (49)..(312): Homolog of NCBI NO: 21593768 NR Description: unknown [Arabidopsis thaliana]
  misc_feature (49)..(312): Homolog of NCBI NO: 18414967 NR Description: expressed protein
KFNLSPSFRFRGDRDREKDSCKEKLLNFSFYLSLLSSISLSLDIDTREMEKEEGETTTTIGVVPAAPAKLPTPIYSLSFWEVTAASGVVLGFILGLVCVYLTMPQSDYSFLKLPRNLEDLQILRDNLEIYTSDYTVQVLVGYCLVYVFMQTFMIPGTVFMSLLAGALFGVVKGMALVVSTATAGASSCYFLSKLIGRPLLLSLWPDKLVFFQDQVARRKDRLLNYMLFLRLTPTLPNTFINVASPIVDVPYHIFFLATFIGLIPAAFVTVRAGLALGELKSLGDLYDFSSMATLCLIGVLSVTPTLIGKKQA

SEQ ID NO: 37815 - protein, 264 aa, Arabidopsis thaliana
  peptide (1)..(264): Ceres Seq. ID no. 12327182
  misc_feature (27)..(168): Homolog of NCBI NO: 25407510 NR Description: hypothetical protein AT4g09580 [imported] -
  misc_feature (44)..(262): Homolog of NCBI NO: 22268065 NR Description: D7Ertd743e protein [Mus musculus]
  misc_feature (44)..(262): Homolog of NCBI NO: 34858940 NR Description: similar to D7Ertd743e protein [Rattus norvegicus]
  misc_feature (44)..(262): Homolog of NCBI NO: 20558053 NR Description: similar to KIAA0033 [Homo sapiens]
  misc_feature (44)..(262): Homolog of NCBI NO: 436224 NR Description: KIAA0033 [Homo sapiens]
  misc_feature (23)..(264): Homolog of NCBI NO: 28850296 NR Description: similar to Mus musculus (Mouse). Colon RCB-0549 cDNA, RIKEN full-length enriched library, clone:G430121L01 N-terminal nucleophile aminohydrolases (Ntn hydrolases) structure
  misc_feature (27)..(263): Homolog of NCBI NO: 30681121 NR Description: expressed protein [Arabidopsis thaliana]
  misc_feature (27)..(263): Homolog of NCBI NO: 18409951 NR Description: expressed protein
  misc_feature (1)..(264): Homolog of NCBI NO: 21593768 NR Description: unknown [Arabidopsis thaliana]
  misc_feature (1)..(264): Homolog of NCBI NO: 18414967 NR Description: expressed protein
MEKEEGETTTTIGVVPAAPAKLPTPIYSLSFWEVTAASGVVLGFILGLVCVYLTMPQSDYSFLKLPRNLEDLQILRDNLEIYTSDYTVQVLVGYCLVYVFMQTFMIPGTVFMSLLAGALFGVVKGMALVVSTATAGASSCYFLSKLIGRPLLLSLWPDKLVFFQDQVARRKDRLLNYMLFLRLTPTLPNTFINVASPIVDVPYHIFFLATFIGLIPAAFVTVRAGLALGELKSLGDLYDFSSMATLCLIGVLSVTPTLIGKKQA

SEQ ID NO: 37816 - protein, 210 aa, Arabidopsis thaliana
  peptide (1)..(210): Ceres Seq. ID no. 12327183
  misc_feature (1)..(114): Homolog of NCBI NO: 25407510 NR Description: hypothetical protein AT4g09580 [imported] -
  misc_feature (1)..(208): Homolog of NCBI NO: 22268065 NR Description: D7Ertd743e protein [Mus musculus]
  misc_feature (1)..(208): Homolog of NCBI NO: 34858940 NR Description: similar to D7Ertd743e protein [Rattus norvegicus]
  misc_feature (1)..(208): Homolog of NCBI NO: 20558053 NR Description: similar to KIAA0033 [Homo sapiens]
  misc_feature (1)..(208): Homolog of NCBI NO: 436224 NR Description: KIAA0033 [Homo sapiens]
  misc_feature (1)..(210): Homolog of NCBI NO: 28850296 NR Description: similar to Mus musculus (Mouse). Colon RCB-0549 cDNA, RIKEN full-length enriched library, clone:G430121L01 N-terminal nucleophile aminohydrolases (Ntn hydrolases) structure
  misc_feature (1)..(209): Homolog of NCBI NO: 30681121 NR Description: expressed protein [Arabidopsis thaliana]
  misc_feature (1)..(209): Homolog of NCBI NO: 18409951 NR Description: expressed protein
  misc_feature (1)..(210): Homolog of NCBI NO: 21593768 NR Description: unknown [Arabidopsis thaliana]
  misc_feature (1)..(210): Homolog of NCBI NO: 18414967 NR Description: expressed protein
MPQSDYSFLKLPRNLEDLQILRDNLEIYTSDYTVQVLVGYCLVYVFMQTFMIPGTVFMSLLAGALFGVVKGMALVVSTATAGASSCYFLSKLIGRPLLLSLWPDKLVFFQDQVARRKDRLLNYMLFLRLTPTLPNTFINVASPIVDVPYHIFFLATFIGLIPAAFVTVRAGLALGELKSLGDLYDFSSMATLCLIGVLSVTPTLIGKKQA

SEQ ID NO: 37817 - DNA, 1100 bp, Arabidopsis thaliana
  misc_feature (1)..(1100): Ceres Seq. ID no. 12327326
  misc_feature: MA Experiment ID: 108434 Result: Up-regulated in Transcription
  misc_feature: MA Experiment 108434 PARAMETER Experiment Name: At_Root_Tips_cDNA_P Parameter: Tissue Value: Root Tips
  misc_feature: MA Experiment ID: 108461 Result: Down-regulated in Transcription
  misc_feature: MA Experiment 108461 PARAMETER Experiment Name: At_Germinating_Seeds_cDNA_P Parameter: Age (day) Value: 1 vs. 0
  misc_feature: MA Experiment 108461 PARAMETER Experiment Name: At_Germinating_Seeds_cDNA_P Parameter: Tissue Value: Germinating Seeds
  misc_feature: MA Experiment ID: 108462 Result: Down-regulated in Transcription
  misc_feature: MA Experiment 108462 PARAMETER Experiment Name: At_Germinating_Seeds_cDNA_P Parameter: Age (day) Value: 2 vs. 0
  misc_feature: MA Experiment 108462 PARAMETER Experiment Name: At_Germinating_Seeds_cDNA_P Parameter: Tissue Value: Germinating Seeds
  misc_feature: MA Experiment ID: 20000180 Result: Down-regulated in Transcription
  misc_feature: MA Experiment 20000180 PARAMETER Experiment Name: At_Germinating_Seeds_P Parameter: Age (hr) Value: 24 vs. 0
  misc_feature: MA Experiment 20000180 PARAMETER Experiment Name: At_Germinating_Seeds_P Parameter: Tissue Value: Germinating Seeds
  misc_feature: MA Experiment ID: 20000184 Result: Down-regulated in Transcription
  misc_feature: MA Experiment 20000184 PARAMETER Experiment Name: At_Shoots__P Parameter: Age (day) Value: 7
  misc_feature: MA Experiment 20000184 PARAMETER Experiment Name: At_Shoots__P Parameter: Tissue Value: Shoots vs. Whole Plant
  misc_feature: MA Experiment ID: 20000227 Result: Up-regulated in Transcription
  misc_feature: MA Experiment 20000227 PARAMETER Experiment Name: At_Root-Tips-vs-Tops_P Parameter: Tissue Value: Root Tips vs. Root Tops
  misc_feature: MA Experiment ID: 20001911 Result: Up-regulated in Transcription
  misc_feature: MA Experiment 20001911 PARAMETER Experiment Name: At_Drought_Reproduction_P Parameter: Age (day) Value: 40
  misc_feature: MA Experiment 20001911 PARAMETER Experiment Name: At_Drought_Reproduction_P Parameter: Organism Value: A. thaliana
  misc_feature: MA Experiment 20001911 PARAMETER Experiment Name: At_Drought_Reproduction_P Parameter: Plant Line Value: WS
  misc_feature: MA Experiment 20001911 PARAMETER Experiment Name: At_Drought_Reproduction_P Parameter: Timepoint (day) Value: 10
  misc_feature: MA Experiment 20001911 PARAMETER Experiment Name: At_Drought_Reproduction_P Parameter: Tissue Value: Flowers
  misc_feature: MA Experiment 20001911 PARAMETER Experiment Name: At_Drought_Reproduction_P Parameter: Treatment Value: Drought vs. No Drought
atttcattgtccatcaccaatcgccaaaaccgcagaaaggtctgacctttggattagcgtgagagtttcacaatgaaagatagagaaaacgatggaaatcttgagagcagaatcttcgtgggagggttatcgtgggatgtcacagagagacagcttgagagtacctttgaccgctacgggaaaatcactgagtgtcagattatggtggggagagatactgggcgtccacgtggttttgggtttattacattcactgatcgcagaggagctgatgatgcaattaagcacatgcatggaagggagttgggcaataaggtcatctccgtgaacaaagctgagcccaaagttggtggagaagatgtagaccaattaaagaaaggtggaggctattcatctcgagggaagggaaccgaggatgagtgctttaaatgcagacgccctggtcattgggctcgagattgcccatcaactggtgacgatcgagaacggttcagagttccccttgcgatgcgctctcgtattggagacatagatggacaccgagatcgctatggagatcgtgatctggagagggagcgggagcgggagcgtgagtttgaccgctacatggatggacgccgtgaccgagatgggggacgatatagctacagggaccgcttcgacagtggagacaagtatgagcctcgtgatcactatccatttgagagatacgcaccaccaggagaccgttttgtgagtgataggtatgggatgcctgaacatcatcttgagaatgaatatcgcgggagagagagaagctatgacagggacagatacgcaagggatacaagtgacagatatggagatatgggaccgatacgcgatgagggaagaccctacagaagcagaccaggtccttatgaccgtcctagccgtcctggaggcagaccttcatcatatgaacgttggtagtttgttttggttaaccagatgtcaatgcttatgctttgggatttaggtctatatcagagatagaactcgaactcgagatctctgttatgcttttttgtcgaatattatgattcttcatcgcagtaaaaaagttatgttcttatgatcct

SEQ ID NO: 37818 - protein, 292 aa, Arabidopsis thaliana
  peptide (1)..(292): Ceres Seq. ID no. 12327327
  misc_feature (14)..(85): Pfam Name: RNA recognition motif. (a.k.a. RRM, RBD, or RNP domain) Pfam Description: RNA recognition motif. (a.k.a. RRM, RBD, or RNP
  misc_feature (10)..(112): Homolog of NCBI NO: 544416 NR Description: Glycine-rich RNA-binding protein 10
  misc_feature (11)..(132): Homolog of NCBI NO: 15982739 NR Description: AT3g26420/F20C19_14 [Arabidopsis thaliana]
  misc_feature (13)..(178): Homolog of NCBI NO: 12659074 NR Description: RNA-binding protein [Triticum aestivum]
  misc_feature (11)..(195): Homolog of NCBI NO: 40714682 NR Description: putative RNA binding protein
  misc_feature (11)..(219): Homolog of NCBI NO: 15231557 NR Description: glycine-rich RNA-binding protein
  misc_feature (13)..(287): Homolog of NCBI NO: 33146923 NR Description: glycine-rich RNA-binding protein-like
  misc_feature (8)..(289): Homolog of NCBI NO: 31712074 NR Description: putative RNA-binding protein
  misc_feature (12)..(287): Homolog of NCBI NO: 15237666 NR Description: glycine-rich RNA-binding protein
  misc_feature (111)..(292): Homolog of NCBI NO: 21954079 NR Description: putative RNA binding protein [Arabidopsis
  misc_feature (1)..(292): Homolog of NCBI NO: 18406831 NR Description: glycine-rich RNA-binding protein
MKDRENDGNLESRIFVGGLSWDVTERQLESTFDRYGKITECQIMVGRDTGRPRGFGFITFTDRRGADDAIKHMHGRELGNKVISVNKAEPKVGGEDVDQLKKGGGYSSRGKGTEDECFKCRRPGHWARDCPSTGDDRERFRVPLAMRSRIGDIDGHRDRYGDRDLEREREREREFDRYMDGRRDRDGGRYSYRDRFDSGDKYEPRDHYPFERYAPPGDRFVSDRYGMPEHHLENEYRGRERSYDRDRYARDTSDRYGDMGPIRDEGRPYRSRPGPYDRPSRPGGRPSSYERW

SEQ ID NO: 37819 - protein, 249 aa, Arabidopsis thaliana
  peptide (1)..(249): Ceres Seq. ID no. 12327328
  misc_feature (72)..(89): Pfam Name: Zinc knuckle Pfam Description: Zinc knuckle
  misc_feature (1)..(69): Homolog of NCBI NO: 544416 NR Description: Glycine-rich RNA-binding protein 10
  misc_feature (1)..(89): Homolog of NCBI NO: 15982739 NR Description: AT3g26420/F20C19_14 [Arabidopsis thaliana]
  misc_feature (1)..(135): Homolog of NCBI NO: 12659074 NR Description: RNA-binding protein [Triticum aestivum]
  misc_feature (1)..(152): Homolog of NCBI NO: 40714682 NR Description: putative RNA binding protein
  misc_feature (1)..(176): Homolog of NCBI NO: 15231557 NR Description: glycine-rich RNA-binding protein
  misc_feature (1)..(244): Homolog of NCBI NO: 33146923 NR Description: glycine-rich RNA-binding protein-like
  misc_feature (1)..(246): Homolog of NCBI NO: 31712074 NR Description: putative RNA-binding protein
  misc_feature (1)..(244): Homolog of NCBI NO: 15237666 NR Description: glycine-rich RNA-binding protein
  misc_feature (68)..(249): Homolog of NCBI NO: 21954079 NR Description: putative RNA binding protein [Arabidopsis
  misc_feature (1)..(249): Homolog of NCBI NO: 18406831 NR Description: glycine-rich RNA-binding protein
MVGRDTGRPRGFGFITFTDRRGADDAIKHMHGRELGNKVISVNKAEPKVGGEDVDQLKKGGGYSSRGKGTEDECFKCRRPGHWARDCPSTGDDRERFRVPLAMRSRIGDIDGHRDRYGDRDLEREREREREFDRYMDGRRDRDGGRYSYRDRFDSGDKYEPRDHYPFERYAPPGDRFVSDRYGMPEHHLENEYRGRERSYDRDRYARDTSDRYGDMGPIRDEGRPYRSRPGPYDRPSRPGGRPSSYERW

SEQ ID NO: 37820 - protein, 220 aa, Arabidopsis thaliana
  peptide (1)..(220): Ceres Seq. ID no. 12327329
  misc_feature (43)..(60): Pfam Name: Zinc knuckle Pfam Description: Zinc knuckle
  misc_feature (1)..(40): Homolog of NCBI NO: 544416 NR Description: Glycine-rich RNA-binding protein 10
  misc_feature (1)..(60): Homolog of NCBI NO: 15982739 NR Description: AT3g26420/F20C19_14 [Arabidopsis thaliana]
  misc_feature (1)..(106): Homolog of NCBI NO: 12659074 NR Description: RNA-binding protein [Triticum aestivum]
  misc_feature (1)..(123): Homolog of NCBI NO: 40714682 NR Description: putative RNA binding protein
  misc_feature (1)..(147): Homolog of NCBI NO: 15231557 NR Description: glycine-rich RNA-binding protein
  misc_feature (1)..(215): Homolog of NCBI NO: 33146923 NR Description: glycine-rich RNA-binding protein-like
  misc_feature (1)..(217): Homolog of NCBI NO: 31712074 NR Description: putative RNA-binding protein
  misc_feature (1)..(215): Homolog of NCBI NO: 15237666 NR Description: glycine-rich RNA-binding protein
  misc_feature (39)..(220): Homolog of NCBI NO: 21954079 NR Description: putative RNA binding protein [Arabidopsis
  misc_feature (1)..(220): Homolog of NCBI NO: 18406831 NR Description: glycine-rich RNA-binding protein
MHGRELGNKVISVNKAEPKVGGEDVDQLKKGGGYSSRGKGTEDECFKCRRPGHWARDCPSTGDDRERFRVPLAMRSRIGDIDGHRDRYGDRDLEREREREREFDRYMDGRRDRDGGRYSYRDRFDSGDKYEPRDHYPFERYAPPGDRFVSDRYGMPEHHLENEYRGRERSYDRDRYARDTSDRYGDMGPIRDEGRPYRSRPGPYDRPSRPGGRPSSYERW

SEQ ID NO: 37821 - DNA, 1369 bp, Arabidopsis thaliana
  misc_feature (1)..(1369): Ceres Seq. ID no. 12338575
  misc_feature: MA Experiment ID: 108462 Result: Up-regulated in Transcription
  misc_feature: MA Experiment 108462 PARAMETER Experiment Name: At_Germinating_Seeds_cDNA_P Parameter: Age (day) Value: 2 vs. 0
  misc_feature: MA Experiment 108462 PARAMETER Experiment Name: At_Germinating_Seeds_cDNA_P Parameter: Tissue Value: Germinating Seeds
  misc_feature: MA Experiment ID: 108464 Result: Up-regulated in Transcription
  misc_feature: MA Experiment 108464 PARAMETER Experiment Name: At_Germinating_Seeds_cDNA_P Parameter: Age (day) Value: 4 vs. 0
  misc_feature: MA Experiment 108464 PARAMETER Experiment Name: At_Germinating_Seeds_cDNA_P Parameter: Tissue Value: Germinating Seeds
  misc_feature: MA Experiment ID: 108561 Result: Down-regulated in Transcription
  misc_feature: MA Experiment 108561 PARAMETER Experiment Name: At_100uM_ABA_cDNA_P Parameter: Timepoint (hr) Value: 6
  misc_feature: MA Experiment 108561 PARAMETER Experiment Name: At_100uM_ABA_cDNA_P Parameter: Tissue Value: Aerial
  misc_feature: MA Experiment 108561 PARAMETER Experiment Name: At_100uM_ABA_cDNA_P Parameter: Treatment Value: 100uM ABA vs. No Treatment
  misc_feature: MA Experiment ID: 108576 Result: Down-regulated in Transcription
  misc_feature: MA Experiment 108576 PARAMETER Experiment Name: At_42deg_Heat_cDNA_P Parameter: Temperature (deg C) Value: 42 vs. 22
  misc_feature: MA Experiment 108576 PARAMETER Experiment Name: At_42deg_Heat_cDNA_P Parameter: Timepoint (hr) Value: 1
  misc_feature: MA Experiment 108576 PARAMETER Experiment Name: At_42deg_Heat_cDNA_P Parameter: Tissue Value: Aerial
  misc_feature: MA Experiment ID: 108577 Result: Down-regulated in Transcription
  misc_feature: MA Experiment 108577 PARAMETER Experiment Name: At_42deg_Heat_cDNA_P Parameter: Temperature (deg C) Value: 42 vs. 22
  misc_feature: MA Experiment 108577 PARAMETER Experiment Name: At_42deg_Heat_cDNA_P Parameter: Timepoint (hr) Value: 6
  misc_feature: MA Experiment 108577 PARAMETER Experiment Name: At_42deg_Heat_cDNA_P Parameter: Tissue Value: Aerial
  misc_feature: MA Experiment ID: 108585 Result: Down-regulated in Transcription
  misc_feature: MA Experiment 108585 PARAMETER Experiment Name: At_5mM_NaNP_cDNA_P Parameter: Timepoint (hr) Value: 6
  misc_feature: MA Experiment 108585 PARAMETER Experiment Name: At_5mM_NaNP_cDNA_P Parameter: Tissue Value: Aerial
  misc_feature: MA Experiment 108585 PARAMETER Experiment Name: At_5mM_NaNP_cDNA_P Parameter: Treatment Value: null
  misc_feature: MA Experiment ID: 108595 Result: Down-regulated in Transcription
  misc_feature: MA Experiment 108595 PARAMETER Experiment Name: At_Ler-pi_Ovule_cDNA_P Parameter: Plant Line Value: null
  misc_feature: MA Experiment ID: 108668 Result: Down-regulated in Transcription
  misc_feature: MA Experiment 108668 PARAMETER Experiment Name: At_2mM_SA_cDNA_P Parameter: Plant Line Value: WS
  misc_feature: MA Experiment 108668 PARAMETER Experiment Name: At_2mM_SA_cDNA_P Parameter: Timepoint (hr) Value: 6
  misc_feature: MA Experiment 108668 PARAMETER Experiment Name: At_2mM_SA_cDNA_P Parameter: Treatment Value: 2mM SA vs. No Treatment
  misc_feature: MA Experiment ID: 20000069 Result: Down-regulated in Transcription
  misc_feature: MA Experiment 20000069 PARAMETER Experiment Name: At_100uM_ABA_Mutants_cDNA_P Parameter: Plant Line Value: CS23
  misc_feature: MA Experiment 20000069 PARAMETER Experiment Name: At_100uM_ABA_Mutants_cDNA_P Parameter: Timepoint (hr) Value: 6
  misc_feature: MA Experiment 20000069 PARAMETER Experiment Name: At_100uM_ABA_Mutants_cDNA_P Parameter: Tissue Value: Aerial
  misc_feature: MA Experiment 20000069 PARAMETER Experiment Name: At_100uM_ABA_Mutants_cDNA_P Parameter: Treatment Value: 100uM ABA vs. No Treatment
  misc_feature: MA Experiment ID: 20000070 Result: Down-regulated in Transcription
  misc_feature: MA Experiment 20000070 PARAMETER Experiment Name: At_100uM_ABA_Mutants_cDNA_P Parameter: Plant Line Value: CS24
  misc_feature: MA Experiment 20000070 PARAMETER Experiment Name: At_100uM_ABA_Mutants_cDNA_P Parameter: Timepoint (hr) Value: 6
  misc_feature: MA Experiment 20000070 PARAMETER Experiment Name: At_100uM_ABA_Mutants_cDNA_P Parameter: Tissue Value: Aerial
  misc_feature: MA Experiment 20000070 PARAMETER Experiment Name: At_100uM_ABA_Mutants_cDNA_P Parameter: Treatment Value: 100uM ABA vs. No Treatment
  misc_feature: MA Experiment ID: 20000071 Result: Down-regulated in Transcription
  misc_feature: MA Experiment 20000071 PARAMETER Experiment Name: At_100uM_ABA_Mutants_cDNA_P Parameter: Plant Line Value: CS8104
  misc_feature: MA Experiment 20000071 PARAMETER Experiment Name: At_100uM_ABA_Mutants_cDNA_P Parameter: Timepoint (hr) Value: 6
  misc_feature: MA Experiment 20000071 PARAMETER Experiment Name: At_100uM_ABA_Mutants_cDNA_P Parameter: Tissue Value: Aerial
  misc_feature: MA Experiment 20000071 PARAMETER Experiment Name: At_100uM_ABA_Mutants_cDNA_P Parameter: Treatment Value: 100uM ABA vs. No Treatment
  misc_feature: MA Experiment ID: 20000072 Result: Down-regulated in Transcription
  misc_feature: MA Experiment 20000072 PARAMETER Experiment Name: At_100uM_ABA_Mutants_cDNA_P Parameter: Plant Line Value: CS8105
  misc_feature: MA Experiment 20000072 PARAMETER Experiment Name: At_100uM_ABA_Mutants_cDNA_P Parameter: Timepoint (hr) Value: 6
  misc_feature: MA Experiment 20000072 PARAMETER Experiment Name: At_100uM_ABA_Mutants_cDNA_P Parameter: Tissue Value: Aerial
  misc_feature: MA Experiment 20000072 PARAMETER Experiment Name: At_100uM_ABA_Mutants_cDNA_P Parameter: Treatment Value: 100uM ABA vs. No Treatment
  misc_feature: MA Experiment ID: 20000086 Result: Down-regulated in Transcription
  misc_feature: MA Experiment 20000086 PARAMETER Experiment Name: At_100uM_ABA_Mutants_cDNA_P Parameter: Plant Line Value: CS22
  misc_feature: MA Experiment 20000086 PARAMETER Experiment Name: At_100uM_ABA_Mutants_cDNA_P Parameter: Timepoint (hr) Value: 6
  misc_feature: MA Experiment 20000086 PARAMETER Experiment Name: At_100uM_ABA_Mutants_cDNA_P Parameter: Tissue Value: Aerial
  misc_feature: MA Experiment 20000086 PARAMETER Experiment Name: At_100uM_ABA_Mutants_cDNA_P Parameter: Treatment Value: 100uM ABA vs. No Treatment
  misc_feature: MA Experiment ID: 20000087 Result: Down-regulated in Transcription
  misc_feature: MA Experiment 20000087 PARAMETER Experiment Name: At_100uM_ABA_Mutants_cDNA_P Parameter: Plant Line Value: WS
  misc_feature: MA Experiment 20000087 PARAMETER Experiment Name: At_100uM_ABA_Mutants_cDNA_P Parameter: Timepoint (hr) Value: 6
  misc_feature: MA Experiment 20000087 PARAMETER Experiment Name: At_100uM_ABA_Mutants_cDNA_P Parameter: Tissue Value: Aerial
  misc_feature: MA Experiment 20000087 PARAMETER Experiment Name: At_100uM_ABA_Mutants_cDNA_P Parameter: Treatment Value: 100uM ABA vs. No Treatment
  misc_feature: MA Experiment ID: 20000088 Result: Down-regulated in Transcription
  misc_feature: MA Experiment 20000088 PARAMETER Experiment Name: At_100uM_ABA_Mutants_cDNA_P Parameter: Plant Line Value: Landsberg
  misc_feature: MA Experiment 20000088 PARAMETER Experiment Name: At_100uM_ABA_Mutants_cDNA_P Parameter: Timepoint (hr) Value: 6
  misc_feature: MA Experiment 20000088 PARAMETER Experiment Name: At_100uM_ABA_Mutants_cDNA_P Parameter: Tissue Value: Aerial
  misc_feature: MA Experiment 20000088 PARAMETER Experiment Name: At_100uM_ABA_Mutants_cDNA_P Parameter: Treatment Value: 100uM ABA vs. No Treatment
  misc_feature: MA Experiment ID: 20000111 Result: Down-regulated in Transcription
  misc_feature: MA Experiment 20000111 PARAMETER Experiment Name: At_42deg_Heat_cDNA_P Parameter: Temperature (deg C) Value: 42 vs. 22
  misc_feature: MA Experiment 20000111 PARAMETER Experiment Name: At_42deg_Heat_cDNA_P Parameter: Timepoint (hr) Value: 6
  misc_feature: MA Experiment 20000111 PARAMETER Experiment Name: At_42deg_Heat_cDNA_P Parameter: Tissue Value: Aerial
  misc_feature: MA Experiment ID: 20000112 Result: Down-regulated in Transcription
  misc_feature: MA Experiment 20000112 PARAMETER Experiment Name: At_42deg_Heat_cDNA_P Parameter: Temperature (deg C) Value: 42 vs. 22
  misc_feature: MA Experiment 20000112 PARAMETER Experiment Name: At_42deg_Heat_cDNA_P Parameter: Timepoint (hr) Value: 2
  misc_feature: MA Experiment 20000112 PARAMETER Experiment Name: At_42deg_Heat_cDNA_P Parameter: Tissue Value: Aerial
  misc_feature: MA Experiment ID: 20000117 Result: Down-regulated in Transcription
  misc_feature: MA Experiment 20000117 PARAMETER Experiment Name: At_100uM_ABA_Mutants_cDNA_P Parameter: Plant Line Value: Columbia
  misc_feature: MA Experiment 20000117 PARAMETER Experiment Name: At_100uM_ABA_Mutants_cDNA_P Parameter: Timepoint (hr) Value: 6
  misc_feature: MA Experiment 20000117 PARAMETER Experiment Name: At_100uM_ABA_Mutants_cDNA_P Parameter: Tissue Value: Aerial
  misc_feature: MA Experiment 20000117 PARAMETER Experiment Name: At_100uM_ABA_Mutants_cDNA_P Parameter: Treatment Value: 100uM ABA vs. No Treatment
  misc_feature: MA Experiment ID: 20000144 Result: Down-regulated in Transcription
  misc_feature: MA Experiment 20000144 PARAMETER Experiment Name: At_42deg_Heat_cDNA_P Parameter: Temperature (deg C) Value: 42 vs. 22
  misc_feature: MA Experiment 20000144 PARAMETER Experiment Name: At_42deg_Heat_cDNA_P Parameter: Timepoint (hr) Value: 1
  misc_feature: MA Experiment 20000144 PARAMETER Experiment Name: At_42deg_Heat_cDNA_P Parameter: Tissue Value: Aerial
  misc_feature: MA Experiment ID: 20000171 Result: Down-regulated in Transcription
  misc_feature: MA Experiment 20000171 PARAMETER Experiment Name: At_42deg_Heat_P Parameter: Age (day) Value: 14
  misc_feature: MA Experiment 20000171 PARAMETER Experiment Name: At_42deg_Heat_P Parameter: Organism Value: A. thaliana
  misc_feature: MA Experiment 20000171 PARAMETER Experiment Name: At_42deg_Heat_P Parameter: Plant Line Value: WS
  misc_feature: MA Experiment 20000171 PARAMETER Experiment Name: At_42deg_Heat_P Parameter: Temperature (deg C) Value: 42 vs. 22
  misc_feature: MA Experiment 20000171 PARAMETER Experiment Name: At_42deg_Heat_P Parameter: Timepoint (hr) Value: 1
  misc_feature: MA Experiment 20000171 PARAMETER Experiment Name: At_42deg_Heat_P Parameter: Tissue Value: Aerial
  misc_feature: MA Experiment ID: 20000173 Result: Down-regulated in Transcription
  misc_feature: MA Experiment 20000173 PARAMETER Experiment Name: At_42deg_Heat_P Parameter: Age (day) Value: 14
  misc_feature: MA Experiment 20000173 PARAMETER Experiment Name: At_42deg_Heat_P Parameter: Organism Value: A. thaliana
  misc_feature: MA Experiment 20000173 PARAMETER Experiment Name: At_42deg_Heat_P Parameter: Plant Line Value: WS
  misc_feature: MA Experiment 20000173 PARAMETER Experiment Name: At_42deg_Heat_P Parameter: Temperature (deg C) Value: 42 vs. 22
  misc_feature: MA Experiment 20000173 PARAMETER Experiment Name: At_42deg_Heat_P Parameter: Timepoint (hr) Value: 6
  misc_feature: MA Experiment 20000173 PARAMETER Experiment Name: At_42deg_Heat_P Parameter: Tissue Value: Aerial
  misc_feature: MA Experiment ID: 20000179 Result: Up-regulated in Transcription
  misc_feature: MA Experiment 20000179 PARAMETER Experiment Name: At_Germinating_Seeds_P Parameter: Age (hr) Value: 6 vs. 0
  misc_feature: MA Experiment 20000179 PARAMETER Experiment Name: At_Germinating_Seeds_P Parameter: Tissue Value: Germinating Seeds
  misc_feature: MA Experiment ID: 20000180 Result: Up-regulated in Transcription
  misc_feature: MA Experiment 20000180 PARAMETER Experiment Name: At_Germinating_Seeds_P Parameter: Age (hr) Value: 24 vs. 0
  misc_feature: MA Experiment 20000180 PARAMETER Experiment Name: At_Germinating_Seeds_P Parameter: Tissue Value: Germinating Seeds
  misc_feature: MA Experiment ID: 20000182 Result: Down-regulated in Transcription
  misc_feature: MA Experiment 20000182 PARAMETER Experiment Name: At_2mM_SA_P Parameter: Age (day) Value: 14
  misc_feature: MA Experiment 20000182 PARAMETER Experiment Name: At_2mM_SA_P Parameter: Organism Value: A. thaliana
  misc_feature: MA Experiment 20000182 PARAMETER Experiment Name: At_2mM_SA_P Parameter: Plant Line Value: WS
  misc_feature: MA Experiment 20000182 PARAMETER Experiment Name: At_2mM_SA_P Parameter: Timepoint (hr) Value: 6
  misc_feature: MA Experiment 20000182 PARAMETER Experiment Name: At_2mM_SA_P Parameter: Tissue Value: Aerial
  misc_feature: MA Experiment 20000182 PARAMETER Experiment Name: At_2mM_SA_P Parameter: Treatment Value: 2mM SA vs. No Treatment
  misc_feature: MA Experiment ID: 20000184 Result: Up-regulated in Transcription
  misc_feature: MA Experiment 20000184 PARAMETER Experiment Name: At_Shoots__P Parameter: Age (day) Value: 7
  misc_feature: MA Experiment 20000184 PARAMETER Experiment Name: At_Shoots__P Parameter: Tissue Value: Shoots vs. Whole Plant
  misc_feature: MA Experiment ID: 20000185 Result: Down-regulated in Transcription
  misc_feature: MA Experiment 20000185 PARAMETER Experiment Name: At_Roots__P Parameter: Age (day) Value: 7 vs. 21
  misc_feature: MA Experiment 20000185 PARAMETER Experiment Name: At_Roots__P Parameter: Organism Value: A. thaliana
  misc_feature: MA Experiment 20000185 PARAMETER Experiment Name: At_Roots__P Parameter: Tissue Value: Roots vs. Whole Plant
  misc_feature: MA Experiment ID: 20000224 Result: Down-regulated in Transcription
  misc_feature: MA Experiment ID: 20000234 Result: Up-regulated in Transcription
  misc_feature: MA Experiment 20000234 PARAMETER Experiment Name: At_Siliques_P Parameter: Age (day) Value: 21
  misc_feature: MA Experiment 20000234 PARAMETER Experiment Name: At_Siliques_P Parameter: Organism Value: A. thaliana
  misc_feature: MA Experiment 20000234 PARAMETER Experiment Name: At_Siliques_P Parameter: Plant Line Value: WS
  misc_feature: MA Experiment 20000234 PARAMETER Experiment Name: At_Siliques_P Parameter: Tissue Value: Less Than 5mm Siliques vs. Whole Plant
  misc_feature: MA Experiment ID: 20000235 Result: Up-regulated in Transcription
  misc_feature: MA Experiment 20000235 PARAMETER Experiment Name: At_Siliques_P Parameter: Age (day) Value: 21
  misc_feature: MA Experiment 20000235 PARAMETER Experiment Name: At_Siliques_P Parameter: Organism Value: A. thaliana
  misc_feature: MA Experiment 20000235 PARAMETER Experiment Name: At_Siliques_P Parameter: Plant Line Value: WS
  misc_feature: MA Experiment 20000235 PARAMETER Experiment Name: At_Siliques_P Parameter: Tissue Value: 5-10mm Siliques vs. Whole Plant
  misc_feature: MA Experiment ID: 20000265 Result: Up-regulated in Transcription
  misc_feature: MA Experiment 20000265 PARAMETER Experiment Name: At_Open_Flower_P Parameter: Age (day) Value: 21
  misc_feature: MA Experiment 20000265 PARAMETER Experiment Name: At_Open_Flower_P Parameter: Plant Line Value: WS
  misc_feature: MA Experiment 20000265 PARAMETER Experiment Name: At_Open_Flower_P Parameter: Tissue Value: Closed Flower vs. Whole Plant
  misc_feature: MA Experiment ID: 20000436 Result: Down-regulated in Transcription
  misc_feature: MA Experiment 20000436 PARAMETER Experiment Name: At_Drought_P Parameter: Age (day) Value: 7
  misc_feature: MA Experiment 20000436 PARAMETER Experiment Name: At_Drought_P Parameter: Organism Value: A. thaliana
  misc_feature: MA Experiment 20000436 PARAMETER Experiment Name: At_Drought_P Parameter: Plant Line Value: WS
  misc_feature: MA Experiment 20000436 PARAMETER Experiment Name: At_Drought_P Parameter: Timepoint (hr) Value: 12
  misc_feature: MA Experiment 20000436 PARAMETER Experiment Name: At_Drought_P Parameter: Tissue Value: Whole Plant
  misc_feature: MA Experiment 20000436 PARAMETER Experiment Name: At_Drought_P Parameter: Treatment Value: Drought vs. No Drought
  misc_feature: MA Experiment ID: 20000438 Result: Up-regulated in Transcription
  misc_feature: MA Experiment 20000438 PARAMETER Experiment Name: At_Shoots__P Parameter: Age (day) Value: 14
  misc_feature: MA Experiment 20000438 PARAMETER Experiment Name: At_Shoots__P Parameter: Tissue Value: Shoots vs. Whole Plant
  misc_feature: MA Experiment ID: 20000439 Result: Down-regulated in Transcription
  misc_feature: MA Experiment 20000439 PARAMETER Experiment Name: At_Roots__P Parameter: Age (day) Value: 14 vs. 21
  misc_feature: MA Experiment 20000439 PARAMETER Experiment Name: At_Roots__P Parameter: Organism Value: A. thaliana
  misc_feature: MA Experiment 20000439 PARAMETER Experiment Name: At_Roots__P Parameter: Tissue Value: Roots vs. Whole Plant
  misc_feature: MA Experiment ID: 20000453 Result: Down-regulated in Transcription
  misc_feature: MA Experiment 20000453 PARAMETER Experiment Name: At_100uM_ABA_P Parameter: Age (day) Value: 15
  misc_feature: MA Experiment 20000453 PARAMETER Experiment Name: At_100uM_ABA_P Parameter: Organism Value: A. thaliana
  misc_feature: MA Experiment 20000453 PARAMETER Experiment Name: At_100uM_ABA_P Parameter: Plant Line Value: WS
  misc_feature: MA Experiment 20000453 PARAMETER Experiment Name: At_100uM_ABA_P Parameter: Timepoint (hr) Value: 24
  misc_feature: MA Experiment 20000453 PARAMETER Experiment Name: At_100uM_ABA_P Parameter: Tissue Value: Aerial
  misc_feature: MA Experiment 20000453 PARAMETER Experiment Name: At_100uM_ABA_P Parameter: Treatment Value: 100uM ABA vs. No Treatment
  misc_feature: MA Experiment ID: 20000573 Result: Down-regulated in Transcription
  misc_feature: MA Experiment 20000573 PARAMETER Experiment Name: At_100uM_ABA_Mutants__P Parameter: Organism Value: A. thaliana
  misc_feature: MA Experiment 20000573 PARAMETER Experiment Name: At_100uM_ABA_Mutants__P Parameter: Plant Line Value: CS22 vs. Ler wt
  misc_feature: MA Experiment 20000573 PARAMETER Experiment Name: At_100uM_ABA_Mutants__P Parameter: Timepoint (hr) Value: N/A
  misc_feature: MA Experiment 20000573 PARAMETER Experiment Name: At_100uM_ABA_Mutants__P Parameter: Tissue Value: Whole Plant
  misc_feature: MA Experiment 20000573 PARAMETER Experiment Name: At_100uM_ABA_Mutants__P Parameter: Treatment Value: None
  misc_feature: MA Experiment ID: 20000574 Result: Down-regulated in Transcription
  misc_feature: MA Experiment 20000574 PARAMETER Experiment Name: At_100uM_ABA_Mutants__P Parameter: Organism Value: A. thaliana
  misc_feature: MA Experiment 20000574 PARAMETER Experiment Name: At_100uM_ABA_Mutants__P Parameter: Plant Line Value: CS23 vs. Ler wt
  misc_feature: MA Experiment 20000574 PARAMETER Experiment Name: At_100uM_ABA_Mutants__P Parameter: Timepoint (hr) Value: N/A
  misc_feature: MA Experiment 20000574 PARAMETER Experiment Name: At_100uM_ABA_Mutants__P Parameter: Tissue Value: Whole Plant
  misc_feature: MA Experiment 20000574 PARAMETER Experiment Name: At_100uM_ABA_Mutants__P Parameter: Treatment Value: None
  misc_feature: MA Experiment ID: 20001248 Result: Down-regulated in Transcription
  misc_feature: MA Experiment 20001248 PARAMETER Experiment Name: At_Far-red-induction_P Parameter: Age (day) Value: 7
  misc_feature: MA Experiment 20001248 PARAMETER Experiment Name: At_Far-red-induction_P Parameter: Light Value: Far-red vs. White
  misc_feature: MA Experiment 20001248 PARAMETER Experiment Name: At_Far-red-induction_P Parameter: Organism Value: A. thaliana
  misc_feature: MA Experiment 20001248 PARAMETER Experiment Name: At_Far-red-induction_P Parameter: Plant Line Value: Columbia
  misc_feature: MA Experiment 20001248 PARAMETER Experiment Name: At_Far-red-induction_P Parameter: Timepoint (hr) Value: 4
  misc_feature: MA Experiment 20001248 PARAMETER Experiment Name: At_Far-red-induction_P Parameter: Tissue Value: Whole Plant
  misc_feature: MA Experiment ID: 20001451 Result: Down-regulated in Transcription
  misc_feature: MA Experiment 20001451 PARAMETER Experiment Name: At_Far-red-induction_P Parameter: Age (day) Value: 7
  misc_feature: MA Experiment 20001451 PARAMETER Experiment Name: At_Far-red-induction_P Parameter: Light Value: Far-red vs. White
  misc_feature: MA Experiment 20001451 PARAMETER Experiment Name: At_Far-red-induction_P Parameter: Organism Value: A. thaliana
  misc_feature: MA Experiment 20001451 PARAMETER Experiment Name: At_Far-red-induction_P Parameter: Plant Line Value: Columbia
  misc_feature: MA Experiment 20001451 PARAMETER Experiment Name: At_Far-red-induction_P Parameter: Timepoint (hr) Value: 24
  misc_feature: MA Experiment 20001451 PARAMETER Experiment Name: At_Far-red-induction_P Parameter: Tissue Value: Whole Plant
  misc_feature: MA Experiment ID: 20001555 Result: Down-regulated in Transcription
  misc_feature: MA Experiment 20001555 PARAMETER Experiment Name: At_Drought_Soil_Dry_P Parameter: Age (day) Value: 24
  misc_feature: MA Experiment 20001555 PARAMETER Experiment Name: At_Drought_Soil_Dry_P Parameter: Organism Value: A. thaliana
  misc_feature: MA Experiment 20001555 PARAMETER Experiment Name: At_Drought_Soil_Dry_P Parameter: Plant Line Value: WS
  misc_feature: MA Experiment 20001555 PARAMETER Experiment Name: At_Drought_Soil_Dry_P Parameter: Post Timepoint (hr) Value: None
  misc_feature: MA Experiment 20001555 PARAMETER Experiment Name: At_Drought_Soil_Dry_P Parameter: Post-Treatment Value: None
  misc_feature: MA Experiment 20001555 PARAMETER Experiment Name: At_Drought_Soil_Dry_P Parameter: Timepoint (day) Value: 10
  misc_feature: MA Experiment 20001555 PARAMETER Experiment Name: At_Drought_Soil_Dry_P Parameter: Treatment Value: Drought vs. No Drought
  misc_feature: MA Experiment ID: 20001556 Result: Down-regulated in Transcription
  misc_feature: MA Experiment 20001556 PARAMETER Experiment Name: At_Drought_Soil_Dry_P Parameter: Age (day) Value: 26
  misc_feature: MA Experiment 20001556 PARAMETER Experiment Name: At_Drought_Soil_Dry_P Parameter: Organism Value: A. thaliana
  misc_feature: MA Experiment 20001556 PARAMETER Experiment Name: At_Drought_Soil_Dry_P Parameter: Plant Line Value: WS
  misc_feature: MA Experiment 20001556 PARAMETER Experiment Name: At_Drought_Soil_Dry_P Parameter: Post Timepoint (hr) Value: None
  misc_feature: MA Experiment 20001556 PARAMETER Experiment Name: At_Drought_Soil_Dry_P Parameter: Post-Treatment Value: None
  misc_feature: MA Experiment 20001556 PARAMETER Experiment Name: At_Drought_Soil_Dry_P Parameter: Timepoint (day) Value: 12
  misc_feature: MA Experiment 20001556 PARAMETER Experiment Name: At_Drought_Soil_Dry_P Parameter: Treatment Value: Drought vs. No Drought
  misc_feature: MA Experiment ID: 20001557 Result: Up-regulated in Transcription
  misc_feature: MA Experiment 20001557 PARAMETER Experiment Name: At_Drought_Soil_Dry_P Parameter: Age (day) Value: 27
  misc_feature: MA Experiment 20001557 PARAMETER Experiment Name: At_Drought_Soil_Dry_P Parameter: Organism Value: A. thaliana
  misc_feature: MA Experiment 20001557 PARAMETER Experiment Name: At_Drought_Soil_Dry_P Parameter: Plant Line Value: WS
  misc_feature: MA Experiment 20001557 PARAMETER Experiment Name: At_Drought_Soil_Dry_P Parameter: Post Timepoint (hr) Value: 3
  misc_feature: MA Experiment 20001557 PARAMETER Experiment Name: At_Drought_Soil_Dry_P Parameter: Post-Treatment Value: Re-Water vs. No Drought
  misc_feature: MA Experiment 20001557 PARAMETER Experiment Name: At_Drought_Soil_Dry_P Parameter: Timepoint (day) Value: 13
  misc_feature: MA Experiment 20001557 PARAMETER Experiment Name: At_Drought_Soil_Dry_P Parameter: Treatment Value: Drought vs. No Drought
  misc_feature: MA Experiment ID: 20001558 Result: Up-regulated in Transcription
  misc_feature: MA Experiment 20001558 PARAMETER Experiment Name: At_Drought_Soil_Dry_P Parameter: Age (day) Value: 27
  misc_feature: MA Experiment 20001558 PARAMETER Experiment Name: At_Drought_Soil_Dry_P Parameter: Organism Value: A. thaliana
  misc_feature: MA Experiment 20001558 PARAMETER Experiment Name: At_Drought_Soil_Dry_P Parameter: Plant Line Value: WS
  misc_feature: MA Experiment 20001558 PARAMETER Experiment Name: At_Drought_Soil_Dry_P Parameter: Post Timepoint (hr) Value: 6
  misc_feature: MA Experiment 20001558 PARAMETER Experiment Name: At_Drought_Soil_Dry_P Parameter: Post-Treatment Value: Re-Water vs. No Drought
  misc_feature: MA Experiment 20001558 PARAMETER Experiment Name: At_Drought_Soil_Dry_P Parameter: Timepoint (day) Value: 13
  misc_feature: MA Experiment 20001558 PARAMETER Experiment Name: At_Drought_Soil_Dry_P Parameter: Treatment Value: Drought vs. No Drought
  misc_feature: MA Experiment ID: 20001906 Result: Down-regulated in Transcription
  misc_feature: MA Experiment 20001906 PARAMETER Experiment Name: At_Drought_Reproduction_P Parameter: Age (day) Value: 35
  misc_feature: MA Experiment 20001906 PARAMETER Experiment Name: At_Drought_Reproduction_P Parameter: Organism Value: A. thaliana
  misc_feature: MA Experiment 20001906 PARAMETER Experiment Name: At_Drought_Reproduction_P Parameter: Plant Line Value: WS
  misc_feature: MA Experiment 20001906 PARAMETER Experiment Name: At_Drought_Reproduction_P Parameter: Timepoint (day) Value: 5
  misc_feature: MA Experiment 20001906 PARAMETER Experiment Name: At_Drought_Reproduction_P Parameter: Tissue Value: Siliques
  misc_feature: MA Experiment 20001906 PARAMETER Experiment Name: At_Drought_Reproduction_P Parameter: Treatment Value: Drought vs. No Drought
  misc_feature: MA Experiment ID: 20001911 Result: Down-regulated in Transcription
  misc_feature: MA Experiment 20001911 PARAMETER Experiment Name: At_Drought_Reproduction_P Parameter: Age (day) Value: 40
  misc_feature: MA Experiment 20001911 PARAMETER Experiment Name: At_Drought_Reproduction_P Parameter: Organism Value: A. thaliana
  misc_feature: MA Experiment 20001911 PARAMETER Experiment Name: At_Drought_Reproduction_P Parameter: Plant Line Value: WS
  misc_feature: MA Experiment 20001911 PARAMETER Experiment Name: At_Drought_Reproduction_P Parameter: Timepoint (day) Value: 10
  misc_feature: MA Experiment 20001911 PARAMETER Experiment Name: At_Drought_Reproduction_P Parameter: Tissue Value: Flowers
  misc_feature: MA Experiment 20001911 PARAMETER Experiment Name: At_Drought_Reproduction_P Parameter: Treatment Value: Drought vs. No Drought
atatacatccatttacattcttcacgttatcagaccaatctctctcttcttcttcttcacgttctctctctttccggataagggtagagatggctagagtttgtgtaatgatgatggctatggctatagctatggctatgaacatagctatgggtgatccaatagcaccatgttacttcatattcggtgactctttggttgatagtggaaacaacaatcggcttacctctctagcaagagctaattacttcccttacggtatcgacttccagtacggtccaaccggtcgcttctccaacggaaaaaccaccgtcgatgtcatcactgagcttcttggtttcgatgactacattacaccgtattccgaagcaaggggagaagatatcctaagaggagtaaactacgcttctgcagctgccggaatccgagaagaaactggtcgacaattgggagctagaataacatttgcagggcaagtagctaatcatgtaaacactgtgtcacaagttgtgaacatactcggagacgagaatgaagctgctaattacctaagtaaatgcatctactcaatcgggttaggcagtaacgactatctcaataactattttatgcctgtttattactccaccgggagccagtactccccggatgcctacgccaacgacctcataaaccgctacaccgagcaactccggataatgtataacaacggagcgaggaagtttgcgctagttggtataggtgcaataggatgcagtccaaatgagctggctcaaaacagcagagacggggtgacttgtgacgaaaggatcaattccgctaacagaatcttcaacagtaagcttgtgtctctggttgatcacttcaaccaaaacacaccaggggccaagttcacttacattaatgcttatggtatcttccaagacatggtagctaatccttctcgctatgggtttagggtgacaaacgcgggatgttgtggagttgggaggaacaatggacagataacttgtcttccgggtcaagctccatgtcttaacagggacgagtatgtgttctgggacgcgtttcatccaggagaagctgcgaatgttgtcatcggtagtcgatcttttcagagagaatctgcttctgatgctcatccttatgatatccagcagcttgctcggctctagttcatgaaatttcctccaagcaaacacagagtgaaaaagagagggagacagatttaatctttttcttatttaagtgtttgatgattgtttctttttgctgcagaagaattgtttgttttgttgagtttatgtatcatggttctatataatgacatgaaatttctgctttcttatagatgactaaattcatttgg

SEQ ID NO: 37822 - protein, 390 aa, Arabidopsis thaliana
  peptide (1)..(390): Ceres Seq. ID no. 12338577
  misc_feature (58)..(370): Pfam Name: GDSL-like Lipase/Acylhydrolase Pfam Description: GDSL-like Lipase/Acylhydrolase
  misc_feature (28)..(388): Homolog of NCBI NO: 34910808 NR Description: GDSL-motif lipase/hydrolase-like protein
  misc_feature (35)..(390): Homolog of NCBI NO: 21594055 NR Description: lipase/hydrolase, putative [Arabidopsis thaliana]
  misc_feature (30)..(390): Homolog of NCBI NO: 21592417 NR Description: lipase/hydrolase, putative [Arabidopsis thaliana]
  misc_feature (30)..(390): Homolog of NCBI NO: 15220514 NR Description: lipase/hydrolase, putative
  misc_feature (35)..(390): Homolog of NCBI NO: 15220512 NR Description: lipase/hydrolase, putative
  misc_feature (30)..(390): Homolog of NCBI NO: 21553940 NR Description: GDSL-motif lipase/hydrolase-like protein
  misc_feature (30)..(390): Homolog of NCBI NO: 15242458 NR Description: GDSL-motif lipase/hydrolase-like protein
  misc_feature (30)..(390): Homolog of NCBI NO: 21618199 NR Description: GDSL-motif lipase/hydrolase-like protein
  misc_feature (30)..(390): Homolog of NCBI NO: 18415211 NR Description: Expressed protein
  misc_feature (4)..(390): Homolog of NCBI NO: 7485419 NR Description: hypothetical protein F13C5.140 - Arabidopsis
IHPFTFFTLSDQSLSSSSSRSLSFRIRVEMARVCVMMMAMAIAMAMNIAMGDPIAPCYFIFGDSLVDSGNNNRLTSLARANYFPYGIDFQYGPTGRFSNGKTTVDVITELLGFDDYITPYSEARGEDILRGVNYASAAAGIREETGRQLGARITFAGQVANHVNTVSQVVNILGDENEAANYLSKCIYSIGLGSNDYLNNYFMPVYYSTGSQYSPDAYANDLINRYTEQLRIMYNNGARKFALVGIGAIGCSPNELAQNSRDGVTCDERINSANRIFNSKLVSLVDHFNQNTPGAKFTYINAYGIFQDMVANPSRYGFRVTNAGCCGVGRNNGQITCLPGQAPCLNRDEYVFWDAFHPGEAANVVIGSRSFQRESASDAHPYDIQQLARL

SEQ ID NO: 37823 - protein, 361 aa, Arabidopsis thaliana
  peptide (1)..(361): Ceres Seq. ID no. 12338578
  misc_feature (29)..(341): Pfam Name: GDSL-like Lipase/Acylhydrolase Pfam Description: GDSL-like Lipase/Acylhydrolase
  misc_feature (1)..(359): Homolog of NCBI NO: 34910808 NR Description: GDSL-motif lipase/hydrolase-like protein
  misc_feature (6)..(361): Homolog of NCBI NO: 21594055 NR Description: lipase/hydrolase, putative [Arabidopsis thaliana]
  misc_feature (1)..(361): Homolog of NCBI NO: 21592417 NR Description: lipase/hydrolase, putative [Arabidopsis thaliana]
  misc_feature (1)..(361): Homolog of NCBI NO: 15220514 NR Description: lipase/hydrolase, putative
  misc_feature (6)..(361): Homolog of NCBI NO: 15220512 NR Description: lipase/hydrolase, putative
  misc_feature (1)..(361): Homolog of NCBI NO: 21553940 NR Description: GDSL-motif lipase/hydrolase-like protein
  misc_feature (1)..(361): Homolog of NCBI NO: 15242458 NR Description: GDSL-motif lipase/hydrolase-like protein
  misc_feature (1)..(361): Homolog of NCBI NO: 21618199 NR Description: GDSL-motif lipase/hydrolase-like protein
  misc_feature (1)..(361): Homolog of NCBI NO: 18415211 NR Description: Expressed protein
  misc_feature (1)..(361): Homolog of NCBI NO: 7485419 NR Description: hypothetical protein F13C5.140 - Arabidopsis
MARVCVMMMAMAIAMAMNIAMGDPIAPCYFIFGDSLVDSGNNNRLTSLARANYFPYGIDFQYGPTGRFSNGKTTVDVITELLGFDDYITPYSEARGEDILRGVNYASAAAGIREETGRQLGARITFAGQVANHVNTVSQVVNILGDENEAANYLSKCIYSIGLGSNDYLNNYFMPVYYSTGSQYSPDAYANDLINRYTEQLRIMYNNGARKFALVGIGAIGCSPNELAQNSRDGVTCDERINSANRIFNSKLVSLVDHFNQNTPGAKFTYINAYGIFQDMVANPSRYGFRVTNAGCCGVGRNNGQITCLPGQAPCLNRDEYVFWDAFHPGEAANVVIGSRSFQRESASDAHPYDIQQLARL

SEQ ID NO: 37824 - protein, 355 aa, Arabidopsis thaliana
  peptide (1)..(355): Ceres Seq. ID no. 12338579
  misc_feature (23)..(335): Pfam Name: GDSL-like Lipase/Acylhydrolase Pfam Description: GDSL-like Lipase/Acylhydrolase
  misc_feature (1)..(353): Homolog of NCBI NO: 34910808 NR Description: GDSL-motif lipase/hydrolase-like protein
  misc_feature (1)..(355): Homolog of NCBI NO: 21594055 NR Description: lipase/hydrolase, putative [Arabidopsis thaliana]
  misc_feature (1)..(355): Homolog of NCBI NO: 21592417 NR Description: lipase/hydrolase, putative [Arabidopsis thaliana]
  misc_feature (1)..(355): Homolog of NCBI NO: 15220514 NR Description: lipase/hydrolase, putative
  misc_feature (1)..(355): Homolog of NCBI NO: 15220512 NR Description: lipase/hydrolase, putative
  misc_feature (1)..(355): Homolog of NCBI NO: 21553940 NR Description: GDSL-motif lipase/hydrolase-like protein
  misc_feature (1)..(355): Homolog of NCBI NO: 15242458 NR Description: GDSL-motif lipase/hydrolase-like protein
  misc_feature (1)..(355): Homolog of NCBI NO: 21618199 NR Description: GDSL-motif lipase/hydrolase-like protein
  misc_feature (1)..(355): Homolog of NCBI NO: 18415211 NR Description: Expressed protein
  misc_feature (1)..(355): Homolog of NCBI NO: 7485419 NR Description: hypothetical protein F13C5.140 - Arabidopsis
MMMAMAIAMAMNIAMGDPIAPCYFIFGDSLVDSGNNNRLTSLARANYFPYGIDFQYGPTGRFSNGKTTVDVITELLGFDDYITPYSEARGEDILRGVNYASAAAGIREETGRQLGARITFAGQVANHVNTVSQVVNILGDENEAANYLSKCIYSIGLGSNDYLNNYFMPVYYSTGSQYSPDAYANDLINRYTEQLRIMYNNGARKFALVGIGAIGCSPNELAQNSRDGVTCDERINSANRIFNSKLVSLVDHFNQNTPGAKFTYINAYGIFQDMVANPSRYGFRVTNAGCCGVGRNNGQITCLPGQAPCLNRDEYVFWDAFHPGEAANVVIGSRSFQRESASDAHPYDIQQLARL

SEQ ID NO: 37825 - DNA, 1804 bp, Arabidopsis thaliana
  misc_feature (1)..(1804): Ceres Seq. ID no. 12328091
  misc_feature: MA Experiment ID: 108579 Result: Down-regulated in Transcription
  misc_feature: MA Experiment 108579 PARAMETER Experiment Name: At_4deg_Cold_cDNA_P Parameter: Temperature (deg C) Value: 4 vs. 22
  misc_feature: MA Experiment 108579 PARAMETER Experiment Name: At_4deg_Cold_cDNA_P Parameter: Timepoint (hr) Value: 6
  misc_feature: MA Experiment 108579 PARAMETER Experiment Name: At_4deg_Cold_cDNA_P Parameter: Tissue Value: Aerial
  misc_feature: MA Experiment ID: 108595 Result: Down-regulated in Transcription
  misc_feature: MA Experiment 108595 PARAMETER Experiment Name: At_Ler-pi_Ovule_cDNA_P Parameter: Plant Line Value: null
  misc_feature: MA Experiment ID: 20000180 Result: Up-regulated in Transcription
  misc_feature: MA Experiment 20000180 PARAMETER Experiment Name: At_Germinating_Seeds_P Parameter: Age (hr) Value: 24 vs. 0
  misc_feature: MA Experiment 20000180 PARAMETER Experiment Name: At_Germinating_Seeds_P Parameter: Tissue Value: Germinating Seeds
  misc_feature: MA Experiment ID: 20000185 Result: Down-regulated in Transcription
  misc_feature: MA Experiment 20000185 PARAMETER Experiment Name: At_Roots__P Parameter: Age (day) Value: 7 vs. 21
  misc_feature: MA Experiment 20000185 PARAMETER Experiment Name: At_Roots__P Parameter: Organism Value: A. thaliana
  misc_feature: MA Experiment 20000185 PARAMETER Experiment Name: At_Roots__P Parameter: Tissue Value: Roots vs. Whole Plant
  misc_feature: MA Experiment ID: 20000286 Result: Down-regulated in Transcription
  misc_feature: MA Experiment 20000286 PARAMETER Experiment Name: At_Open_Flower_P Parameter: Age (day) Value: 21
  misc_feature: MA Experiment 20000286 PARAMETER Experiment Name: At_Open_Flower_P Parameter: Plant Line Value: WS
  misc_feature: MA Experiment 20000286 PARAMETER Experiment Name: At_Open_Flower_P Parameter: Tissue Value: Half Open vs. Whole Plant
  misc_feature: MA Experiment ID: 20000439 Result: Down-regulated in Transcription
  misc_feature: MA Experiment 20000439 PARAMETER Experiment Name: At_Roots__P Parameter: Age (day) Value: 14 vs. 21
  misc_feature: MA Experiment 20000439 PARAMETER Experiment Name: At_Roots__P Parameter: Organism Value: A. thaliana
  misc_feature: MA Experiment 20000439 PARAMETER Experiment Name: At_Roots__P Parameter: Tissue Value: Roots vs. Whole Plant
  misc_feature: MA Experiment ID: 20000573 Result: Up-regulated in Transcription
  misc_feature: MA Experiment 20000573 PARAMETER Experiment Name: At_100uM_ABA_Mutants__P Parameter: Organism Value: A. thaliana
  misc_feature: MA Experiment 20000573 PARAMETER Experiment Name: At_100uM_ABA_Mutants__P Parameter: Plant Line Value: CS22 vs. Ler wt
  misc_feature: MA Experiment 20000573 PARAMETER Experiment Name: At_100uM_ABA_Mutants__P Parameter: Timepoint (hr) Value: N/A
  misc_feature: MA Experiment 20000573 PARAMETER Experiment Name: At_100uM_ABA_Mutants__P Parameter: Tissue Value: Whole Plant
  misc_feature: MA Experiment 20000573 PARAMETER Experiment Name: At_100uM_ABA_Mutants__P Parameter: Treatment Value: None
  misc_feature: MA Experiment ID: 20001247 Result: Up-regulated in Transcription
  misc_feature: MA Experiment 20001247 PARAMETER Experiment Name: At_Far-red-induction_P Parameter: Age (day) Value: 7
  misc_feature: MA Experiment 20001247 PARAMETER Experiment Name: At_Far-red-induction_P Parameter: Light Value: Far-red vs. White
  misc_feature: MA Experiment 20001247 PARAMETER Experiment Name: At_Far-red-induction_P Parameter: Organism Value: A. thaliana
  misc_feature: MA Experiment 20001247 PARAMETER Experiment Name: At_Far-red-induction_P Parameter: Plant Line Value: Columbia
  misc_feature: MA Experiment 20001247 PARAMETER Experiment Name: At_Far-red-induction_P Parameter: Timepoint (hr) Value: 1
  misc_feature: MA Experiment 20001247 PARAMETER Experiment Name: At_Far-red-induction_P Parameter: Tissue Value: Whole Plant
  misc_feature: MA Experiment ID: 20001248 Result: Up-regulated in Transcription
  misc_feature: MA Experiment 20001248 PARAMETER Experiment Name: At_Far-red-induction_P Parameter: Age (day) Value: 7
  misc_feature: MA Experiment 20001248 PARAMETER Experiment Name: At_Far-red-induction_P Parameter: Light Value: Far-red vs. White
  misc_feature: MA Experiment 20001248 PARAMETER Experiment Name: At_Far-red-induction_P Parameter: Organism Value: A. thaliana
  misc_feature: MA Experiment 20001248 PARAMETER Experiment Name: At_Far-red-induction_P Parameter: Plant Line Value: Columbia
  misc_feature: MA Experiment 20001248 PARAMETER Experiment Name: At_Far-red-induction_P Parameter: Timepoint (hr) Value: 4
  misc_feature: MA Experiment 20001248 PARAMETER Experiment Name: At_Far-red-induction_P Parameter: Tissue Value: Whole Plant
  misc_feature: MA Experiment ID: 20001450 Result: Up-regulated in Transcription
  misc_feature: MA Experiment 20001450 PARAMETER Experiment Name: At_Far-red-induction_P Parameter: Age (day) Value: 7
  misc_feature: MA Experiment 20001450 PARAMETER Experiment Name: At_Far-red-induction_P Parameter: Light Value: Far-red vs. White
  misc_feature: MA Experiment 20001450 PARAMETER Experiment Name: At_Far-red-induction_P Parameter: Organism Value: A. thaliana
  misc_feature: MA Experiment 20001450 PARAMETER Experiment Name: At_Far-red-induction_P Parameter: Plant Line Value: Columbia
  misc_feature: MA Experiment 20001450 PARAMETER Experiment Name: At_Far-red-induction_P Parameter: Timepoint (hr) Value: 8
  misc_feature: MA Experiment 20001450 PARAMETER Experiment Name: At_Far-red-induction_P Parameter: Tissue Value: Whole Plant
  misc_feature: MA Experiment ID: 20001556 Result: Down-regulated in Transcription
  misc_feature: MA Experiment 20001556 PARAMETER Experiment Name: At_Drought_Soil_Dry_P Parameter: Age (day) Value: 26
  misc_feature: MA Experiment 20001556 PARAMETER Experiment Name: At_Drought_Soil_Dry_P Parameter: Organism Value: A. thaliana
  misc_feature: MA Experiment 20001556 PARAMETER Experiment Name: At_Drought_Soil_Dry_P Parameter: Plant Line Value: WS
  misc_feature: MA Experiment 20001556 PARAMETER Experiment Name: At_Drought_Soil_Dry_P Parameter: Post Timepoint (hr) Value: None
  misc_feature: MA Experiment 20001556 PARAMETER Experiment Name: At_Drought_Soil_Dry_P Parameter: Post-Treatment Value: None
  misc_feature: MA Experiment 20001556 PARAMETER Experiment Name: At_Drought_Soil_Dry_P Parameter: Timepoint (day) Value: 12
  misc_feature: MA Experiment 20001556 PARAMETER Experiment Name: At_Drought_Soil_Dry_P Parameter: Treatment Value: Drought vs. No Drought
  misc_feature: MA Experiment ID: 20001904 Result: Down-regulated in Transcription
  misc_feature: MA Experiment 20001904 PARAMETER Experiment Name: At_Drought_Reproduction_P Parameter: Age (day) Value: 37
  misc_feature: MA Experiment 20001904 PARAMETER Experiment Name: At_Drought_Reproduction_P Parameter: Organism Value: A. thaliana
  misc_feature: MA Experiment 20001904 PARAMETER Experiment Name: At_Drought_Reproduction_P Parameter: Plant Line Value: WS
  misc_feature: MA Experiment 20001904 PARAMETER Experiment Name: At_Drought_Reproduction_P Parameter: Timepoint (day) Value: 7
  misc_feature: MA Experiment 20001904 PARAMETER Experiment Name: At_Drought_Reproduction_P Parameter: Tissue Value: Rosettes
  misc_feature: MA Experiment 20001904 PARAMETER Experiment Name: At_Drought_Reproduction_P Parameter: Treatment Value: Drought vs. No Drought
  misc_feature: MA Experiment ID: 20001905 Result: Down-regulated in Transcription
  misc_feature: MA Experiment 20001905 PARAMETER Experiment Name: At_Drought_Reproduction_P Parameter: Age (day) Value: 40
  misc_feature: MA Experiment 20001905 PARAMETER Experiment Name: At_Drought_Reproduction_P Parameter: Organism Value: A. thaliana
  misc_feature: MA Experiment 20001905 PARAMETER Experiment Name: At_Drought_Reproduction_P Parameter: Plant Line Value: WS
  misc_feature: MA Experiment 20001905 PARAMETER Experiment Name: At_Drought_Reproduction_P Parameter: Timepoint (day) Value: 10
  misc_feature: MA Experiment 20001905 PARAMETER Experiment Name: At_Drought_Reproduction_P Parameter: Tissue Value: Rosettes
  misc_feature: MA Experiment 20001905 PARAMETER Experiment Name: At_Drought_Reproduction_P Parameter: Treatment Value: Drought vs. No Drought
  misc_feature: MA Experiment ID: 20001906 Result: Down-regulated in Transcription
  misc_feature: MA Experiment 20001906 PARAMETER Experiment Name: At_Drought_Reproduction_P Parameter: Age (day) Value: 35
  misc_feature: MA Experiment 20001906 PARAMETER Experiment Name: At_Drought_Reproduction_P Parameter: Organism Value: A. thaliana
  misc_feature: MA Experiment 20001906 PARAMETER Experiment Name: At_Drought_Reproduction_P Parameter: Plant Line Value: WS
  misc_feature: MA Experiment 20001906 PARAMETER Experiment Name: At_Drought_Reproduction_P Parameter: Timepoint (day) Value: 5
  misc_feature: MA Experiment 20001906 PARAMETER Experiment Name: At_Drought_Reproduction_P Parameter: Tissue Value: Siliques
  misc_feature: MA Experiment 20001906 PARAMETER Experiment Name: At_Drought_Reproduction_P Parameter: Treatment Value: Drought vs. No Drought
  misc_feature: MA Experiment ID: 20001911 Result: Down-regulated in Transcription
  misc_feature: MA Experiment 20001911 PARAMETER Experiment Name: At_Drought_Reproduction_P Parameter: Age (day) Value: 40
  misc_feature: MA Experiment 20001911 PARAMETER Experiment Name: At_Drought_Reproduction_P Parameter: Organism Value: A. thaliana
  misc_feature: MA Experiment 20001911 PARAMETER Experiment Name: At_Drought_Reproduction_P Parameter: Plant Line Value: WS
  misc_feature: MA Experiment 20001911 PARAMETER Experiment Name: At_Drought_Reproduction_P Parameter: Timepoint (day) Value: 10
  misc_feature: MA Experiment 20001911 PARAMETER Experiment Name: At_Drought_Reproduction_P Parameter: Tissue Value: Flowers
  misc_feature: MA Experiment 20001911 PARAMETER Experiment Name: At_Drought_Reproduction_P Parameter: Treatment Value: Drought vs. No Drought
aggtaaagacgagaggtctcgcgcttatccttaaaggactgtggtgaatggtgagtgtgacttggagggaccccatcaccgcaacaatacagcttcttagatctcgataaccacaacttacctgtcacagtttcgattagatcttctcaaaaacttcacctttttttgtttttccagtttctcagaggagatcttccttcaaagctcaaatccttttgtctgaattgtgatactgctgtccccatttttctgcaagttgggaaatttctgtcaaagttttgtgggtctgttaaaaagatctgagctttgaacatggggagctcaatggaggagaaagtggtggctgtgatcatggtcggtggtccaaccaaaggcactcgatttcggccattgtcgctgaatattccaaagcctctgtttcctattgcgggacaaccaatggtgcatcatccaatttcagcttgtaaaagtattccaaatttagctcaaatatatcttgttggcttctatgaggaaagggaatttgcactttatgtttcagccatctctaatgaacttaaagttcctgttagatatctgcgagaagacaaaccacatggttcagctggtgggctgtatcactttagaaatcttattatggaagatagtccgtctcatatcttcctgcttaactgtgatgtttgctgcagtttccccttgcccaaaatgctcgaggctcacaggggatatggtggaattggaactcttcttgtgatcaaggtctctcctgaatcagccagccaatttggagaattggttgcagatccagttactaatgagctgcttcattacaccgagaaacccgaaacttttgtcagtgatcgaattaactgtggtgtttatgtatttacacctgaaatttttaatgccataggagatgtttctactcagaggaaagatagagcaactctaaaacgtgtttccagcttcgaagctcttcaaccggcaacaaggatcccgacagattttgtaagactggatcaagacatcctttcacctctagctgggaagaaacagctatatacttatgagactatggatttctgggagcaaatcaaatctcctggaatgtcgttgaggtgttcaggactctatctttcccaattccgcttgacatctccccaactgttggctagtggtgatggaacaaggagtgccattgtgattggtgatgtttacatacatccttctgcaaaagttcacccaactgcaaagattggtcccaacgtctcaatctctgcaaatgctcgtgttggaccgggcgtcaggcttatgagctgcatcatccttgacgatgttgagatcatggaaaatgcagtggtgactaacgcaattgttgggtggaaatcttctatcgggagatggtcccgtgtccaggctgagggagtctacaattcgaaactcggagttacaattctcggagactcggttgcagttgaagacgaggttgtggtgaccagcagtattgttcttccaaacaagacactgaacgtcagtgttcaagacgagatcattttgtaactgaaaaacggaagttgaaaaatggaaccaacccagtggggagcagccacactatctccctctgattcaatatctactggagaaccacataagcaaatatttgggaactgattcacatgtatcatttatttacaccaagaattttccaacattgtatcaattcattttctatactcacaacacagctactgtaaaaggcactgaatttttgcccagaataataaagcacttgtgtagttttggc

SEQ ID NO: 37826 - protein, 415 aa, Arabidopsis thaliana
  peptide (1)..(415): Ceres Seq. ID no. 12328092
  misc_feature (10)..(246): Pfam Name: Nucleotidyl transferase Pfam Description: Nucleotidyl transferase
  misc_feature (11)..(415): Homolog of NCBI NO: 19526884 NR Description: RIKEN cDNA 1810012N01 [Mus musculus]
  misc_feature (11)..(415): Homolog of NCBI NO: 33416563 NR Description: Unknown (protein for MGC:66135) [Danio rerio]
  misc_feature (11)..(415): Homolog of NCBI NO: 28830182 NR Description: similar to Homo sapiens (Human). GDP-mannose
  misc_feature (3)..(394): Homolog of NCBI NO: 26006499 NR Description: Putative GDP-mannose pyrophosphorylase
  misc_feature (6)..(394): Homolog of NCBI NO: 25411099 NR Description: probable GDP-mannose pyrophosphorylase
  misc_feature (6)..(415): Homolog of NCBI NO: 17064890 NR Description: putative GDP-mannose pyrophosphorylase
  misc_feature (6)..(415): Homolog of NCBI NO: 22325477 NR Description: putative GDP-mannose  pyrophosphorylase
  misc_feature (1)..(369): Homolog of NCBI NO: 30699056 NR Description: ADP-glucose pyrophosphorylase family [Arabidopsis
  misc_feature (5)..(415): Homolog of NCBI NO: 5882732 NR Description: Similar to gb|AF135422 GDP-mannose A (GMPPA) from Homo sapiens. ESTs gb|AA712990, gb|N65247, gb|T04179, gb|Z38092, gb|T76473, gb|N96403, gb|AA394551 and
  misc_feature (1)..(415): Homolog of NCBI NO: 15222037 NR Description: putative GDP-mannose pyrophosphorylase
MGSSMEEKVVAVIMVGGPTKGTRFRPLSLNIPKPLFPIAGQPMVHHPISACKSIPNLAQIYLVGFYEEREFALYVSAISNELKVPVRYLREDKPHGSAGGLYHFRNLIMEDSPSHIFLLNCDVCCSFPLPKMLEAHRGYGGIGTLLVIKVSPESASQFGELVADPVTNELLHYTEKPETFVSDRINCGVYVFTPEIFNAIGDVSTQRKDRATLKRVSSFEALQPATRIPTDFVRLDQDILSPLAGKKQLYTYETMDFWEQIKSPGMSLRCSGLYLSQFRLTSPQLLASGDGTRSAIVIGDVYIHPSAKVHPTAKIGPNVSISANARVGPGVRLMSCIILDDVEIMENAVVTNAIVGWKSSIGRWSRVQAEGVYNSKLGVTILGDSVAVEDEVVVTSSIVLPNKTLNVSVQDEIIL

SEQ ID NO: 37827 - protein, 411 aa, Arabidopsis thaliana
  peptide (1)..(411): Ceres Seq. ID no. 12328093
  misc_feature (6)..(242): Pfam Name: Nucleotidyl transferase Pfam Description: Nucleotidyl transferase
  misc_feature (7)..(411): Homolog of NCBI NO: 19526884 NR Description: RIKEN cDNA 1810012N01 [Mus musculus]
  misc_feature (7)..(411): Homolog of NCBI NO: 33416563 NR Description: Unknown (protein for MGC:66135) [Danio rerio]
  misc_feature (7)..(411): Homolog of NCBI NO: 28830182 NR Description: similar to Homo sapiens (Human). GDP-mannose
  misc_feature (1)..(390): Homolog of NCBI NO: 26006499 NR Description: Putative GDP-mannose pyrophosphorylase
  misc_feature (2)..(390): Homolog of NCBI NO: 25411099 NR Description: probable GDP-mannose pyrophosphorylase
  misc_feature (2)..(411): Homolog of NCBI NO: 17064890 NR Description: putative GDP-mannose pyrophosphorylase
  misc_feature (2)..(411): Homolog of NCBI NO: 22325477 NR Description: putative GDP-mannose  pyrophosphorylase
  misc_feature (1)..(365): Homolog of NCBI NO: 30699056 NR Description: ADP-glucose pyrophosphorylase family [Arabidopsis
  misc_feature (1)..(411): Homolog of NCBI NO: 5882732 NR Description: Similar to gb|AF135422 GDP-mannose A (GMPPA) from Homo sapiens. ESTs gb|AA712990, gb|N65247, gb|T04179, gb|Z38092, gb|T76473, gb|N96403, gb|AA394551 and
  misc_feature (1)..(411): Homolog of NCBI NO: 15222037 NR Description: putative GDP-mannose pyrophosphorylase
MEEKVVAVIMVGGPTKGTRFRPLSLNIPKPLFPIAGQPMVHHPISACKSIPNLAQIYLVGFYEEREFALYVSAISNELKVPVRYLREDKPHGSAGGLYHFRNLIMEDSPSHIFLLNCDVCCSFPLPKMLEAHRGYGGIGTLLVIKVSPESASQFGELVADPVTNELLHYTEKPETFVSDRINCGVYVFTPEIFNAIGDVSTQRKDRATLKRVSSFEALQPATRIPTDFVRLDQDILSPLAGKKQLYTYETMDFWEQIKSPGMSLRCSGLYLSQFRLTSPQLLASGDGTRSAIVIGDVYIHPSAKVHPTAKIGPNVSISANARVGPGVRLMSCIILDDVEIMENAVVTNAIVGWKSSIGRWSRVQAEGVYNSKLGVTILGDSVAVEDEVVVTSSIVLPNKTLNVSVQDEIIL

SEQ ID NO: 37828 - protein, 402 aa, Arabidopsis thaliana
  peptide (1)..(402): Ceres Seq. ID no. 12328094
  misc_feature (1)..(233): Pfam Name: Nucleotidyl transferase Pfam Description: Nucleotidyl transferase
  misc_feature (1)..(402): Homolog of NCBI NO: 19526884 NR Description: RIKEN cDNA 1810012N01 [Mus musculus]
  misc_feature (1)..(402): Homolog of NCBI NO: 33416563 NR Description: Unknown (protein for MGC:66135) [Danio rerio]
  misc_feature (1)..(402): Homolog of NCBI NO: 28830182 NR Description: similar to Homo sapiens (Human). GDP-mannose
  misc_feature (1)..(381): Homolog of NCBI NO: 26006499 NR Description: Putative GDP-mannose pyrophosphorylase
  misc_feature (1)..(381): Homolog of NCBI NO: 25411099 NR Description: probable GDP-mannose pyrophosphorylase
  misc_feature (1)..(402): Homolog of NCBI NO: 17064890 NR Description: putative GDP-mannose pyrophosphorylase
  misc_feature (1)..(402): Homolog of NCBI NO: 22325477 NR Description: putative GDP-mannose  pyrophosphorylase
  misc_feature (1)..(356): Homolog of NCBI NO: 30699056 NR Description: ADP-glucose pyrophosphorylase family [Arabidopsis
  misc_feature (1)..(402): Homolog of NCBI NO: 5882732 NR Description: Similar to gb|AF135422 GDP-mannose A (GMPPA) from Homo sapiens. ESTs gb|AA712990, gb|N65247, gb|T04179, gb|Z38092, gb|T76473, gb|N96403, gb|AA394551 and
  misc_feature (1)..(402): Homolog of NCBI NO: 15222037 NR Description: putative GDP-mannose pyrophosphorylase
MVGGPTKGTRFRPLSLNIPKPLFPIAGQPMVHHPISACKSIPNLAQIYLVGFYEEREFALYVSAISNELKVPVRYLREDKPHGSAGGLYHFRNLIMEDSPSHIFLLNCDVCCSFPLPKMLEAHRGYGGIGTLLVIKVSPESASQFGELVADPVTNELLHYTEKPETFVSDRINCGVYVFTPEIFNAIGDVSTQRKDRATLKRVSSFEALQPATRIPTDFVRLDQDILSPLAGKKQLYTYETMDFWEQIKSPGMSLRCSGLYLSQFRLTSPQLLASGDGTRSAIVIGDVYIHPSAKVHPTAKIGPNVSISANARVGPGVRLMSCIILDDVEIMENAVVTNAIVGWKSSIGRWSRVQAEGVYNSKLGVTILGDSVAVEDEVVVTSSIVLPNKTLNVSVQDEIIL

SEQ ID NO: 37829 - DNA, 851 bp, Arabidopsis thaliana
  misc_feature (1)..(851): Ceres Seq. ID no. 12488340
  misc_feature: MA Experiment ID: 108464 Result: Down-regulated in Transcription
  misc_feature: MA Experiment 108464 PARAMETER Experiment Name: At_Germinating_Seeds_cDNA_P Parameter: Age (day) Value: 4 vs. 0
  misc_feature: MA Experiment 108464 PARAMETER Experiment Name: At_Germinating_Seeds_cDNA_P Parameter: Tissue Value: Germinating Seeds
  misc_feature: MA Experiment ID: 108488 Result: Down-regulated in Transcription
  misc_feature: MA Experiment ID: 108576 Result: Up-regulated in Transcription
  misc_feature: MA Experiment 108576 PARAMETER Experiment Name: At_42deg_Heat_cDNA_P Parameter: Temperature (deg C) Value: 42 vs. 22
  misc_feature: MA Experiment 108576 PARAMETER Experiment Name: At_42deg_Heat_cDNA_P Parameter: Timepoint (hr) Value: 1
  misc_feature: MA Experiment 108576 PARAMETER Experiment Name: At_42deg_Heat_cDNA_P Parameter: Tissue Value: Aerial
  misc_feature: MA Experiment ID: 108577 Result: Up-regulated in Transcription
  misc_feature: MA Experiment 108577 PARAMETER Experiment Name: At_42deg_Heat_cDNA_P Parameter: Temperature (deg C) Value: 42 vs. 22
  misc_feature: MA Experiment 108577 PARAMETER Experiment Name: At_42deg_Heat_cDNA_P Parameter: Timepoint (hr) Value: 6
  misc_feature: MA Experiment 108577 PARAMETER Experiment Name: At_42deg_Heat_cDNA_P Parameter: Tissue Value: Aerial
  misc_feature: MA Experiment ID: 108585 Result: Up-regulated in Transcription
  misc_feature: MA Experiment 108585 PARAMETER Experiment Name: At_5mM_NaNP_cDNA_P Parameter: Timepoint (hr) Value: 6
  misc_feature: MA Experiment 108585 PARAMETER Experiment Name: At_5mM_NaNP_cDNA_P Parameter: Tissue Value: Aerial
  misc_feature: MA Experiment 108585 PARAMETER Experiment Name: At_5mM_NaNP_cDNA_P Parameter: Treatment Value: null
  misc_feature: MA Experiment ID: 20000112 Result: Up-regulated in Transcription
  misc_feature: MA Experiment 20000112 PARAMETER Experiment Name: At_42deg_Heat_cDNA_P Parameter: Temperature (deg C) Value: 42 vs. 22
  misc_feature: MA Experiment 20000112 PARAMETER Experiment Name: At_42deg_Heat_cDNA_P Parameter: Timepoint (hr) Value: 2
  misc_feature: MA Experiment 20000112 PARAMETER Experiment Name: At_42deg_Heat_cDNA_P Parameter: Tissue Value: Aerial
  misc_feature: MA Experiment ID: 20000113 Result: Up-regulated in Transcription
  misc_feature: MA Experiment 20000113 PARAMETER Experiment Name: At_42deg_Heat_cDNA_P Parameter: Temperature (deg C) Value: 42 vs. 22
  misc_feature: MA Experiment 20000113 PARAMETER Experiment Name: At_42deg_Heat_cDNA_P Parameter: Timepoint (hr) Value: 8
  misc_feature: MA Experiment 20000113 PARAMETER Experiment Name: At_42deg_Heat_cDNA_P Parameter: Tissue Value: Aerial
  misc_feature: MA Experiment ID: 20000117 Result: Up-regulated in Transcription
  misc_feature: MA Experiment 20000117 PARAMETER Experiment Name: At_100uM_ABA_Mutants_cDNA_P Parameter: Plant Line Value: Columbia
  misc_feature: MA Experiment 20000117 PARAMETER Experiment Name: At_100uM_ABA_Mutants_cDNA_P Parameter: Timepoint (hr) Value: 6
  misc_feature: MA Experiment 20000117 PARAMETER Experiment Name: At_100uM_ABA_Mutants_cDNA_P Parameter: Tissue Value: Aerial
  misc_feature: MA Experiment 20000117 PARAMETER Experiment Name: At_100uM_ABA_Mutants_cDNA_P Parameter: Treatment Value: 100uM ABA vs. No Treatment
  misc_feature: MA Experiment ID: 20000144 Result: Up-regulated in Transcription
  misc_feature: MA Experiment 20000144 PARAMETER Experiment Name: At_42deg_Heat_cDNA_P Parameter: Temperature (deg C) Value: 42 vs. 22
  misc_feature: MA Experiment 20000144 PARAMETER Experiment Name: At_42deg_Heat_cDNA_P Parameter: Timepoint (hr) Value: 1
  misc_feature: MA Experiment 20000144 PARAMETER Experiment Name: At_42deg_Heat_cDNA_P Parameter: Tissue Value: Aerial
  misc_feature: MA Experiment ID: 20000171 Result: Up-regulated in Transcription
  misc_feature: MA Experiment 20000171 PARAMETER Experiment Name: At_42deg_Heat_P Parameter: Age (day) Value: 14
  misc_feature: MA Experiment 20000171 PARAMETER Experiment Name: At_42deg_Heat_P Parameter: Organism Value: A. thaliana
  misc_feature: MA Experiment 20000171 PARAMETER Experiment Name: At_42deg_Heat_P Parameter: Plant Line Value: WS
  misc_feature: MA Experiment 20000171 PARAMETER Experiment Name: At_42deg_Heat_P Parameter: Temperature (deg C) Value: 42 vs. 22
  misc_feature: MA Experiment 20000171 PARAMETER Experiment Name: At_42deg_Heat_P Parameter: Timepoint (hr) Value: 1
  misc_feature: MA Experiment 20000171 PARAMETER Experiment Name: At_42deg_Heat_P Parameter: Tissue Value: Aerial
  misc_feature: MA Experiment ID: 20000173 Result: Up-regulated in Transcription
  misc_feature: MA Experiment 20000173 PARAMETER Experiment Name: At_42deg_Heat_P Parameter: Age (day) Value: 14
  misc_feature: MA Experiment 20000173 PARAMETER Experiment Name: At_42deg_Heat_P Parameter: Organism Value: A. thaliana
  misc_feature: MA Experiment 20000173 PARAMETER Experiment Name: At_42deg_Heat_P Parameter: Plant Line Value: WS
  misc_feature: MA Experiment 20000173 PARAMETER Experiment Name: At_42deg_Heat_P Parameter: Temperature (deg C) Value: 42 vs. 22
  misc_feature: MA Experiment 20000173 PARAMETER Experiment Name: At_42deg_Heat_P Parameter: Timepoint (hr) Value: 6
  misc_feature: MA Experiment 20000173 PARAMETER Experiment Name: At_42deg_Heat_P Parameter: Tissue Value: Aerial
  misc_feature: MA Experiment ID: 20000180 Result: Down-regulated in Transcription
  misc_feature: MA Experiment 20000180 PARAMETER Experiment Name: At_Germinating_Seeds_P Parameter: Age (hr) Value: 24 vs. 0
  misc_feature: MA Experiment 20000180 PARAMETER Experiment Name: At_Germinating_Seeds_P Parameter: Tissue Value: Germinating Seeds
  misc_feature: MA Experiment ID: 20000184 Result: Down-regulated in Transcription
  misc_feature: MA Experiment 20000184 PARAMETER Experiment Name: At_Shoots__P Parameter: Age (day) Value: 7
  misc_feature: MA Experiment 20000184 PARAMETER Experiment Name: At_Shoots__P Parameter: Tissue Value: Shoots vs. Whole Plant
  misc_feature: MA Experiment ID: 20000436 Result: Up-regulated in Transcription
  misc_feature: MA Experiment 20000436 PARAMETER Experiment Name: At_Drought_P Parameter: Age (day) Value: 7
  misc_feature: MA Experiment 20000436 PARAMETER Experiment Name: At_Drought_P Parameter: Organism Value: A. thaliana
  misc_feature: MA Experiment 20000436 PARAMETER Experiment Name: At_Drought_P Parameter: Plant Line Value: WS
  misc_feature: MA Experiment 20000436 PARAMETER Experiment Name: At_Drought_P Parameter: Timepoint (hr) Value: 12
  misc_feature: MA Experiment 20000436 PARAMETER Experiment Name: At_Drought_P Parameter: Tissue Value: Whole Plant
  misc_feature: MA Experiment 20000436 PARAMETER Experiment Name: At_Drought_P Parameter: Treatment Value: Drought vs. No Drought
  misc_feature: MA Experiment ID: 20000437 Result: Up-regulated in Transcription
  misc_feature: MA Experiment 20000437 PARAMETER Experiment Name: At_Drought_P Parameter: Age (day) Value: 8
  misc_feature: MA Experiment 20000437 PARAMETER Experiment Name: At_Drought_P Parameter: Organism Value: A. thaliana
  misc_feature: MA Experiment 20000437 PARAMETER Experiment Name: At_Drought_P Parameter: Plant Line Value: WS
  misc_feature: MA Experiment 20000437 PARAMETER Experiment Name: At_Drought_P Parameter: Timepoint (hr) Value: 24
  misc_feature: MA Experiment 20000437 PARAMETER Experiment Name: At_Drought_P Parameter: Tissue Value: Whole Plant
  misc_feature: MA Experiment 20000437 PARAMETER Experiment Name: At_Drought_P Parameter: Treatment Value: Drought vs. No Drought
  misc_feature: MA Experiment ID: 20000495 Result: Down-regulated in Transcription
  misc_feature: MA Experiment 20000495 PARAMETER Experiment Name: At_Guard_Cells_P Parameter: Harvest Date Value: 8/2/2002
  misc_feature: MA Experiment 20000495 PARAMETER Experiment Name: At_Guard_Cells_P Parameter: Organism Value: A. thaliana
  misc_feature: MA Experiment 20000495 PARAMETER Experiment Name: At_Guard_Cells_P Parameter: Tissue Value: Guard Cells vs. Leaves
  misc_feature: MA Experiment ID: 20001904 Result: Up-regulated in Transcription
  misc_feature: MA Experiment 20001904 PARAMETER Experiment Name: At_Drought_Reproduction_P Parameter: Age (day) Value: 37
  misc_feature: MA Experiment 20001904 PARAMETER Experiment Name: At_Drought_Reproduction_P Parameter: Organism Value: A. thaliana
  misc_feature: MA Experiment 20001904 PARAMETER Experiment Name: At_Drought_Reproduction_P Parameter: Plant Line Value: WS
  misc_feature: MA Experiment 20001904 PARAMETER Experiment Name: At_Drought_Reproduction_P Parameter: Timepoint (day) Value: 7
  misc_feature: MA Experiment 20001904 PARAMETER Experiment Name: At_Drought_Reproduction_P Parameter: Tissue Value: Rosettes
  misc_feature: MA Experiment 20001904 PARAMETER Experiment Name: At_Drought_Reproduction_P Parameter: Treatment Value: Drought vs. No Drought
  misc_feature: MA Experiment ID: 20001911 Result: Up-regulated in Transcription
  misc_feature: MA Experiment 20001911 PARAMETER Experiment Name: At_Drought_Reproduction_P Parameter: Age (day) Value: 40
  misc_feature: MA Experiment 20001911 PARAMETER Experiment Name: At_Drought_Reproduction_P Parameter: Organism Value: A. thaliana
  misc_feature: MA Experiment 20001911 PARAMETER Experiment Name: At_Drought_Reproduction_P Parameter: Plant Line Value: WS
  misc_feature: MA Experiment 20001911 PARAMETER Experiment Name: At_Drought_Reproduction_P Parameter: Timepoint (day) Value: 10
  misc_feature: MA Experiment 20001911 PARAMETER Experiment Name: At_Drought_Reproduction_P Parameter: Tissue Value: Flowers
  misc_feature: MA Experiment 20001911 PARAMETER Experiment Name: At_Drought_Reproduction_P Parameter: Treatment Value: Drought vs. No Drought
aaaacttttattacacgaacacaacaaacaacacaagtgagagaaccctagattcttcttctattcccttcttccttcaagtcctttttatttctctaccaacctcgaaaacgaatcaagagattagcatcttatcgagatttaaaccatcaattaatcggctgccatggctgggagactacttgcaaatttgattgtgatgggttctgggatcattggtcgtgctgtctttcaagcctatcgtcaagcacttgctaatgcgtctaaatctggtgttgcgcaggaagcaatgcaaaatggagtacgtcaagcagggaaagccatcactgagcaagaggctaggcagattcttggtgtaaccgagaagacctcttgggaagagatattacagaaatatgacaaactgtttgagaataatgcgaaagcagggagcttttaccttcaatctaaagttcatcgagccaaagaatgtctagaagttgtgtacagaagccaaggcaacggtacacctagttaagaccttactctttttgttttccagactcaaaattcttgctcttaatgtaaaatcaagacgagttcatggtttctttgagatgatgtggaacttacaaaacggccatagttttcttcacacattaaattagtaataactaagacaggtttgctctgatcagttgatcagtgtcaaagaacctctgaaaactagaaaggattgttctgtttgtgtatgttttatccttctctcctgagagaagactcttttaaagctatccttcctgtttttgattcagattccaaactgatcatctacactctgtaatgtataatgtataataaaaaaacttcgc

SEQ ID NO: 37830 - protein, 116 aa, Arabidopsis thaliana
  peptide (1)..(116): Ceres Seq. ID no. 12488341
  misc_feature (1)..(114): Pfam Name: Uncharacterised protein family (UPF0108) Pfam Description: Uncharacterised protein family (UPF0108)
  misc_feature (1)..(104): Homolog of NCBI NO: 6322357 NR Description: Hypothetical ORF; Mia1p [Saccharomyces
  misc_feature (4)..(104): Homolog of NCBI NO: 19112141 NR Description: conserved hypothetical protein; similar to S.
  misc_feature (1)..(104): Homolog of NCBI NO: 32409779 NR Description: hypothetical protein [Neurospora crassa]
  misc_feature (12)..(108): Homolog of NCBI NO: 10176880 NR Description: gene_id:MAC9.20~unknown protein [Arabidopsis
  misc_feature (12)..(115): Homolog of NCBI NO: 37535410 NR Description: putative pol polyprotein [Oryza sativa (japonica
  misc_feature (1)..(108): Homolog of NCBI NO: 18424521 NR Description: auxin-regulated protein
  misc_feature (2)..(108): Homolog of NCBI NO: 34905796 NR Description: P0401G10.24 [Oryza sativa (japonica
  misc_feature (2)..(116): Homolog of NCBI NO: 11357639 NR Description: hypothetical protein F25L23.140 - Arabidopsis
  misc_feature (1)..(116): Homolog of NCBI NO: 18411133 NR Description: putative protein
MAGRLLANLIVMGSGIIGRAVFQAYRQALANASKSGVAQEAMQNGVRQAGKAITEQEARQILGVTEKTSWEEILQKYDKLFENNAKAGSFYLQSKVHRAKECLEVVYRSQGNGTPS

SEQ ID NO: 37831 - protein, 105 aa, Arabidopsis thaliana
  peptide (1)..(105): Ceres Seq. ID no. 12488342
  misc_feature (1)..(103): Pfam Name: Uncharacterised protein family (UPF0108) Pfam Description: Uncharacterised protein family (UPF0108)
  misc_feature (1)..(93): Homolog of NCBI NO: 6322357 NR Description: Hypothetical ORF; Mia1p [Saccharomyces
  misc_feature (1)..(93): Homolog of NCBI NO: 19112141 NR Description: conserved hypothetical protein; similar to S.
  misc_feature (1)..(93): Homolog of NCBI NO: 32409779 NR Description: hypothetical protein [Neurospora crassa]
  misc_feature (1)..(97): Homolog of NCBI NO: 10176880 NR Description: gene_id:MAC9.20~unknown protein [Arabidopsis
  misc_feature (1)..(104): Homolog of NCBI NO: 37535410 NR Description: putative pol polyprotein [Oryza sativa (japonica
  misc_feature (1)..(97): Homolog of NCBI NO: 18424521 NR Description: auxin-regulated protein
  misc_feature (1)..(97): Homolog of NCBI NO: 34905796 NR Description: P0401G10.24 [Oryza sativa (japonica
  misc_feature (1)..(105): Homolog of NCBI NO: 11357639 NR Description: hypothetical protein F25L23.140 - Arabidopsis
  misc_feature (1)..(105): Homolog of NCBI NO: 18411133 NR Description: putative protein
MGSGIIGRAVFQAYRQALANASKSGVAQEAMQNGVRQAGKAITEQEARQILGVTEKTSWEEILQKYDKLFENNAKAGSFYLQSKVHRAKECLEVVYRSQGNGTPS

SEQ ID NO: 37832 - protein, 75 aa, Arabidopsis thaliana
  peptide (1)..(75): Ceres Seq. ID no. 12488343
  misc_feature (1)..(73): Pfam Name: Uncharacterised protein family (UPF0108) Pfam Description: Uncharacterised protein family (UPF0108)
  misc_feature (1)..(63): Homolog of NCBI NO: 6322357 NR Description: Hypothetical ORF; Mia1p [Saccharomyces
  misc_feature (1)..(63): Homolog of NCBI NO: 19112141 NR Description: conserved hypothetical protein; similar to S.
  misc_feature (1)..(63): Homolog of NCBI NO: 32409779 NR Description: hypothetical protein [Neurospora crassa]
  misc_feature (1)..(67): Homolog of NCBI NO: 10176880 NR Description: gene_id:MAC9.20~unknown protein [Arabidopsis
  misc_feature (1)..(74): Homolog of NCBI NO: 37535410 NR Description: putative pol polyprotein [Oryza sativa (japonica
  misc_feature (1)..(67): Homolog of NCBI NO: 18424521 NR Description: auxin-regulated protein
  misc_feature (1)..(67): Homolog of NCBI NO: 34905796 NR Description: P0401G10.24 [Oryza sativa (japonica
  misc_feature (1)..(75): Homolog of NCBI NO: 11357639 NR Description: hypothetical protein F25L23.140 - Arabidopsis
  misc_feature (1)..(75): Homolog of NCBI NO: 18411133 NR Description: putative protein
MQNGVRQAGKAITEQEARQILGVTEKTSWEEILQKYDKLFENNAKAGSFYLQSKVHRAKECLEVVYRSQGNGTPS

SEQ ID NO: 37833 - DNA, 540 bp, Arabidopsis thaliana
  misc_feature (1)..(540): Ceres Seq. ID no. 12322554
  misc_feature: MA Experiment ID: 108462 Result: Up-regulated in Transcription
  misc_feature: MA Experiment 108462 PARAMETER Experiment Name: At_Germinating_Seeds_cDNA_P Parameter: Age (day) Value: 2 vs. 0
  misc_feature: MA Experiment 108462 PARAMETER Experiment Name: At_Germinating_Seeds_cDNA_P Parameter: Tissue Value: Germinating Seeds
  misc_feature: MA Experiment ID: 108463 Result: Up-regulated in Transcription
  misc_feature: MA Experiment 108463 PARAMETER Experiment Name: At_Germinating_Seeds_cDNA_P Parameter: Age (day) Value: 3 vs. 0
  misc_feature: MA Experiment 108463 PARAMETER Experiment Name: At_Germinating_Seeds_cDNA_P Parameter: Tissue Value: Germinating Seeds
  misc_feature: MA Experiment ID: 20000224 Result: Down-regulated in Transcription
  misc_feature: MA Experiment ID: 20000307 Result: Up-regulated in Transcription
  misc_feature: MA Experiment 20000307 PARAMETER Experiment Name: At_Germinating_Seeds_Sub_P Parameter: Age (hr) Value: 24 vs. 0
  misc_feature: MA Experiment 20000307 PARAMETER Experiment Name: At_Germinating_Seeds_Sub_P Parameter: Organism Value: A. thaliana
  misc_feature: MA Experiment 20000307 PARAMETER Experiment Name: At_Germinating_Seeds_Sub_P Parameter: Plant Line Value: WS
  misc_feature: MA Experiment 20000307 PARAMETER Experiment Name: At_Germinating_Seeds_Sub_P Parameter: Tissue Value: Germinating Seeds
  misc_feature: MA Experiment ID: 20000315 Result: Down-regulated in Transcription
  misc_feature: MA Experiment 20000315 PARAMETER Experiment Name: At_14day_Shoots-Roots_Sub_P Parameter: Age (day) Value: 14
  misc_feature: MA Experiment 20000315 PARAMETER Experiment Name: At_14day_Shoots-Roots_Sub_P Parameter: Organism Value: A. thaliana
  misc_feature: MA Experiment 20000315 PARAMETER Experiment Name: At_14day_Shoots-Roots_Sub_P Parameter: Plant Line Value: WS
  misc_feature: MA Experiment 20000315 PARAMETER Experiment Name: At_14day_Shoots-Roots_Sub_P Parameter: Tissue Value: Shoots vs. Whole Plant
  misc_feature: MA Experiment ID: 20001807 Result: Up-regulated in Transcription
  misc_feature: MA Experiment 20001807 PARAMETER Experiment Name: At_50mM_NH4NO3_L-to-H_Sub_P Parameter: Timepoint (hr) Value: 6
  misc_feature: MA Experiment 20001807 PARAMETER Experiment Name: At_50mM_NH4NO3_L-to-H_Sub_P Parameter: Tissue Value: Leaf
  misc_feature: MA Experiment 20001807 PARAMETER Experiment Name: At_50mM_NH4NO3_L-to-H_Sub_P Parameter: Treatment Value: 50mM NH4NO3 vs 100mM Mannitol
gtatgtactacagatctcaagctgcaatctgaactaatgggattgatgatgggagctgatccggggatatctgcgtttccagaggaagacaacatattttgctggaaaggaacaattacaggaagcaaagatactgtgttcgaaggaactgagtacagactctcactcactttctctaacgattatccttttaagtctcccaaagttaagtttgagacatgctgcttccaccccaatgtggatctctatggcaatatttgcttggacattcttcaggataaatggtcatctgcttatgatgtgaggacgatattactctcaattcaaagccttctcggagaaccgaacatcagctcaccattgaacaatcaagcggctcagctttggagcaatcaagaagagtacaggaagatggttgagaagctctacaagcctttaaacgcatgattctcaaaaatcactgtaactgattttaaaatctcaactgtattggatcatatctcttttacttttataatctcaatttgagccaatattagc

SEQ ID NO: 37834 - protein, 148 aa, Arabidopsis thaliana
  peptide (1)..(148): Ceres Seq. ID no. 12322555
  misc_feature (7)..(139): Homolog of NCBI NO: 40743465 NR Description: hypothetical protein AN5495.2 [Aspergillus
  misc_feature (7)..(144): Homolog of NCBI NO: 24663332 NR Description: vihar CG10682-PA
  misc_feature (7)..(144): Homolog of NCBI NO: 4388942 NR Description: E2-C, An Ubiquitin Conjugating Enzyme Required
  misc_feature (7)..(144): Homolog of NCBI NO: 3915196 NR Description: Ubiquitin-conjugating enzyme E2-C
  misc_feature (7)..(145): Homolog of NCBI NO: 34903234 NR Description: unnamed protein product [Oryza sativa (japonica
  misc_feature (7)..(148): Homolog of NCBI NO: 21618179 NR Description: E2, ubiquitin-conjugating enzyme, putative
  misc_feature (7)..(148): Homolog of NCBI NO: 18403097 NR Description: E2, ubiquitin-conjugating enzyme, putative
  misc_feature (7)..(148): Homolog of NCBI NO: 25293673 NR Description: hypothetical protein F17J6.3 [imported] -
  misc_feature (7)..(148): Homolog of NCBI NO: 9454557 NR Description: Putative ubiquitin carrier protein [Arabidopsis
  misc_feature (7)..(148): Homolog of NCBI NO: 18402475 NR Description: E2, ubiquitin-conjugating enzyme, putative
VCTTDLKLQSELMGLMMGADPGISAFPEEDNIFCWKGTITGSKDTVFEGTEYRLSLTFSNDYPFKSPKVKFETCCFHPNVDLYGNICLDILQDKWSSAYDVRTILLSIQSLLGEPNISSPLNNQAAQLWSNQEEYRKMVEKLYKPLNA

SEQ ID NO: 37835 - protein, 136 aa, Arabidopsis thaliana
  peptide (1)..(136): Ceres Seq. ID no. 12322556
  misc_feature (1)..(127): Homolog of NCBI NO: 40743465 NR Description: hypothetical protein AN5495.2 [Aspergillus
  misc_feature (1)..(132): Homolog of NCBI NO: 24663332 NR Description: vihar CG10682-PA
  misc_feature (1)..(132): Homolog of NCBI NO: 4388942 NR Description: E2-C, An Ubiquitin Conjugating Enzyme Required
  misc_feature (1)..(132): Homolog of NCBI NO: 3915196 NR Description: Ubiquitin-conjugating enzyme E2-C
  misc_feature (1)..(133): Homolog of NCBI NO: 34903234 NR Description: unnamed protein product [Oryza sativa (japonica
  misc_feature (1)..(136): Homolog of NCBI NO: 21618179 NR Description: E2, ubiquitin-conjugating enzyme, putative
  misc_feature (1)..(136): Homolog of NCBI NO: 25293673 NR Description: hypothetical protein F17J6.3 [imported] -
  misc_feature (1)..(136): Homolog of NCBI NO: 18403097 NR Description: E2, ubiquitin-conjugating enzyme, putative
  misc_feature (1)..(136): Homolog of NCBI NO: 9454557 NR Description: Putative ubiquitin carrier protein [Arabidopsis
  misc_feature (1)..(136): Homolog of NCBI NO: 18402475 NR Description: E2, ubiquitin-conjugating enzyme, putative
MGLMMGADPGISAFPEEDNIFCWKGTITGSKDTVFEGTEYRLSLTFSNDYPFKSPKVKFETCCFHPNVDLYGNICLDILQDKWSSAYDVRTILLSIQSLLGEPNISSPLNNQAAQLWSNQEEYRKMVEKLYKPLNA

SEQ ID NO: 37836 - protein, 133 aa, Arabidopsis thaliana
  peptide (1)..(133): Ceres Seq. ID no. 12322557
  misc_feature (1)..(124): Homolog of NCBI NO: 40743465 NR Description: hypothetical protein AN5495.2 [Aspergillus
  misc_feature (1)..(129): Homolog of NCBI NO: 24663332 NR Description: vihar CG10682-PA
  misc_feature (1)..(129): Homolog of NCBI NO: 4388942 NR Description: E2-C, An Ubiquitin Conjugating Enzyme Required
  misc_feature (1)..(129): Homolog of NCBI NO: 3915196 NR Description: Ubiquitin-conjugating enzyme E2-C
  misc_feature (1)..(130): Homolog of NCBI NO: 34903234 NR Description: unnamed protein product [Oryza sativa (japonica
  misc_feature (1)..(133): Homolog of NCBI NO: 21618179 NR Description: E2, ubiquitin-conjugating enzyme, putative
  misc_feature (1)..(133): Homolog of NCBI NO: 25293673 NR Description: hypothetical protein F17J6.3 [imported] -
  misc_feature (1)..(133): Homolog of NCBI NO: 18403097 NR Description: E2, ubiquitin-conjugating enzyme, putative
  misc_feature (1)..(133): Homolog of NCBI NO: 9454557 NR Description: Putative ubiquitin carrier protein [Arabidopsis
  misc_feature (1)..(133): Homolog of NCBI NO: 18402475 NR Description: E2, ubiquitin-conjugating enzyme, putative
MMGADPGISAFPEEDNIFCWKGTITGSKDTVFEGTEYRLSLTFSNDYPFKSPKVKFETCCFHPNVDLYGNICLDILQDKWSSAYDVRTILLSIQSLLGEPNISSPLNNQAAQLWSNQEEYRKMVEKLYKPLNA

SEQ ID NO: 37837 - DNA, 1024 bp, Arabidopsis thaliana
  misc_feature (1)..(1024): Ceres Seq. ID no. 13487023
  misc_feature: MA Experiment ID: 108434 Result: Down-regulated in Transcription
  misc_feature: MA Experiment 108434 PARAMETER Experiment Name: At_Root_Tips_cDNA_P Parameter: Tissue Value: Root Tips
  misc_feature: MA Experiment ID: 108595 Result: Down-regulated in Transcription
  misc_feature: MA Experiment 108595 PARAMETER Experiment Name: At_Ler-pi_Ovule_cDNA_P Parameter: Plant Line Value: null
  misc_feature: MA Experiment ID: 20000069 Result: Up-regulated in Transcription
  misc_feature: MA Experiment 20000069 PARAMETER Experiment Name: At_100uM_ABA_Mutants_cDNA_P Parameter: Plant Line Value: CS23
  misc_feature: MA Experiment 20000069 PARAMETER Experiment Name: At_100uM_ABA_Mutants_cDNA_P Parameter: Timepoint (hr) Value: 6
  misc_feature: MA Experiment 20000069 PARAMETER Experiment Name: At_100uM_ABA_Mutants_cDNA_P Parameter: Tissue Value: Aerial
  misc_feature: MA Experiment 20000069 PARAMETER Experiment Name: At_100uM_ABA_Mutants_cDNA_P Parameter: Treatment Value: 100uM ABA vs. No Treatment
  misc_feature: MA Experiment ID: 20000086 Result: Up-regulated in Transcription
  misc_feature: MA Experiment 20000086 PARAMETER Experiment Name: At_100uM_ABA_Mutants_cDNA_P Parameter: Plant Line Value: CS22
  misc_feature: MA Experiment 20000086 PARAMETER Experiment Name: At_100uM_ABA_Mutants_cDNA_P Parameter: Timepoint (hr) Value: 6
  misc_feature: MA Experiment 20000086 PARAMETER Experiment Name: At_100uM_ABA_Mutants_cDNA_P Parameter: Tissue Value: Aerial
  misc_feature: MA Experiment 20000086 PARAMETER Experiment Name: At_100uM_ABA_Mutants_cDNA_P Parameter: Treatment Value: 100uM ABA vs. No Treatment
  misc_feature: MA Experiment ID: 20000087 Result: Up-regulated in Transcription
  misc_feature: MA Experiment 20000087 PARAMETER Experiment Name: At_100uM_ABA_Mutants_cDNA_P Parameter: Plant Line Value: WS
  misc_feature: MA Experiment 20000087 PARAMETER Experiment Name: At_100uM_ABA_Mutants_cDNA_P Parameter: Timepoint (hr) Value: 6
  misc_feature: MA Experiment 20000087 PARAMETER Experiment Name: At_100uM_ABA_Mutants_cDNA_P Parameter: Tissue Value: Aerial
  misc_feature: MA Experiment 20000087 PARAMETER Experiment Name: At_100uM_ABA_Mutants_cDNA_P Parameter: Treatment Value: 100uM ABA vs. No Treatment
  misc_feature: MA Experiment ID: 20000088 Result: Up-regulated in Transcription
  misc_feature: MA Experiment 20000088 PARAMETER Experiment Name: At_100uM_ABA_Mutants_cDNA_P Parameter: Plant Line Value: Landsberg
  misc_feature: MA Experiment 20000088 PARAMETER Experiment Name: At_100uM_ABA_Mutants_cDNA_P Parameter: Timepoint (hr) Value: 6
  misc_feature: MA Experiment 20000088 PARAMETER Experiment Name: At_100uM_ABA_Mutants_cDNA_P Parameter: Tissue Value: Aerial
  misc_feature: MA Experiment 20000088 PARAMETER Experiment Name: At_100uM_ABA_Mutants_cDNA_P Parameter: Treatment Value: 100uM ABA vs. No Treatment
  misc_feature: MA Experiment ID: 20000184 Result: Down-regulated in Transcription
  misc_feature: MA Experiment 20000184 PARAMETER Experiment Name: At_Shoots__P Parameter: Age (day) Value: 7
  misc_feature: MA Experiment 20000184 PARAMETER Experiment Name: At_Shoots__P Parameter: Tissue Value: Shoots vs. Whole Plant
  misc_feature: MA Experiment ID: 20000573 Result: Down-regulated in Transcription
  misc_feature: MA Experiment 20000573 PARAMETER Experiment Name: At_100uM_ABA_Mutants__P Parameter: Organism Value: A. thaliana
  misc_feature: MA Experiment 20000573 PARAMETER Experiment Name: At_100uM_ABA_Mutants__P Parameter: Plant Line Value: CS22 vs. Ler wt
  misc_feature: MA Experiment 20000573 PARAMETER Experiment Name: At_100uM_ABA_Mutants__P Parameter: Timepoint (hr) Value: N/A
  misc_feature: MA Experiment 20000573 PARAMETER Experiment Name: At_100uM_ABA_Mutants__P Parameter: Tissue Value: Whole Plant
  misc_feature: MA Experiment 20000573 PARAMETER Experiment Name: At_100uM_ABA_Mutants__P Parameter: Treatment Value: None
  misc_feature: MA Experiment ID: 20000574 Result: Down-regulated in Transcription
  misc_feature: MA Experiment 20000574 PARAMETER Experiment Name: At_100uM_ABA_Mutants__P Parameter: Organism Value: A. thaliana
  misc_feature: MA Experiment 20000574 PARAMETER Experiment Name: At_100uM_ABA_Mutants__P Parameter: Plant Line Value: CS23 vs. Ler wt
  misc_feature: MA Experiment 20000574 PARAMETER Experiment Name: At_100uM_ABA_Mutants__P Parameter: Timepoint (hr) Value: N/A
  misc_feature: MA Experiment 20000574 PARAMETER Experiment Name: At_100uM_ABA_Mutants__P Parameter: Tissue Value: Whole Plant
  misc_feature: MA Experiment 20000574 PARAMETER Experiment Name: At_100uM_ABA_Mutants__P Parameter: Treatment Value: None
agatcattcatagacgtacgcatcatcaaatcaattcatcgtcgtcttccacaattgtcatcaccgatcgattttccgactccgacgtacctcctcttccccgttaccttctcagagtttttagtagtcttcctttggaacaatgagtgacgtgtttgatggatatgagcgacaatactgtgagctctcggcgagtctttcaaagaagtgttcctctgctatttcgcttgatggagaacaaaagaagcagaagttgtctgaaataaaatccgggctggaaaatgcagaagtattgattaggaaaatggatctcgaggcaaggacccttccacctaatcttaagtccagcctccttgtcaaattaagagaattcaagtctgatctgaacaatttcaaaactgaagtgaagagaatcacatctggacagttgaacgctgctgctcgtgatgagttgctagaagctggtatggctgacacaaagacggcttcagctgatcagagagcaagattgatgatgtcaactgagcgtctgggccgaaccactgacagagtcaaggacagtcgtagaacaatgatggagactgaagaaatcggtgtttcaatcctccaagacttgcacggtcagagacagtctctcttacgtgcccacgaaacgcttcatggagtagacgataacattggaaagagcaagaagatcttgacagacatgacgaggaggatgaacaagaacaaatggaccattggagccatcatcatcgcattgattgccgccattttcatcatcttgtacttcaaactcaccaagtaagcctctgtaactaaatccgaccaaatcaaagaacaacggttgttttcgttttgtgagtctttgatttatcctgtttcttctttttgtgtgaaaagttgttttgccacctttgtattctaaatttgaccatacatactttaagcaagtaaagcttcggcctaagtgtcacgtatattgtttatattgttcatatcaaatccagaactatacatggtt

SEQ ID NO: 37838 - protein, 221 aa, Arabidopsis thaliana
  peptide (1)..(221): Ceres Seq. ID no. 13487024
  misc_feature (41)..(196): Pfam Name: Vesicle transport v-SNARE protein Pfam Description: Vesicle transport v-SNARE protein
  misc_feature (1)..(221): Homolog of NCBI NO: 9758339 NR Description: v-SNARE AtVTI1a-like protein [Arabidopsis
  misc_feature (1)..(220): Homolog of NCBI NO: 27805772 NR Description: Vesicle transport v-SNARE 12 (AtVTI12) (Vesicle v-SNARE protein VTI1b) (Vesicle soluble NSF attachment protein
  misc_feature (1)..(220): Homolog of NCBI NO: 6690276 NR Description: v-SNARE AtVTI1b [Arabidopsis thaliana]
  misc_feature (1)..(220): Homolog of NCBI NO: 18396008 NR Description: v-SNARE protein AtVTI1b, putative [Arabidopsis
  misc_feature (1)..(218): Homolog of NCBI NO: 34914100 NR Description: similar to vesicle transport protein
  misc_feature (55)..(221): Homolog of NCBI NO: 26451552 NR Description: putative vesicle transport protein [Arabidopsis
  misc_feature (1)..(219): Homolog of NCBI NO: 34910406 NR Description: putative vesicle transport v-SNARE protein
  misc_feature (1)..(221): Homolog of NCBI NO: 15228600 NR Description: SNARE protein AtVTI13 [Arabidopsis thaliana]
  misc_feature (1)..(221): Homolog of NCBI NO: 6690274 NR Description: v-SNARE AtVTI1a [Arabidopsis thaliana]
  misc_feature (1)..(221): Homolog of NCBI NO: 15241780 NR Description: v-SNARE AtVTI1a (ZIG) [Arabidopsis thaliana]
MSDVFDGYERQYCELSASLSKKCSSAISLDGEQKKQKLSEIKSGLENAEVLIRKMDLEARTLPPNLKSSLLVKLREFKSDLNNFKTEVKRITSGQLNAAARDELLEAGMADTKTASADQRARLMMSTERLGRTTDRVKDSRRTMMETEEIGVSILQDLHGQRQSLLRAHETLHGVDDNIGKSKKILTDMTRRMNKNKWTIGAIIIALIAAIFIILYFKLTK

SEQ ID NO: 37839 - protein, 167 aa, Arabidopsis thaliana
  peptide (1)..(167): Ceres Seq. ID no. 13487025
  misc_feature (1)..(142): Pfam Name: Vesicle transport v-SNARE protein Pfam Description: Vesicle transport v-SNARE protein
  misc_feature (1)..(167): Homolog of NCBI NO: 9758339 NR Description: v-SNARE AtVTI1a-like protein [Arabidopsis
  misc_feature (1)..(166): Homolog of NCBI NO: 27805772 NR Description: Vesicle transport v-SNARE 12 (AtVTI12) (Vesicle v-SNARE protein VTI1b) (Vesicle soluble NSF attachment protein
  misc_feature (1)..(166): Homolog of NCBI NO: 6690276 NR Description: v-SNARE AtVTI1b [Arabidopsis thaliana]
  misc_feature (1)..(166): Homolog of NCBI NO: 18396008 NR Description: v-SNARE protein AtVTI1b, putative [Arabidopsis
  misc_feature (1)..(164): Homolog of NCBI NO: 34914100 NR Description: similar to vesicle transport protein
  misc_feature (1)..(167): Homolog of NCBI NO: 26451552 NR Description: putative vesicle transport protein [Arabidopsis
  misc_feature (1)..(165): Homolog of NCBI NO: 34910406 NR Description: putative vesicle transport v-SNARE protein
  misc_feature (1)..(167): Homolog of NCBI NO: 15228600 NR Description: SNARE protein AtVTI13 [Arabidopsis thaliana]
  misc_feature (1)..(167): Homolog of NCBI NO: 6690274 NR Description: v-SNARE AtVTI1a [Arabidopsis thaliana]
  misc_feature (1)..(167): Homolog of NCBI NO: 15241780 NR Description: v-SNARE AtVTI1a (ZIG) [Arabidopsis thaliana]
MDLEARTLPPNLKSSLLVKLREFKSDLNNFKTEVKRITSGQLNAAARDELLEAGMADTKTASADQRARLMMSTERLGRTTDRVKDSRRTMMETEEIGVSILQDLHGQRQSLLRAHETLHGVDDNIGKSKKILTDMTRRMNKNKWTIGAIIIALIAAIFIILYFKLTK

SEQ ID NO: 37840 - protein, 113 aa, Arabidopsis thaliana
  peptide (1)..(113): Ceres Seq. ID no. 13487026
  misc_feature (1)..(88): Pfam Name: Vesicle transport v-SNARE protein Pfam Description: Vesicle transport v-SNARE protein
  misc_feature (1)..(113): Homolog of NCBI NO: 9758339 NR Description: v-SNARE AtVTI1a-like protein [Arabidopsis
  misc_feature (1)..(112): Homolog of NCBI NO: 27805772 NR Description: Vesicle transport v-SNARE 12 (AtVTI12) (Vesicle v-SNARE protein VTI1b) (Vesicle soluble NSF attachment protein
  misc_feature (1)..(112): Homolog of NCBI NO: 6690276 NR Description: v-SNARE AtVTI1b [Arabidopsis thaliana]
  misc_feature (1)..(112): Homolog of NCBI NO: 18396008 NR Description: v-SNARE protein AtVTI1b, putative [Arabidopsis
  misc_feature (1)..(110): Homolog of NCBI NO: 34914100 NR Description: similar to vesicle transport protein
  misc_feature (1)..(113): Homolog of NCBI NO: 26451552 NR Description: putative vesicle transport protein [Arabidopsis
  misc_feature (1)..(111): Homolog of NCBI NO: 34910406 NR Description: putative vesicle transport v-SNARE protein
  misc_feature (1)..(113): Homolog of NCBI NO: 15228600 NR Description: SNARE protein AtVTI13 [Arabidopsis thaliana]
  misc_feature (1)..(113): Homolog of NCBI NO: 6690274 NR Description: v-SNARE AtVTI1a [Arabidopsis thaliana]
  misc_feature (1)..(113): Homolog of NCBI NO: 15241780 NR Description: v-SNARE AtVTI1a (ZIG) [Arabidopsis thaliana]
MADTKTASADQRARLMMSTERLGRTTDRVKDSRRTMMETEEIGVSILQDLHGQRQSLLRAHETLHGVDDNIGKSKKILTDMTRRMNKNKWTIGAIIIALIAAIFIILYFKLTK

SEQ ID NO: 37841 - DNA, 1894 bp, Arabidopsis thaliana; identical to SEQ ID NO: 22903
  misc_feature (1)..(1894): Ceres Seq. ID no. 12327192
  misc_feature: MA Experiment ID: 20000169 Result: Up-regulated in Transcription
  misc_feature: MA Experiment 20000169 PARAMETER Experiment Name: At_100uM_ABA_P Parameter: Age (day) Value: 14
  misc_feature: MA Experiment 20000169 PARAMETER Experiment Name: At_100uM_ABA_P Parameter: Organism Value: A. thaliana
  misc_feature: MA Experiment 20000169 PARAMETER Experiment Name: At_100uM_ABA_P Parameter: Plant Line Value: WS
  misc_feature: MA Experiment 20000169 PARAMETER Experiment Name: At_100uM_ABA_P Parameter: Timepoint (hr) Value: 6
  misc_feature: MA Experiment 20000169 PARAMETER Experiment Name: At_100uM_ABA_P Parameter: Tissue Value: Aerial
  misc_feature: MA Experiment 20000169 PARAMETER Experiment Name: At_100uM_ABA_P Parameter: Treatment Value: 100uM ABA vs. No Treatment
  misc_feature: MA Experiment ID: 20000184 Result: Down-regulated in Transcription
  misc_feature: MA Experiment 20000184 PARAMETER Experiment Name: At_Shoots__P Parameter: Age (day) Value: 7
  misc_feature: MA Experiment 20000184 PARAMETER Experiment Name: At_Shoots__P Parameter: Tissue Value: Shoots vs. Whole Plant
  misc_feature: MA Experiment ID: 20000234 Result: Down-regulated in Transcription
  misc_feature: MA Experiment 20000234 PARAMETER Experiment Name: At_Siliques_P Parameter: Age (day) Value: 21
  misc_feature: MA Experiment 20000234 PARAMETER Experiment Name: At_Siliques_P Parameter: Organism Value: A. thaliana
  misc_feature: MA Experiment 20000234 PARAMETER Experiment Name: At_Siliques_P Parameter: Plant Line Value: WS
  misc_feature: MA Experiment 20000234 PARAMETER Experiment Name: At_Siliques_P Parameter: Tissue Value: Less Than 5mm Siliques vs. Whole Plant
  misc_feature: MA Experiment ID: 20000235 Result: Down-regulated in Transcription
  misc_feature: MA Experiment 20000235 PARAMETER Experiment Name: At_Siliques_P Parameter: Age (day) Value: 21
  misc_feature: MA Experiment 20000235 PARAMETER Experiment Name: At_Siliques_P Parameter: Organism Value: A. thaliana
  misc_feature: MA Experiment 20000235 PARAMETER Experiment Name: At_Siliques_P Parameter: Plant Line Value: WS
  misc_feature: MA Experiment 20000235 PARAMETER Experiment Name: At_Siliques_P Parameter: Tissue Value: 5-10mm Siliques vs. Whole Plant
  misc_feature: MA Experiment ID: 20000264 Result: Down-regulated in Transcription
  misc_feature: MA Experiment 20000264 PARAMETER Experiment Name: At_Open_Flower_P Parameter: Age (day) Value: 21
  misc_feature: MA Experiment 20000264 PARAMETER Experiment Name: At_Open_Flower_P Parameter: Plant Line Value: WS
  misc_feature: MA Experiment 20000264 PARAMETER Experiment Name: At_Open_Flower_P Parameter: Tissue Value: Open Flower vs. Whole Plant
  misc_feature: MA Experiment ID: 20000265 Result: Down-regulated in Transcription
  misc_feature: MA Experiment 20000265 PARAMETER Experiment Name: At_Open_Flower_P Parameter: Age (day) Value: 21
  misc_feature: MA Experiment 20000265 PARAMETER Experiment Name: At_Open_Flower_P Parameter: Plant Line Value: WS
  misc_feature: MA Experiment 20000265 PARAMETER Experiment Name: At_Open_Flower_P Parameter: Tissue Value: Closed Flower vs. Whole Plant
  misc_feature: MA Experiment ID: 20000286 Result: Down-regulated in Transcription
  misc_feature: MA Experiment 20000286 PARAMETER Experiment Name: At_Open_Flower_P Parameter: Age (day) Value: 21
  misc_feature: MA Experiment 20000286 PARAMETER Experiment Name: At_Open_Flower_P Parameter: Plant Line Value: WS
  misc_feature: MA Experiment 20000286 PARAMETER Experiment Name: At_Open_Flower_P Parameter: Tissue Value: Half Open vs. Whole Plant
  misc_feature: MA Experiment ID: 20000437 Result: Up-regulated in Transcription
  misc_feature: MA Experiment 20000437 PARAMETER Experiment Name: At_Drought_P Parameter: Age (day) Value: 8
  misc_feature: MA Experiment 20000437 PARAMETER Experiment Name: At_Drought_P Parameter: Organism Value: A. thaliana
  misc_feature: MA Experiment 20000437 PARAMETER Experiment Name: At_Drought_P Parameter: Plant Line Value: WS
  misc_feature: MA Experiment 20000437 PARAMETER Experiment Name: At_Drought_P Parameter: Timepoint (hr) Value: 24
  misc_feature: MA Experiment 20000437 PARAMETER Experiment Name: At_Drought_P Parameter: Tissue Value: Whole Plant
  misc_feature: MA Experiment 20000437 PARAMETER Experiment Name: At_Drought_P Parameter: Treatment Value: Drought vs. No Drought
  misc_feature: MA Experiment ID: 20000453 Result: Up-regulated in Transcription
  misc_feature: MA Experiment 20000453 PARAMETER Experiment Name: At_100uM_ABA_P Parameter: Age (day) Value: 15
  misc_feature: MA Experiment 20000453 PARAMETER Experiment Name: At_100uM_ABA_P Parameter: Organism Value: A. thaliana
  misc_feature: MA Experiment 20000453 PARAMETER Experiment Name: At_100uM_ABA_P Parameter: Plant Line Value: WS
  misc_feature: MA Experiment 20000453 PARAMETER Experiment Name: At_100uM_ABA_P Parameter: Timepoint (hr) Value: 24
  misc_feature: MA Experiment 20000453 PARAMETER Experiment Name: At_100uM_ABA_P Parameter: Tissue Value: Aerial
  misc_feature: MA Experiment 20000453 PARAMETER Experiment Name: At_100uM_ABA_P Parameter: Treatment Value: 100uM ABA vs. No Treatment
  misc_feature: MA Experiment ID: 20001458 Result: Up-regulated in Transcription
  misc_feature: MA Experiment 20001458 PARAMETER Experiment Name: At_50mM_NH4NO3_L-to-H_P Parameter: Age (day) Value: Undefined
  misc_feature: MA Experiment 20001458 PARAMETER Experiment Name: At_50mM_NH4NO3_L-to-H_P Parameter: Organism Value: Undefined
  misc_feature: MA Experiment 20001458 PARAMETER Experiment Name: At_50mM_NH4NO3_L-to-H_P Parameter: Plant Line Value: Undefined
  misc_feature: MA Experiment 20001458 PARAMETER Experiment Name: At_50mM_NH4NO3_L-to-H_P Parameter: Timepoint (hr) Value: 2
  misc_feature: MA Experiment 20001458 PARAMETER Experiment Name: At_50mM_NH4NO3_L-to-H_P Parameter: Tissue Value: Siliques
  misc_feature: MA Experiment 20001458 PARAMETER Experiment Name: At_50mM_NH4NO3_L-to-H_P Parameter: Treatment Value: 50mM NH4NO3 vs. 100mM Manitol
  misc_feature: MA Experiment ID: 20001459 Result: Up-regulated in Transcription
  misc_feature: MA Experiment 20001459 PARAMETER Experiment Name: At_50mM_NH4NO3_L-to-H_P Parameter: Age (day) Value: Undefined
  misc_feature: MA Experiment 20001459 PARAMETER Experiment Name: At_50mM_NH4NO3_L-to-H_P Parameter: Organism Value: Undefined
  misc_feature: MA Experiment 20001459 PARAMETER Experiment Name: At_50mM_NH4NO3_L-to-H_P Parameter: Plant Line Value: Undefined
  misc_feature: MA Experiment 20001459 PARAMETER Experiment Name: At_50mM_NH4NO3_L-to-H_P Parameter: Timepoint (hr) Value: 4
  misc_feature: MA Experiment 20001459 PARAMETER Experiment Name: At_50mM_NH4NO3_L-to-H_P Parameter: Tissue Value: Siliques
  misc_feature: MA Experiment 20001459 PARAMETER Experiment Name: At_50mM_NH4NO3_L-to-H_P Parameter: Treatment Value: 50mM NH4NO3 vs. 100mM Manitol
  misc_feature: MA Experiment ID: 20001759 Result: Up-regulated in Transcription
  misc_feature: MA Experiment 20001759 PARAMETER Experiment Name: At_50mM_NH4NO3_L-to-H_P Parameter: Timepoint (hr) Value: 1
  misc_feature: MA Experiment 20001759 PARAMETER Experiment Name: At_50mM_NH4NO3_L-to-H_P Parameter: Tissue Value: Siliques
  misc_feature: MA Experiment 20001759 PARAMETER Experiment Name: At_50mM_NH4NO3_L-to-H_P Parameter: Treatment Value: 50mM NH4NO3 vs 100mM Mannitol

SEQ ID NO: 37842 - protein, 542 aa, Arabidopsis thaliana; identical to SEQ ID NO: 22904
  peptide (1)..(542): Ceres Seq. ID no. 12327193
  misc_feature (1)..(542): Homolog of NCBI NO: 38346079 NR Description: OSJNBa0084K01.19 [Oryza sativa (japonica
  misc_feature (1)..(542): Homolog of NCBI NO: 27450531 NR Description: hypothetical protein [Prunus persica]
  misc_feature (1)..(542): Homolog of NCBI NO: 15010732 NR Description: AT5g39590/MIJ24_60 [Arabidopsis thaliana]
  misc_feature (1)..(542): Homolog of NCBI NO: 15241814 NR Description: putative protein
  misc_feature (1)..(542): Homolog of NCBI NO: 38346079 NR Description: OSJNBa0084K01.19 [Oryza sativa (japonica
  misc_feature (1)..(542): Homolog of NCBI NO: 27450531 NR Description: hypothetical protein [Prunus persica]
  misc_feature (1)..(542): Homolog of NCBI NO: 15010732 NR Description: AT5g39590/MIJ24_60 [Arabidopsis thaliana]
  misc_feature (1)..(542): Homolog of NCBI NO: 15241814 NR Description: putative protein

SEQ ID NO: 37843 - protein, 430 aa, Arabidopsis thaliana; identical to SEQ ID NO: 22905
  peptide (1)..(430): Ceres Seq. ID no. 12327194
  misc_feature (1)..(430): Homolog of NCBI NO: 38346079 NR Description: OSJNBa0084K01.19 [Oryza sativa (japonica
  misc_feature (1)..(430): Homolog of NCBI NO: 27450531 NR Description: hypothetical protein [Prunus persica]
  misc_feature (1)..(430): Homolog of NCBI NO: 15010732 NR Description: AT5g39590/MIJ24_60 [Arabidopsis thaliana]
  misc_feature (1)..(430): Homolog of NCBI NO: 15241814 NR Description: putative protein
  misc_feature (1)..(430): Homolog of NCBI NO: 38346079 NR Description: OSJNBa0084K01.19 [Oryza sativa (japonica
  misc_feature (1)..(430): Homolog of NCBI NO: 27450531 NR Description: hypothetical protein [Prunus persica]
  misc_feature (1)..(430): Homolog of NCBI NO: 15010732 NR Description: AT5g39590/MIJ24_60 [Arabidopsis thaliana]
  misc_feature (1)..(430): Homolog of NCBI NO: 15241814 NR Description: putative protein

SEQ ID NO: 37844 - protein, 426 aa, Arabidopsis thaliana; identical to SEQ ID NO: 22906
  peptide (1)..(426): Ceres Seq. ID no. 12327195
  misc_feature (1)..(426): Homolog of NCBI NO: 38346079 NR Description: OSJNBa0084K01.19 [Oryza sativa (japonica
  misc_feature (1)..(426): Homolog of NCBI NO: 27450531 NR Description: hypothetical protein [Prunus persica]
  misc_feature (1)..(426): Homolog of NCBI NO: 15010732 NR Description: AT5g39590/MIJ24_60 [Arabidopsis thaliana]
  misc_feature (1)..(426): Homolog of NCBI NO: 15241814 NR Description: putative protein
  misc_feature (1)..(426): Homolog of NCBI NO: 38346079 NR Description: OSJNBa0084K01.19 [Oryza sativa (japonica
  misc_feature (1)..(426): Homolog of NCBI NO: 27450531 NR Description: hypothetical protein [Prunus persica]
  misc_feature (1)..(426): Homolog of NCBI NO: 15010732 NR Description: AT5g39590/MIJ24_60 [Arabidopsis thaliana]
  misc_feature (1)..(426): Homolog of NCBI NO: 15241814 NR Description: putative protein

SEQ ID NO: 37845 - DNA, 1244 bp, Arabidopsis thaliana
  misc_feature (1)..(1244): Ceres Seq. ID no. 12322558
  misc_feature: MA Experiment ID: 20000111 Result: Down-regulated in Transcription
  misc_feature: MA Experiment 20000111 PARAMETER Experiment Name: At_42deg_Heat_cDNA_P Parameter: Temperature (deg C) Value: 42 vs. 22
  misc_feature: MA Experiment 20000111 PARAMETER Experiment Name: At_42deg_Heat_cDNA_P Parameter: Timepoint (hr) Value: 6
  misc_feature: MA Experiment 20000111 PARAMETER Experiment Name: At_42deg_Heat_cDNA_P Parameter: Tissue Value: Aerial
  misc_feature: MA Experiment ID: 20000113 Result: Down-regulated in Transcription
  misc_feature: MA Experiment 20000113 PARAMETER Experiment Name: At_42deg_Heat_cDNA_P Parameter: Temperature (deg C) Value: 42 vs. 22
  misc_feature: MA Experiment 20000113 PARAMETER Experiment Name: At_42deg_Heat_cDNA_P Parameter: Timepoint (hr) Value: 8
  misc_feature: MA Experiment 20000113 PARAMETER Experiment Name: At_42deg_Heat_cDNA_P Parameter: Tissue Value: Aerial
  misc_feature: MA Experiment ID: 20000173 Result: Down-regulated in Transcription
  misc_feature: MA Experiment 20000173 PARAMETER Experiment Name: At_42deg_Heat_P Parameter: Age (day) Value: 14
  misc_feature: MA Experiment 20000173 PARAMETER Experiment Name: At_42deg_Heat_P Parameter: Organism Value: A. thaliana
  misc_feature: MA Experiment 20000173 PARAMETER Experiment Name: At_42deg_Heat_P Parameter: Plant Line Value: WS
  misc_feature: MA Experiment 20000173 PARAMETER Experiment Name: At_42deg_Heat_P Parameter: Temperature (deg C) Value: 42 vs. 22
  misc_feature: MA Experiment 20000173 PARAMETER Experiment Name: At_42deg_Heat_P Parameter: Timepoint (hr) Value: 6
  misc_feature: MA Experiment 20000173 PARAMETER Experiment Name: At_42deg_Heat_P Parameter: Tissue Value: Aerial
  misc_feature: MA Experiment ID: 20000235 Result: Up-regulated in Transcription
  misc_feature: MA Experiment 20000235 PARAMETER Experiment Name: At_Siliques_P Parameter: Age (day) Value: 21
  misc_feature: MA Experiment 20000235 PARAMETER Experiment Name: At_Siliques_P Parameter: Organism Value: A. thaliana
  misc_feature: MA Experiment 20000235 PARAMETER Experiment Name: At_Siliques_P Parameter: Plant Line Value: WS
  misc_feature: MA Experiment 20000235 PARAMETER Experiment Name: At_Siliques_P Parameter: Tissue Value: 5-10mm Siliques vs. Whole Plant
  misc_feature: MA Experiment ID: 20000265 Result: Up-regulated in Transcription
  misc_feature: MA Experiment 20000265 PARAMETER Experiment Name: At_Open_Flower_P Parameter: Age (day) Value: 21
  misc_feature: MA Experiment 20000265 PARAMETER Experiment Name: At_Open_Flower_P Parameter: Plant Line Value: WS
  misc_feature: MA Experiment 20000265 PARAMETER Experiment Name: At_Open_Flower_P Parameter: Tissue Value: Closed Flower vs. Whole Plant
actcctaaaaactataatcattgagaaacccattttaagattacatcaatcatcatcgctcttagagagaaactggagcaacttctcaaattttagccttttttttgtttttgcattttgcctaatcggtgcttctccagatttcgcttatcttgttcctatagcataacaatggcggatttcaaaccaaggatcgagatttcgttccttgaaaccttcatttgcagcgctttcgctgcttgttttgctgagttatgtactataccgttggacacagccaaagttagacttcagcttcaaagaaagattcccactggagatggtgagaatttgcccaagtatagaggatcaattggtactctagctaccatagctagagaagaaggtatttcaggtctttggaaaggtgttattgcaggacttcatcgccaatgtatctatggtggcttaaggattgggttatatgagcctgtgaagacacttttggttggaagtgactttattggcgatattcctttatatcaaaagattcttgcagctttgttaactggagctatagctattattgtagctaatccaactgatcttgttaaagttcggcttcaatcagaaggaaagttaccggctggggttcctaggcgttatgcaggagctgtagacgcttatttcaccattgtgaagctggaaggagttagtgcgctatggactggacttggtcccaatattgcccggaatgctattgtaaatgctgcagagttagctagttatgatcaaataaaggagacaattatgaaaattccgttcttcagagacagtgttttaactcatctactagctggtttagctgcaggcttcttcgctgtctgcatcggttctccaattgatgtggtgaaatctagaatgatgggagactctacttaccgaaacacagtcgattgcttcatcaaaacgatgaagaccgaggggattatggcattctacaaaggatttctcccgaattttacacggctaggaacctggaatgccattatgttcctcacattagaacaagtgaaaaaagtgtttctaagagaagtcttgtacgattgattctcagatccctagtcgaaaaccataccttattacataatcccttctataaaactttgaattgttagaattaaaacatatatactttctatgttatgtgagctttgttatttagattagtatagaaacattttatccaaaaaaaaattctttgc

SEQ ID NO: 37846 - protein, 305 aa, Arabidopsis thaliana
  peptide (1)..(305): Ceres Seq. ID no. 12322559
  misc_feature (1)..(215): Homolog of NCBI NO: 7106159 NR Description: SfUCPb [Symplocarpus foetidus]
  misc_feature (5)..(301): Homolog of NCBI NO: 13537347 NR Description: uncoupling protein [Oryza sativa (japonica
  misc_feature (9)..(301): Homolog of NCBI NO: 19401698 NR Description: uncoupling protein [Zea mays]
  misc_feature (9)..(302): Homolog of NCBI NO: 25295878 NR Description: uncoupling protein [imported] - Arabidopsis
  misc_feature (9)..(302): Homolog of NCBI NO: 15232420 NR Description: uncoupling protein (ucp/PUMP)
  misc_feature (3)..(302): Homolog of NCBI NO: 7489287 NR Description: uncoupling protein (clone StUCP7), mitochonrial -
  misc_feature (3)..(302): Homolog of NCBI NO: 18921040 NR Description: putative uncoupling protein [Lycopersicon
  misc_feature (7)..(301): Homolog of NCBI NO: 22002462 NR Description: mitochondrial uncoupling protein [Helicodiceros
  misc_feature (1)..(302): Homolog of NCBI NO: 7106157 NR Description: SfUCPa [Symplocarpus foetidus]
  misc_feature (1)..(305): Homolog of NCBI NO: 18424178 NR Description: uncoupling protein (AtUCP2)
MADFKPRIEISFLETFICSAFAACFAELCTIPLDTAKVRLQLQRKIPTGDGENLPKYRGSIGTLATIAREEGISGLWKGVIAGLHRQCIYGGLRIGLYEPVKTLLVGSDFIGDIPLYQKILAALLTGAIAIIVANPTDLVKVRLQSEGKLPAGVPRRYAGAVDAYFTIVKLEGVSALWTGLGPNIARNAIVNAAELASYDQIKETIMKIPFFRDSVLTHLLAGLAAGFFAVCIGSPIDVVKSRMMGDSTYRNTVDCFIKTMKTEGIMAFYKGFLPNFTRLGTWNAIMFLTLEQVKKVFLREVLYD

SEQ ID NO: 37847 - DNA, 895 bp, Arabidopsis thaliana
  misc_feature (1)..(895): Ceres Seq. ID no. 13491520
  misc_feature: MA Experiment ID: 108434 Result: Down-regulated in Transcription
  misc_feature: MA Experiment 108434 PARAMETER Experiment Name: At_Root_Tips_cDNA_P Parameter: Tissue Value: Root Tips
  misc_feature: MA Experiment ID: 108435 Result: Down-regulated in Transcription
  misc_feature: MA Experiment 108435 PARAMETER Experiment Name: At_stm_Mutants_cDNA_P Parameter: Plant Line Value: wt Landsburg vs stm
  misc_feature: MA Experiment 108435 PARAMETER Experiment Name: At_stm_Mutants_cDNA_P Parameter: Tissue Value: Shoot Apical Meristem Region
  misc_feature: MA Experiment ID: 108461 Result: Down-regulated in Transcription
  misc_feature: MA Experiment 108461 PARAMETER Experiment Name: At_Germinating_Seeds_cDNA_P Parameter: Age (day) Value: 1 vs. 0
  misc_feature: MA Experiment 108461 PARAMETER Experiment Name: At_Germinating_Seeds_cDNA_P Parameter: Tissue Value: Germinating Seeds
  misc_feature: MA Experiment ID: 108462 Result: Up-regulated in Transcription
  misc_feature: MA Experiment 108462 PARAMETER Experiment Name: At_Germinating_Seeds_cDNA_P Parameter: Age (day) Value: 2 vs. 0
  misc_feature: MA Experiment 108462 PARAMETER Experiment Name: At_Germinating_Seeds_cDNA_P Parameter: Tissue Value: Germinating Seeds
  misc_feature: MA Experiment ID: 108463 Result: Up-regulated in Transcription
  misc_feature: MA Experiment 108463 PARAMETER Experiment Name: At_Germinating_Seeds_cDNA_P Parameter: Age (day) Value: 3 vs. 0
  misc_feature: MA Experiment 108463 PARAMETER Experiment Name: At_Germinating_Seeds_cDNA_P Parameter: Tissue Value: Germinating Seeds
  misc_feature: MA Experiment ID: 108464 Result: Up-regulated in Transcription
  misc_feature: MA Experiment 108464 PARAMETER Experiment Name: At_Germinating_Seeds_cDNA_P Parameter: Age (day) Value: 4 vs. 0
  misc_feature: MA Experiment 108464 PARAMETER Experiment Name: At_Germinating_Seeds_cDNA_P Parameter: Tissue Value: Germinating Seeds
  misc_feature: MA Experiment ID: 108469 Result: Up-regulated in Transcription
  misc_feature: MA Experiment ID: 20000070 Result: Up-regulated in Transcription
  misc_feature: MA Experiment 20000070 PARAMETER Experiment Name: At_100uM_ABA_Mutants_cDNA_P Parameter: Plant Line Value: CS24
  misc_feature: MA Experiment 20000070 PARAMETER Experiment Name: At_100uM_ABA_Mutants_cDNA_P Parameter: Timepoint (hr) Value: 6
  misc_feature: MA Experiment 20000070 PARAMETER Experiment Name: At_100uM_ABA_Mutants_cDNA_P Parameter: Tissue Value: Aerial
  misc_feature: MA Experiment 20000070 PARAMETER Experiment Name: At_100uM_ABA_Mutants_cDNA_P Parameter: Treatment Value: 100uM ABA vs. No Treatment
  misc_feature: MA Experiment ID: 20000071 Result: Up-regulated in Transcription
  misc_feature: MA Experiment 20000071 PARAMETER Experiment Name: At_100uM_ABA_Mutants_cDNA_P Parameter: Plant Line Value: CS8104
  misc_feature: MA Experiment 20000071 PARAMETER Experiment Name: At_100uM_ABA_Mutants_cDNA_P Parameter: Timepoint (hr) Value: 6
  misc_feature: MA Experiment 20000071 PARAMETER Experiment Name: At_100uM_ABA_Mutants_cDNA_P Parameter: Tissue Value: Aerial
  misc_feature: MA Experiment 20000071 PARAMETER Experiment Name: At_100uM_ABA_Mutants_cDNA_P Parameter: Treatment Value: 100uM ABA vs. No Treatment
  misc_feature: MA Experiment ID: 20000089 Result: Up-regulated in Transcription
  misc_feature: MA Experiment ID: 20000090 Result: Up-regulated in Transcription
  misc_feature: MA Experiment ID: 20000117 Result: Up-regulated in Transcription
  misc_feature: MA Experiment 20000117 PARAMETER Experiment Name: At_100uM_ABA_Mutants_cDNA_P Parameter: Plant Line Value: Columbia
  misc_feature: MA Experiment 20000117 PARAMETER Experiment Name: At_100uM_ABA_Mutants_cDNA_P Parameter: Timepoint (hr) Value: 6
  misc_feature: MA Experiment 20000117 PARAMETER Experiment Name: At_100uM_ABA_Mutants_cDNA_P Parameter: Tissue Value: Aerial
  misc_feature: MA Experiment 20000117 PARAMETER Experiment Name: At_100uM_ABA_Mutants_cDNA_P Parameter: Treatment Value: 100uM ABA vs. No Treatment
  misc_feature: MA Experiment ID: 20000179 Result: Down-regulated in Transcription
  misc_feature: MA Experiment 20000179 PARAMETER Experiment Name: At_Germinating_Seeds_P Parameter: Age (hr) Value: 6 vs. 0
  misc_feature: MA Experiment 20000179 PARAMETER Experiment Name: At_Germinating_Seeds_P Parameter: Tissue Value: Germinating Seeds
  misc_feature: MA Experiment ID: 20000182 Result: Up-regulated in Transcription
  misc_feature: MA Experiment 20000182 PARAMETER Experiment Name: At_2mM_SA_P Parameter: Age (day) Value: 14
  misc_feature: MA Experiment 20000182 PARAMETER Experiment Name: At_2mM_SA_P Parameter: Organism Value: A. thaliana
  misc_feature: MA Experiment 20000182 PARAMETER Experiment Name: At_2mM_SA_P Parameter: Plant Line Value: WS
  misc_feature: MA Experiment 20000182 PARAMETER Experiment Name: At_2mM_SA_P Parameter: Timepoint (hr) Value: 6
  misc_feature: MA Experiment 20000182 PARAMETER Experiment Name: At_2mM_SA_P Parameter: Tissue Value: Aerial
  misc_feature: MA Experiment 20000182 PARAMETER Experiment Name: At_2mM_SA_P Parameter: Treatment Value: 2mM SA vs. No Treatment
  misc_feature: MA Experiment ID: 20000185 Result: Up-regulated in Transcription
  misc_feature: MA Experiment 20000185 PARAMETER Experiment Name: At_Roots__P Parameter: Age (day) Value: 7 vs. 21
  misc_feature: MA Experiment 20000185 PARAMETER Experiment Name: At_Roots__P Parameter: Organism Value: A. thaliana
  misc_feature: MA Experiment 20000185 PARAMETER Experiment Name: At_Roots__P Parameter: Tissue Value: Roots vs. Whole Plant
  misc_feature: MA Experiment ID: 20000227 Result: Up-regulated in Transcription
  misc_feature: MA Experiment 20000227 PARAMETER Experiment Name: At_Root-Tips-vs-Tops_P Parameter: Tissue Value: Root Tips vs. Root Tops
  misc_feature: MA Experiment ID: 20000234 Result: Down-regulated in Transcription
  misc_feature: MA Experiment 20000234 PARAMETER Experiment Name: At_Siliques_P Parameter: Age (day) Value: 21
  misc_feature: MA Experiment 20000234 PARAMETER Experiment Name: At_Siliques_P Parameter: Organism Value: A. thaliana
  misc_feature: MA Experiment 20000234 PARAMETER Experiment Name: At_Siliques_P Parameter: Plant Line Value: WS
  misc_feature: MA Experiment 20000234 PARAMETER Experiment Name: At_Siliques_P Parameter: Tissue Value: Less Than 5mm Siliques vs. Whole Plant
  misc_feature: MA Experiment ID: 20000235 Result: Down-regulated in Transcription
  misc_feature: MA Experiment 20000235 PARAMETER Experiment Name: At_Siliques_P Parameter: Age (day) Value: 21
  misc_feature: MA Experiment 20000235 PARAMETER Experiment Name: At_Siliques_P Parameter: Organism Value: A. thaliana
  misc_feature: MA Experiment 20000235 PARAMETER Experiment Name: At_Siliques_P Parameter: Plant Line Value: WS
  misc_feature: MA Experiment 20000235 PARAMETER Experiment Name: At_Siliques_P Parameter: Tissue Value: 5-10mm Siliques vs. Whole Plant
  misc_feature: MA Experiment ID: 20000264 Result: Down-regulated in Transcription
  misc_feature: MA Experiment 20000264 PARAMETER Experiment Name: At_Open_Flower_P Parameter: Age (day) Value: 21
  misc_feature: MA Experiment 20000264 PARAMETER Experiment Name: At_Open_Flower_P Parameter: Plant Line Value: WS
  misc_feature: MA Experiment 20000264 PARAMETER Experiment Name: At_Open_Flower_P Parameter: Tissue Value: Open Flower vs. Whole Plant
  misc_feature: MA Experiment ID: 20000265 Result: Down-regulated in Transcription
  misc_feature: MA Experiment 20000265 PARAMETER Experiment Name: At_Open_Flower_P Parameter: Age (day) Value: 21
  misc_feature: MA Experiment 20000265 PARAMETER Experiment Name: At_Open_Flower_P Parameter: Plant Line Value: WS
  misc_feature: MA Experiment 20000265 PARAMETER Experiment Name: At_Open_Flower_P Parameter: Tissue Value: Closed Flower vs. Whole Plant
  misc_feature: MA Experiment ID: 20000286 Result: Down-regulated in Transcription
  misc_feature: MA Experiment 20000286 PARAMETER Experiment Name: At_Open_Flower_P Parameter: Age (day) Value: 21
  misc_feature: MA Experiment 20000286 PARAMETER Experiment Name: At_Open_Flower_P Parameter: Plant Line Value: WS
  misc_feature: MA Experiment 20000286 PARAMETER Experiment Name: At_Open_Flower_P Parameter: Tissue Value: Half Open vs. Whole Plant
  misc_feature: MA Experiment ID: 20000439 Result: Up-regulated in Transcription
  misc_feature: MA Experiment 20000439 PARAMETER Experiment Name: At_Roots__P Parameter: Age (day) Value: 14 vs. 21
  misc_feature: MA Experiment 20000439 PARAMETER Experiment Name: At_Roots__P Parameter: Organism Value: A. thaliana
  misc_feature: MA Experiment 20000439 PARAMETER Experiment Name: At_Roots__P Parameter: Tissue Value: Roots vs. Whole Plant
  misc_feature: MA Experiment ID: 20000456 Result: Up-regulated in Transcription
  misc_feature: MA Experiment 20000456 PARAMETER Experiment Name: At_100uM_BA_P Parameter: Age (day) Value: 14
  misc_feature: MA Experiment 20000456 PARAMETER Experiment Name: At_100uM_BA_P Parameter: Organism Value: A. thaliana
  misc_feature: MA Experiment 20000456 PARAMETER Experiment Name: At_100uM_BA_P Parameter: Plant Line Value: WS
  misc_feature: MA Experiment 20000456 PARAMETER Experiment Name: At_100uM_BA_P Parameter: Timepoint (hr) Value: 6
  misc_feature: MA Experiment 20000456 PARAMETER Experiment Name: At_100uM_BA_P Parameter: Tissue Value: Aerial
  misc_feature: MA Experiment 20000456 PARAMETER Experiment Name: At_100uM_BA_P Parameter: Treatment Value: 100uM BA vs. No Treatment
  misc_feature: MA Experiment ID: 20000573 Result: Up-regulated in Transcription
  misc_feature: MA Experiment 20000573 PARAMETER Experiment Name: At_100uM_ABA_Mutants__P Parameter: Organism Value: A. thaliana
  misc_feature: MA Experiment 20000573 PARAMETER Experiment Name: At_100uM_ABA_Mutants__P Parameter: Plant Line Value: CS22 vs. Ler wt
  misc_feature: MA Experiment 20000573 PARAMETER Experiment Name: At_100uM_ABA_Mutants__P Parameter: Timepoint (hr) Value: N/A
  misc_feature: MA Experiment 20000573 PARAMETER Experiment Name: At_100uM_ABA_Mutants__P Parameter: Tissue Value: Whole Plant
  misc_feature: MA Experiment 20000573 PARAMETER Experiment Name: At_100uM_ABA_Mutants__P Parameter: Treatment Value: None
  misc_feature: MA Experiment ID: 20000574 Result: Up-regulated in Transcription
  misc_feature: MA Experiment 20000574 PARAMETER Experiment Name: At_100uM_ABA_Mutants__P Parameter: Organism Value: A. thaliana
  misc_feature: MA Experiment 20000574 PARAMETER Experiment Name: At_100uM_ABA_Mutants__P Parameter: Plant Line Value: CS23 vs. Ler wt
  misc_feature: MA Experiment 20000574 PARAMETER Experiment Name: At_100uM_ABA_Mutants__P Parameter: Timepoint (hr) Value: N/A
  misc_feature: MA Experiment 20000574 PARAMETER Experiment Name: At_100uM_ABA_Mutants__P Parameter: Tissue Value: Whole Plant
  misc_feature: MA Experiment 20000574 PARAMETER Experiment Name: At_100uM_ABA_Mutants__P Parameter: Treatment Value: None
  misc_feature: MA Experiment ID: 20000709 Result: Up-regulated in Transcription
  misc_feature: MA Experiment 20000709 PARAMETER Experiment Name: At_15mM_NH4NO3_L-to-H_P Parameter: Age (hr) Value: 14
  misc_feature: MA Experiment 20000709 PARAMETER Experiment Name: At_15mM_NH4NO3_L-to-H_P Parameter: Organism Value: A. thaliana
  misc_feature: MA Experiment 20000709 PARAMETER Experiment Name: At_15mM_NH4NO3_L-to-H_P Parameter: Plant Line Value: WS
  misc_feature: MA Experiment 20000709 PARAMETER Experiment Name: At_15mM_NH4NO3_L-to-H_P Parameter: Timepoint (hr) Value: 4
  misc_feature: MA Experiment 20000709 PARAMETER Experiment Name: At_15mM_NH4NO3_L-to-H_P Parameter: Tissue Value: Aerial
  misc_feature: MA Experiment 20000709 PARAMETER Experiment Name: At_15mM_NH4NO3_L-to-H_P Parameter: Treatment Value: 15mM NH4NO3 vs. 30mM Mannitol
  misc_feature: MA Experiment ID: 20000794 Result: Down-regulated in Transcription
  misc_feature: MA Experiment 20000794 PARAMETER Experiment Name: At_Petals_P Parameter: Age (day) Value: 23-25 days
  misc_feature: MA Experiment 20000794 PARAMETER Experiment Name: At_Petals_P Parameter: Plant Line Value: WS
  misc_feature: MA Experiment 20000794 PARAMETER Experiment Name: At_Petals_P Parameter: Tissue Value: Petals vs. Whole plant
  misc_feature: MA Experiment ID: 20001451 Result: Up-regulated in Transcription
  misc_feature: MA Experiment 20001451 PARAMETER Experiment Name: At_Far-red-induction_P Parameter: Age (day) Value: 7
  misc_feature: MA Experiment 20001451 PARAMETER Experiment Name: At_Far-red-induction_P Parameter: Light Value: Far-red vs. White
  misc_feature: MA Experiment 20001451 PARAMETER Experiment Name: At_Far-red-induction_P Parameter: Organism Value: A. thaliana
  misc_feature: MA Experiment 20001451 PARAMETER Experiment Name: At_Far-red-induction_P Parameter: Plant Line Value: Columbia
  misc_feature: MA Experiment 20001451 PARAMETER Experiment Name: At_Far-red-induction_P Parameter: Timepoint (hr) Value: 24
  misc_feature: MA Experiment 20001451 PARAMETER Experiment Name: At_Far-red-induction_P Parameter: Tissue Value: Whole Plant
  misc_feature: MA Experiment ID: 20001457 Result: Down-regulated in Transcription
  misc_feature: MA Experiment 20001457 PARAMETER Experiment Name: At_50mM_NH4NO3_L-to-H_P Parameter: Age (day) Value: Undefined
  misc_feature: MA Experiment 20001457 PARAMETER Experiment Name: At_50mM_NH4NO3_L-to-H_P Parameter: Organism Value: Undefined
  misc_feature: MA Experiment 20001457 PARAMETER Experiment Name: At_50mM_NH4NO3_L-to-H_P Parameter: Plant Line Value: Undefined
  misc_feature: MA Experiment 20001457 PARAMETER Experiment Name: At_50mM_NH4NO3_L-to-H_P Parameter: Timepoint (hr) Value: 0.5
  misc_feature: MA Experiment 20001457 PARAMETER Experiment Name: At_50mM_NH4NO3_L-to-H_P Parameter: Tissue Value: Siliques
  misc_feature: MA Experiment 20001457 PARAMETER Experiment Name: At_50mM_NH4NO3_L-to-H_P Parameter: Treatment Value: 50mM NH4NO3 vs. 100mM Manitol
  misc_feature: MA Experiment ID: 20001557 Result: Up-regulated in Transcription
  misc_feature: MA Experiment 20001557 PARAMETER Experiment Name: At_Drought_Soil_Dry_P Parameter: Age (day) Value: 27
  misc_feature: MA Experiment 20001557 PARAMETER Experiment Name: At_Drought_Soil_Dry_P Parameter: Organism Value: A. thaliana
  misc_feature: MA Experiment 20001557 PARAMETER Experiment Name: At_Drought_Soil_Dry_P Parameter: Plant Line Value: WS
  misc_feature: MA Experiment 20001557 PARAMETER Experiment Name: At_Drought_Soil_Dry_P Parameter: Post Timepoint (hr) Value: 3
  misc_feature: MA Experiment 20001557 PARAMETER Experiment Name: At_Drought_Soil_Dry_P Parameter: Post-Treatment Value: Re-Water vs. No Drought
  misc_feature: MA Experiment 20001557 PARAMETER Experiment Name: At_Drought_Soil_Dry_P Parameter: Timepoint (day) Value: 13
  misc_feature: MA Experiment 20001557 PARAMETER Experiment Name: At_Drought_Soil_Dry_P Parameter: Treatment Value: Drought vs. No Drought
  misc_feature: MA Experiment ID: 20001559 Result: Down-regulated in Transcription
  misc_feature: MA Experiment 20001559 PARAMETER Experiment Name: At_Drought_Soil_Dry_P Parameter: Age (day) Value: 28
  misc_feature: MA Experiment 20001559 PARAMETER Experiment Name: At_Drought_Soil_Dry_P Parameter: Organism Value: A. thaliana
  misc_feature: MA Experiment 20001559 PARAMETER Experiment Name: At_Drought_Soil_Dry_P Parameter: Plant Line Value: WS
  misc_feature: MA Experiment 20001559 PARAMETER Experiment Name: At_Drought_Soil_Dry_P Parameter: Post Timepoint (hr) Value: 29
  misc_feature: MA Experiment 20001559 PARAMETER Experiment Name: At_Drought_Soil_Dry_P Parameter: Post-Treatment Value: Re-Water vs. No Drought
  misc_feature: MA Experiment 20001559 PARAMETER Experiment Name: At_Drought_Soil_Dry_P Parameter: Timepoint (day) Value: 14
  misc_feature: MA Experiment 20001559 PARAMETER Experiment Name: At_Drought_Soil_Dry_P Parameter: Treatment Value: Drought vs. No Drought
  misc_feature: MA Experiment ID: 20001560 Result: Up-regulated in Transcription
  misc_feature: MA Experiment 20001560 PARAMETER Experiment Name: At_Drought_Soil_Dry_P Parameter: Age (day) Value: 28
  misc_feature: MA Experiment 20001560 PARAMETER Experiment Name: At_Drought_Soil_Dry_P Parameter: Organism Value: A. thaliana
  misc_feature: MA Experiment 20001560 PARAMETER Experiment Name: At_Drought_Soil_Dry_P Parameter: Plant Line Value: WS
  misc_feature: MA Experiment 20001560 PARAMETER Experiment Name: At_Drought_Soil_Dry_P Parameter: Post Timepoint (hr) Value: None
  misc_feature: MA Experiment 20001560 PARAMETER Experiment Name: At_Drought_Soil_Dry_P Parameter: Post-Treatment Value: None
  misc_feature: MA Experiment 20001560 PARAMETER Experiment Name: At_Drought_Soil_Dry_P Parameter: Timepoint (day) Value: 14
  misc_feature: MA Experiment 20001560 PARAMETER Experiment Name: At_Drought_Soil_Dry_P Parameter: Treatment Value: Drought vs. No Drought
gatcgagaaatggagaataatccaagaagctcatcgtctctccctctagccgggcgtgtagctatagtgaccggagccaccagaggcatgggccgtgaaatcgcgattcacctccactctcttggtgcaagagtcaccatcaattatgtctcgagctcatcaaaagctgaactcttggtttcagaactaaacgactcatctcaattaaagtcagcgatcgcagttaaagcagatgtgtcagacccggaccagatcaacaacttgtttgatcaaacagaacaagagttcggatctaaagttcacatcgtcgtgaattgtgcaggtgttttggatccaaagtatccatctttatccgagacgacactagaagatttcgataacacattcacaataaacacaagagggtctttcttgtgttgcaaggaagcagctaaaagggttatgagaggaggtggtggaagaatcattatgatgtctacatcaatggttggtggtctcgccccgggttatggagtttacgcagcatcaaaggccgccgttgagacaatggtgaaagtgttggcgaaggagcttaagggaagccggataaccgcgaattgcgtggcgccagggccggttgcgacggagatgttttatgctggaaagagtgatgaaacggtgaaaatgcttgcaggggcttgtcctatggggaggatcggtgagtcaaaggatataaccgagattgtagggtttttggccggtgatggtggtgaatggattaacggtcaagttattagagccaatggaggctttgttgtctaataaatgaagaactaacattggaatttgatgttgtcttcttcttttcgtgtgttgatctacttttatgtcaatgatgatgagttgtttattgggc

SEQ ID NO: 37848 - protein, 266 aa, Arabidopsis thaliana
  peptide (1)..(266): Ceres Seq. ID no. 13491521
  misc_feature (12)..(265): Homolog of NCBI NO: 34395019 NR Description: putative short-chain dehydrogenase/reductase
  misc_feature (10)..(264): Homolog of NCBI NO: 37534988 NR Description: putative short-chain alcohol dehydrogenase
  misc_feature (3)..(265): Homolog of NCBI NO: 1711355 NR Description: SHORT-CHAIN TYPE DEHYDROGENASE/REDUCTASE
  misc_feature (6)..(265): Homolog of NCBI NO: 34393370 NR Description: putative short-chain dehydrogenase/reductase
  misc_feature (10)..(263): Homolog of NCBI NO: 30679011 NR Description: short-chain type dehydrogenase/reductase -related
  misc_feature (11)..(263): Homolog of NCBI NO: 34395018 NR Description: putative short-chain dehydrogenase/reductase
  misc_feature (10)..(250): Homolog of NCBI NO: 30686710 NR Description: short-chain dehydrogenase/reductase family
  misc_feature (10)..(265): Homolog of NCBI NO: 9758903 NR Description: Brn1-like protein [Arabidopsis thaliana]
  misc_feature (10)..(265): Homolog of NCBI NO: 15229203 NR Description: short-chain dehydrogenase/reductase family
  misc_feature (4)..(266): Homolog of NCBI NO: 15235621 NR Description: short-chain dehydrogenase/reductase family
DREMENNPRSSSSLPLAGRVAIVTGATRGMGREIAIHLHSLGARVTINYVSSSSKAELLVSELNDSSQLKSAIAVKADVSDPDQINNLFDQTEQEFGSKVHIVVNCAGVLDPKYPSLSETTLEDFDNTFTINTRGSFLCCKEAAKRVMRGGGGRIIMMSTSMVGGLAPGYGVYAASKAAVETMVKVLAKELKGSRITANCVAPGPVATEMFYAGKSDETVKMLAGACPMGRIGESKDITEIVGFLAGDGGEWINGQVIRANGGFVV

SEQ ID NO: 37849 - protein, 263 aa, Arabidopsis thaliana; identical to SEQ ID NO: 25825
  peptide (1)..(263): Ceres Seq. ID no. 13491522
  misc_feature (9)..(262): Homolog of NCBI NO: 34395019 NR Description: putative short-chain dehydrogenase/reductase
  misc_feature (7)..(261): Homolog of NCBI NO: 37534988 NR Description: putative short-chain alcohol dehydrogenase
  misc_feature (1)..(262): Homolog of NCBI NO: 1711355 NR Description: SHORT-CHAIN TYPE DEHYDROGENASE/REDUCTASE
  misc_feature (3)..(262): Homolog of NCBI NO: 34393370 NR Description: putative short-chain dehydrogenase/reductase
  misc_feature (7)..(260): Homolog of NCBI NO: 30679011 NR Description: short-chain type dehydrogenase/reductase -related
  misc_feature (8)..(260): Homolog of NCBI NO: 34395018 NR Description: putative short-chain dehydrogenase/reductase
  misc_feature (7)..(247): Homolog of NCBI NO: 30686710 NR Description: short-chain dehydrogenase/reductase family
  misc_feature (7)..(262): Homolog of NCBI NO: 9758903 NR Description: Brn1-like protein [Arabidopsis thaliana]
  misc_feature (7)..(262): Homolog of NCBI NO: 15229203 NR Description: short-chain dehydrogenase/reductase family
  misc_feature (1)..(263): Homolog of NCBI NO: 15235621 NR Description: short-chain dehydrogenase/reductase family

SEQ ID NO: 37850 - protein, 237 aa, Arabidopsis thaliana; identical to SEQ ID NO: 25826
  peptide (1)..(237): Ceres Seq. ID no. 13491523
  misc_feature (1)..(236): Homolog of NCBI NO: 34395019 NR Description: putative short-chain dehydrogenase/reductase
  misc_feature (1)..(235): Homolog of NCBI NO: 37534988 NR Description: putative short-chain alcohol dehydrogenase
  misc_feature (1)..(236): Homolog of NCBI NO: 1711355 NR Description: SHORT-CHAIN TYPE DEHYDROGENASE/REDUCTASE
  misc_feature (1)..(236): Homolog of NCBI NO: 34393370 NR Description: putative short-chain dehydrogenase/reductase
  misc_feature (1)..(234): Homolog of NCBI NO: 30679011 NR Description: short-chain type dehydrogenase/reductase -related
  misc_feature (1)..(234): Homolog of NCBI NO: 34395018 NR Description: putative short-chain dehydrogenase/reductase
  misc_feature (1)..(221): Homolog of NCBI NO: 30686710 NR Description: short-chain dehydrogenase/reductase family
  misc_feature (1)..(236): Homolog of NCBI NO: 9758903 NR Description: Brn1-like protein [Arabidopsis thaliana]
  misc_feature (1)..(236): Homolog of NCBI NO: 15229203 NR Description: short-chain dehydrogenase/reductase family
  misc_feature (1)..(237): Homolog of NCBI NO: 15235621 NR Description: short-chain dehydrogenase/reductase family

SEQ ID NO: 37851 - DNA, 1521 bp, Arabidopsis thaliana; identical to SEQ ID NO: 22510
  misc_feature (1)..(1521): Ceres Seq. ID no. 12394809
  misc_feature: MA Experiment ID: 20000071 Result: Up-regulated in Transcription
  misc_feature: MA Experiment 20000071 PARAMETER Experiment Name: At_100uM_ABA_Mutants_cDNA_P Parameter: Plant Line Value: CS8104
  misc_feature: MA Experiment 20000071 PARAMETER Experiment Name: At_100uM_ABA_Mutants_cDNA_P Parameter: Timepoint (hr) Value: 6
  misc_feature: MA Experiment 20000071 PARAMETER Experiment Name: At_100uM_ABA_Mutants_cDNA_P Parameter: Tissue Value: Aerial
  misc_feature: MA Experiment 20000071 PARAMETER Experiment Name: At_100uM_ABA_Mutants_cDNA_P Parameter: Treatment Value: 100uM ABA vs. No Treatment
  misc_feature: MA Experiment ID: 20000169 Result: Up-regulated in Transcription
  misc_feature: MA Experiment 20000169 PARAMETER Experiment Name: At_100uM_ABA_P Parameter: Age (day) Value: 14
  misc_feature: MA Experiment 20000169 PARAMETER Experiment Name: At_100uM_ABA_P Parameter: Organism Value: A. thaliana
  misc_feature: MA Experiment 20000169 PARAMETER Experiment Name: At_100uM_ABA_P Parameter: Plant Line Value: WS
  misc_feature: MA Experiment 20000169 PARAMETER Experiment Name: At_100uM_ABA_P Parameter: Timepoint (hr) Value: 6
  misc_feature: MA Experiment 20000169 PARAMETER Experiment Name: At_100uM_ABA_P Parameter: Tissue Value: Aerial
  misc_feature: MA Experiment 20000169 PARAMETER Experiment Name: At_100uM_ABA_P Parameter: Treatment Value: 100uM ABA vs. No Treatment
  misc_feature: MA Experiment ID: 20000185 Result: Down-regulated in Transcription
  misc_feature: MA Experiment 20000185 PARAMETER Experiment Name: At_Roots__P Parameter: Age (day) Value: 7 vs. 21
  misc_feature: MA Experiment 20000185 PARAMETER Experiment Name: At_Roots__P Parameter: Organism Value: A. thaliana
  misc_feature: MA Experiment 20000185 PARAMETER Experiment Name: At_Roots__P Parameter: Tissue Value: Roots vs. Whole Plant
  misc_feature: MA Experiment ID: 20000267 Result: Up-regulated in Transcription
  misc_feature: MA Experiment 20000267 PARAMETER Experiment Name: At_Drought_P Parameter: Age (day) Value: 7
  misc_feature: MA Experiment 20000267 PARAMETER Experiment Name: At_Drought_P Parameter: Organism Value: A. thaliana
  misc_feature: MA Experiment 20000267 PARAMETER Experiment Name: At_Drought_P Parameter: Plant Line Value: WS
  misc_feature: MA Experiment 20000267 PARAMETER Experiment Name: At_Drought_P Parameter: Timepoint (hr) Value: 6
  misc_feature: MA Experiment 20000267 PARAMETER Experiment Name: At_Drought_P Parameter: Tissue Value: Whole Plant
  misc_feature: MA Experiment 20000267 PARAMETER Experiment Name: At_Drought_P Parameter: Treatment Value: Drought vs. No Drought
  misc_feature: MA Experiment ID: 20000268 Result: Up-regulated in Transcription
  misc_feature: MA Experiment 20000268 PARAMETER Experiment Name: At_100mM_NaCl__P Parameter: Age (day) Value: 14
  misc_feature: MA Experiment 20000268 PARAMETER Experiment Name: At_100mM_NaCl__P Parameter: Organism Value: A. thaliana
  misc_feature: MA Experiment 20000268 PARAMETER Experiment Name: At_100mM_NaCl__P Parameter: Plant Line Value: WS
  misc_feature: MA Experiment 20000268 PARAMETER Experiment Name: At_100mM_NaCl__P Parameter: Timepoint (hr) Value: 6
  misc_feature: MA Experiment 20000268 PARAMETER Experiment Name: At_100mM_NaCl__P Parameter: Tissue Value: Whole Plant
  misc_feature: MA Experiment 20000268 PARAMETER Experiment Name: At_100mM_NaCl__P Parameter: Treatment Value: 100mM NaCl vs. No Treatment
  misc_feature: MA Experiment ID: 20000436 Result: Up-regulated in Transcription
  misc_feature: MA Experiment 20000436 PARAMETER Experiment Name: At_Drought_P Parameter: Age (day) Value: 7
  misc_feature: MA Experiment 20000436 PARAMETER Experiment Name: At_Drought_P Parameter: Organism Value: A. thaliana
  misc_feature: MA Experiment 20000436 PARAMETER Experiment Name: At_Drought_P Parameter: Plant Line Value: WS
  misc_feature: MA Experiment 20000436 PARAMETER Experiment Name: At_Drought_P Parameter: Timepoint (hr) Value: 12
  misc_feature: MA Experiment 20000436 PARAMETER Experiment Name: At_Drought_P Parameter: Tissue Value: Whole Plant
  misc_feature: MA Experiment 20000436 PARAMETER Experiment Name: At_Drought_P Parameter: Treatment Value: Drought vs. No Drought
  misc_feature: MA Experiment ID: 20000437 Result: Up-regulated in Transcription
  misc_feature: MA Experiment 20000437 PARAMETER Experiment Name: At_Drought_P Parameter: Age (day) Value: 8
  misc_feature: MA Experiment 20000437 PARAMETER Experiment Name: At_Drought_P Parameter: Organism Value: A. thaliana
  misc_feature: MA Experiment 20000437 PARAMETER Experiment Name: At_Drought_P Parameter: Plant Line Value: WS
  misc_feature: MA Experiment 20000437 PARAMETER Experiment Name: At_Drought_P Parameter: Timepoint (hr) Value: 24
  misc_feature: MA Experiment 20000437 PARAMETER Experiment Name: At_Drought_P Parameter: Tissue Value: Whole Plant
  misc_feature: MA Experiment 20000437 PARAMETER Experiment Name: At_Drought_P Parameter: Treatment Value: Drought vs. No Drought
  misc_feature: MA Experiment ID: 20000439 Result: Down-regulated in Transcription
  misc_feature: MA Experiment 20000439 PARAMETER Experiment Name: At_Roots__P Parameter: Age (day) Value: 14 vs. 21
  misc_feature: MA Experiment 20000439 PARAMETER Experiment Name: At_Roots__P Parameter: Organism Value: A. thaliana
  misc_feature: MA Experiment 20000439 PARAMETER Experiment Name: At_Roots__P Parameter: Tissue Value: Roots vs. Whole Plant
  misc_feature: MA Experiment ID: 20000453 Result: Up-regulated in Transcription
  misc_feature: MA Experiment 20000453 PARAMETER Experiment Name: At_100uM_ABA_P Parameter: Age (day) Value: 15
  misc_feature: MA Experiment 20000453 PARAMETER Experiment Name: At_100uM_ABA_P Parameter: Organism Value: A. thaliana
  misc_feature: MA Experiment 20000453 PARAMETER Experiment Name: At_100uM_ABA_P Parameter: Plant Line Value: WS
  misc_feature: MA Experiment 20000453 PARAMETER Experiment Name: At_100uM_ABA_P Parameter: Timepoint (hr) Value: 24
  misc_feature: MA Experiment 20000453 PARAMETER Experiment Name: At_100uM_ABA_P Parameter: Tissue Value: Aerial
  misc_feature: MA Experiment 20000453 PARAMETER Experiment Name: At_100uM_ABA_P Parameter: Treatment Value: 100uM ABA vs. No Treatment
  misc_feature: MA Experiment ID: 20000573 Result: Down-regulated in Transcription
  misc_feature: MA Experiment 20000573 PARAMETER Experiment Name: At_100uM_ABA_Mutants__P Parameter: Organism Value: A. thaliana
  misc_feature: MA Experiment 20000573 PARAMETER Experiment Name: At_100uM_ABA_Mutants__P Parameter: Plant Line Value: CS22 vs. Ler wt
  misc_feature: MA Experiment 20000573 PARAMETER Experiment Name: At_100uM_ABA_Mutants__P Parameter: Timepoint (hr) Value: N/A
  misc_feature: MA Experiment 20000573 PARAMETER Experiment Name: At_100uM_ABA_Mutants__P Parameter: Tissue Value: Whole Plant
  misc_feature: MA Experiment 20000573 PARAMETER Experiment Name: At_100uM_ABA_Mutants__P Parameter: Treatment Value: None
  misc_feature: MA Experiment ID: 20000574 Result: Down-regulated in Transcription
  misc_feature: MA Experiment 20000574 PARAMETER Experiment Name: At_100uM_ABA_Mutants__P Parameter: Organism Value: A. thaliana
  misc_feature: MA Experiment 20000574 PARAMETER Experiment Name: At_100uM_ABA_Mutants__P Parameter: Plant Line Value: CS23 vs. Ler wt
  misc_feature: MA Experiment 20000574 PARAMETER Experiment Name: At_100uM_ABA_Mutants__P Parameter: Timepoint (hr) Value: N/A
  misc_feature: MA Experiment 20000574 PARAMETER Experiment Name: At_100uM_ABA_Mutants__P Parameter: Tissue Value: Whole Plant
  misc_feature: MA Experiment 20000574 PARAMETER Experiment Name: At_100uM_ABA_Mutants__P Parameter: Treatment Value: None
  misc_feature: MA Experiment ID: 20001247 Result: Up-regulated in Transcription
  misc_feature: MA Experiment 20001247 PARAMETER Experiment Name: At_Far-red-induction_P Parameter: Age (day) Value: 7
  misc_feature: MA Experiment 20001247 PARAMETER Experiment Name: At_Far-red-induction_P Parameter: Light Value: Far-red vs. White
  misc_feature: MA Experiment 20001247 PARAMETER Experiment Name: At_Far-red-induction_P Parameter: Organism Value: A. thaliana
  misc_feature: MA Experiment 20001247 PARAMETER Experiment Name: At_Far-red-induction_P Parameter: Plant Line Value: Columbia
  misc_feature: MA Experiment 20001247 PARAMETER Experiment Name: At_Far-red-induction_P Parameter: Timepoint (hr) Value: 1
  misc_feature: MA Experiment 20001247 PARAMETER Experiment Name: At_Far-red-induction_P Parameter: Tissue Value: Whole Plant
  misc_feature: MA Experiment ID: 20001248 Result: Down-regulated in Transcription
  misc_feature: MA Experiment 20001248 PARAMETER Experiment Name: At_Far-red-induction_P Parameter: Age (day) Value: 7
  misc_feature: MA Experiment 20001248 PARAMETER Experiment Name: At_Far-red-induction_P Parameter: Light Value: Far-red vs. White
  misc_feature: MA Experiment 20001248 PARAMETER Experiment Name: At_Far-red-induction_P Parameter: Organism Value: A. thaliana
  misc_feature: MA Experiment 20001248 PARAMETER Experiment Name: At_Far-red-induction_P Parameter: Plant Line Value: Columbia
  misc_feature: MA Experiment 20001248 PARAMETER Experiment Name: At_Far-red-induction_P Parameter: Timepoint (hr) Value: 4
  misc_feature: MA Experiment 20001248 PARAMETER Experiment Name: At_Far-red-induction_P Parameter: Tissue Value: Whole Plant
  misc_feature: MA Experiment ID: 20001451 Result: Down-regulated in Transcription
  misc_feature: MA Experiment 20001451 PARAMETER Experiment Name: At_Far-red-induction_P Parameter: Age (day) Value: 7
  misc_feature: MA Experiment 20001451 PARAMETER Experiment Name: At_Far-red-induction_P Parameter: Light Value: Far-red vs. White
  misc_feature: MA Experiment 20001451 PARAMETER Experiment Name: At_Far-red-induction_P Parameter: Organism Value: A. thaliana
  misc_feature: MA Experiment 20001451 PARAMETER Experiment Name: At_Far-red-induction_P Parameter: Plant Line Value: Columbia
  misc_feature: MA Experiment 20001451 PARAMETER Experiment Name: At_Far-red-induction_P Parameter: Timepoint (hr) Value: 24
  misc_feature: MA Experiment 20001451 PARAMETER Experiment Name: At_Far-red-induction_P Parameter: Tissue Value: Whole Plant
  misc_feature: MA Experiment ID: 20001554 Result: Up-regulated in Transcription
  misc_feature: MA Experiment 20001554 PARAMETER Experiment Name: At_Drought_Soil_Dry_P Parameter: Age (day) Value: 21
  misc_feature: MA Experiment 20001554 PARAMETER Experiment Name: At_Drought_Soil_Dry_P Parameter: Organism Value: A. thaliana
  misc_feature: MA Experiment 20001554 PARAMETER Experiment Name: At_Drought_Soil_Dry_P Parameter: Plant Line Value: WS
  misc_feature: MA Experiment 20001554 PARAMETER Experiment Name: At_Drought_Soil_Dry_P Parameter: Post Timepoint (hr) Value: None
  misc_feature: MA Experiment 20001554 PARAMETER Experiment Name: At_Drought_Soil_Dry_P Parameter: Post-Treatment Value: None
  misc_feature: MA Experiment 20001554 PARAMETER Experiment Name: At_Drought_Soil_Dry_P Parameter: Timepoint (day) Value: 7
  misc_feature: MA Experiment 20001554 PARAMETER Experiment Name: At_Drought_Soil_Dry_P Parameter: Treatment Value: Drought vs. No Drought
  misc_feature: MA Experiment ID: 20001555 Result: Up-regulated in Transcription
  misc_feature: MA Experiment 20001555 PARAMETER Experiment Name: At_Drought_Soil_Dry_P Parameter: Age (day) Value: 24
  misc_feature: MA Experiment 20001555 PARAMETER Experiment Name: At_Drought_Soil_Dry_P Parameter: Organism Value: A. thaliana
  misc_feature: MA Experiment 20001555 PARAMETER Experiment Name: At_Drought_Soil_Dry_P Parameter: Plant Line Value: WS
  misc_feature: MA Experiment 20001555 PARAMETER Experiment Name: At_Drought_Soil_Dry_P Parameter: Post Timepoint (hr) Value: None
  misc_feature: MA Experiment 20001555 PARAMETER Experiment Name: At_Drought_Soil_Dry_P Parameter: Post-Treatment Value: None
  misc_feature: MA Experiment 20001555 PARAMETER Experiment Name: At_Drought_Soil_Dry_P Parameter: Timepoint (day) Value: 10
  misc_feature: MA Experiment 20001555 PARAMETER Experiment Name: At_Drought_Soil_Dry_P Parameter: Treatment Value: Drought vs. No Drought
  misc_feature: MA Experiment ID: 20001556 Result: Up-regulated in Transcription
  misc_feature: MA Experiment 20001556 PARAMETER Experiment Name: At_Drought_Soil_Dry_P Parameter: Age (day) Value: 26
  misc_feature: MA Experiment 20001556 PARAMETER Experiment Name: At_Drought_Soil_Dry_P Parameter: Organism Value: A. thaliana
  misc_feature: MA Experiment 20001556 PARAMETER Experiment Name: At_Drought_Soil_Dry_P Parameter: Plant Line Value: WS
  misc_feature: MA Experiment 20001556 PARAMETER Experiment Name: At_Drought_Soil_Dry_P Parameter: Post Timepoint (hr) Value: None
  misc_feature: MA Experiment 20001556 PARAMETER Experiment Name: At_Drought_Soil_Dry_P Parameter: Post-Treatment Value: None
  misc_feature: MA Experiment 20001556 PARAMETER Experiment Name: At_Drought_Soil_Dry_P Parameter: Timepoint (day) Value: 12
  misc_feature: MA Experiment 20001556 PARAMETER Experiment Name: At_Drought_Soil_Dry_P Parameter: Treatment Value: Drought vs. No Drought
  misc_feature: MA Experiment ID: 20001559 Result: Up-regulated in Transcription
  misc_feature: MA Experiment 20001559 PARAMETER Experiment Name: At_Drought_Soil_Dry_P Parameter: Age (day) Value: 28
  misc_feature: MA Experiment 20001559 PARAMETER Experiment Name: At_Drought_Soil_Dry_P Parameter: Organism Value: A. thaliana
  misc_feature: MA Experiment 20001559 PARAMETER Experiment Name: At_Drought_Soil_Dry_P Parameter: Plant Line Value: WS
  misc_feature: MA Experiment 20001559 PARAMETER Experiment Name: At_Drought_Soil_Dry_P Parameter: Post Timepoint (hr) Value: 29
  misc_feature: MA Experiment 20001559 PARAMETER Experiment Name: At_Drought_Soil_Dry_P Parameter: Post-Treatment Value: Re-Water vs. No Drought
  misc_feature: MA Experiment 20001559 PARAMETER Experiment Name: At_Drought_Soil_Dry_P Parameter: Timepoint (day) Value: 14
  misc_feature: MA Experiment 20001559 PARAMETER Experiment Name: At_Drought_Soil_Dry_P Parameter: Treatment Value: Drought vs. No Drought
  misc_feature: MA Experiment ID: 20001904 Result: Up-regulated in Transcription
  misc_feature: MA Experiment 20001904 PARAMETER Experiment Name: At_Drought_Reproduction_P Parameter: Age (day) Value: 37
  misc_feature: MA Experiment 20001904 PARAMETER Experiment Name: At_Drought_Reproduction_P Parameter: Organism Value: A. thaliana
  misc_feature: MA Experiment 20001904 PARAMETER Experiment Name: At_Drought_Reproduction_P Parameter: Plant Line Value: WS
  misc_feature: MA Experiment 20001904 PARAMETER Experiment Name: At_Drought_Reproduction_P Parameter: Timepoint (day) Value: 7
  misc_feature: MA Experiment 20001904 PARAMETER Experiment Name: At_Drought_Reproduction_P Parameter: Tissue Value: Rosettes
  misc_feature: MA Experiment 20001904 PARAMETER Experiment Name: At_Drought_Reproduction_P Parameter: Treatment Value: Drought vs. No Drought
  misc_feature: MA Experiment ID: 20001911 Result: Up-regulated in Transcription
  misc_feature: MA Experiment 20001911 PARAMETER Experiment Name: At_Drought_Reproduction_P Parameter: Age (day) Value: 40
  misc_feature: MA Experiment 20001911 PARAMETER Experiment Name: At_Drought_Reproduction_P Parameter: Organism Value: A. thaliana
  misc_feature: MA Experiment 20001911 PARAMETER Experiment Name: At_Drought_Reproduction_P Parameter: Plant Line Value: WS
  misc_feature: MA Experiment 20001911 PARAMETER Experiment Name: At_Drought_Reproduction_P Parameter: Timepoint (day) Value: 10
  misc_feature: MA Experiment 20001911 PARAMETER Experiment Name: At_Drought_Reproduction_P Parameter: Tissue Value: Flowers
  misc_feature: MA Experiment 20001911 PARAMETER Experiment Name: At_Drought_Reproduction_P Parameter: Treatment Value: Drought vs. No Drought

SEQ ID NO: 37852 - protein, 392 aa, Arabidopsis thaliana; identical to SEQ ID NO: 22511
  peptide (1)..(392): Ceres Seq. ID no. 12394810
  misc_feature (141)..(389): Homolog of NCBI NO: 14422442 NR Description: BURP domain-containing protein [Bruguiera
  misc_feature (100)..(389): Homolog of NCBI NO: 33578034 NR Description: BURP domain-containing protein [Gossypium
  misc_feature (77)..(99): Homolog of NCBI NO: 14422448 NR Description: BURP domain-containing protein [Bruguiera
  misc_feature (100)..(389): Homolog of NCBI NO: 18447761 NR Description: dehydration-induced protein RD22-like protein
  misc_feature (56)..(389): Homolog of NCBI NO: 34910186 NR Description: putative dehydration-responsive protein RD22
  misc_feature (16)..(83): Homolog of NCBI NO: 14422448 NR Description: BURP domain-containing protein [Bruguiera
  misc_feature (123)..(389): Homolog of NCBI NO: 14422448 NR Description: BURP domain-containing protein [Bruguiera
  misc_feature (77)..(389): Homolog of NCBI NO: 14422444 NR Description: BURP domain-containing protein [Bruguiera
  misc_feature (77)..(389): Homolog of NCBI NO: 16588826 NR Description: dehydration-responsive protein RD22 [Prunus
  misc_feature (1)..(392): Homolog of NCBI NO: 15239478 NR Description: dehydration-induced protein RD22
  misc_feature (141)..(389): Homolog of NCBI NO: 14422442 NR Description: BURP domain-containing protein [Bruguiera
  misc_feature (100)..(389): Homolog of NCBI NO: 33578034 NR Description: BURP domain-containing protein [Gossypium
  misc_feature (77)..(99): Homolog of NCBI NO: 14422448 NR Description: BURP domain-containing protein [Bruguiera
  misc_feature (100)..(389): Homolog of NCBI NO: 18447761 NR Description: dehydration-induced protein RD22-like protein
  misc_feature (56)..(389): Homolog of NCBI NO: 34910186 NR Description: putative dehydration-responsive protein RD22
  misc_feature (16)..(83): Homolog of NCBI NO: 14422448 NR Description: BURP domain-containing protein [Bruguiera
  misc_feature (123)..(389): Homolog of NCBI NO: 14422448 NR Description: BURP domain-containing protein [Bruguiera
  misc_feature (77)..(389): Homolog of NCBI NO: 14422444 NR Description: BURP domain-containing protein [Bruguiera
  misc_feature (77)..(389): Homolog of NCBI NO: 16588826 NR Description: dehydration-responsive protein RD22 [Prunus
  misc_feature (1)..(392): Homolog of NCBI NO: 15239478 NR Description: dehydration-induced protein RD22
  misc_feature (141)..(389): Homolog of NCBI NO: 14422442 NR Description: BURP domain-containing protein [Bruguiera
  misc_feature (100)..(389): Homolog of NCBI NO: 33578034 NR Description: BURP domain-containing protein [Gossypium
  misc_feature (77)..(99): Homolog of NCBI NO: 14422448 NR Description: BURP domain-containing protein [Bruguiera
  misc_feature (100)..(389): Homolog of NCBI NO: 18447761 NR Description: dehydration-induced protein RD22-like protein
  misc_feature (56)..(389): Homolog of NCBI NO: 34910186 NR Description: putative dehydration-responsive protein RD22
  misc_feature (16)..(83): Homolog of NCBI NO: 14422448 NR Description: BURP domain-containing protein [Bruguiera
  misc_feature (123)..(389): Homolog of NCBI NO: 14422448 NR Description: BURP domain-containing protein [Bruguiera
  misc_feature (77)..(389): Homolog of NCBI NO: 14422444 NR Description: BURP domain-containing protein [Bruguiera
  misc_feature (77)..(389): Homolog of NCBI NO: 16588826 NR Description: dehydration-responsive protein RD22 [Prunus
  misc_feature (1)..(392): Homolog of NCBI NO: 15239478 NR Description: dehydration-induced protein RD22

SEQ ID NO: 37853 - protein, 378 aa, Arabidopsis thaliana; identical to SEQ ID NO: 22512
  peptide (1)..(378): Ceres Seq. ID no. 12394811
  misc_feature (127)..(375): Homolog of NCBI NO: 14422442 NR Description: BURP domain-containing protein [Bruguiera
  misc_feature (86)..(375): Homolog of NCBI NO: 33578034 NR Description: BURP domain-containing protein [Gossypium
  misc_feature (63)..(85): Homolog of NCBI NO: 14422448 NR Description: BURP domain-containing protein [Bruguiera
  misc_feature (86)..(375): Homolog of NCBI NO: 18447761 NR Description: dehydration-induced protein RD22-like protein
  misc_feature (42)..(375): Homolog of NCBI NO: 34910186 NR Description: putative dehydration-responsive protein RD22
  misc_feature (2)..(69): Homolog of NCBI NO: 14422448 NR Description: BURP domain-containing protein [Bruguiera
  misc_feature (109)..(375): Homolog of NCBI NO: 14422448 NR Description: BURP domain-containing protein [Bruguiera
  misc_feature (63)..(375): Homolog of NCBI NO: 14422444 NR Description: BURP domain-containing protein [Bruguiera
  misc_feature (63)..(375): Homolog of NCBI NO: 16588826 NR Description: dehydration-responsive protein RD22 [Prunus
  misc_feature (1)..(378): Homolog of NCBI NO: 15239478 NR Description: dehydration-induced protein RD22
  misc_feature (127)..(375): Homolog of NCBI NO: 14422442 NR Description: BURP domain-containing protein [Bruguiera
  misc_feature (86)..(375): Homolog of NCBI NO: 33578034 NR Description: BURP domain-containing protein [Gossypium
  misc_feature (63)..(85): Homolog of NCBI NO: 14422448 NR Description: BURP domain-containing protein [Bruguiera
  misc_feature (86)..(375): Homolog of NCBI NO: 18447761 NR Description: dehydration-induced protein RD22-like protein
  misc_feature (42)..(375): Homolog of NCBI NO: 34910186 NR Description: putative dehydration-responsive protein RD22
  misc_feature (2)..(69): Homolog of NCBI NO: 14422448 NR Description: BURP domain-containing protein [Bruguiera
  misc_feature (109)..(375): Homolog of NCBI NO: 14422448 NR Description: BURP domain-containing protein [Bruguiera
  misc_feature (63)..(375): Homolog of NCBI NO: 14422444 NR Description: BURP domain-containing protein [Bruguiera
  misc_feature (63)..(375): Homolog of NCBI NO: 16588826 NR Description: dehydration-responsive protein RD22 [Prunus
  misc_feature (1)..(378): Homolog of NCBI NO: 15239478 NR Description: dehydration-induced protein RD22
  misc_feature (127)..(375): Homolog of NCBI NO: 14422442 NR Description: BURP domain-containing protein [Bruguiera
  misc_feature (86)..(375): Homolog of NCBI NO: 33578034 NR Description: BURP domain-containing protein [Gossypium
  misc_feature (63)..(85): Homolog of NCBI NO: 14422448 NR Description: BURP domain-containing protein [Bruguiera
  misc_feature (86)..(375): Homolog of NCBI NO: 18447761 NR Description: dehydration-induced protein RD22-like protein
  misc_feature (42)..(375): Homolog of NCBI NO: 34910186 NR Description: putative dehydration-responsive protein RD22
  misc_feature (2)..(69): Homolog of NCBI NO: 14422448 NR Description: BURP domain-containing protein [Bruguiera
  misc_feature (109)..(375): Homolog of NCBI NO: 14422448 NR Description: BURP domain-containing protein [Bruguiera
  misc_feature (63)..(375): Homolog of NCBI NO: 14422444 NR Description: BURP domain-containing protein [Bruguiera
  misc_feature (63)..(375): Homolog of NCBI NO: 16588826 NR Description: dehydration-responsive protein RD22 [Prunus
  misc_feature (1)..(378): Homolog of NCBI NO: 15239478 NR Description: dehydration-induced protein RD22

SEQ ID NO: 37854 - protein, 205 aa, Arabidopsis thaliana; identical to SEQ ID NO: 22513
  peptide (1)..(205): Ceres Seq. ID no. 12394812
  misc_feature (1)..(204): Homolog of NCBI NO: 24416614 NR Description: resistant specific protein-1(4) [Vigna radiata]
  misc_feature (1)..(202): Homolog of NCBI NO: 14422446 NR Description: BURP domain-containing protein [Bruguiera
  misc_feature (1)..(202): Homolog of NCBI NO: 14422442 NR Description: BURP domain-containing protein [Bruguiera
  misc_feature (1)..(202): Homolog of NCBI NO: 33578034 NR Description: BURP domain-containing protein [Gossypium
  misc_feature (1)..(202): Homolog of NCBI NO: 18447761 NR Description: dehydration-induced protein RD22-like protein
  misc_feature (1)..(202): Homolog of NCBI NO: 34910186 NR Description: putative dehydration-responsive protein RD22
  misc_feature (1)..(202): Homolog of NCBI NO: 14422448 NR Description: BURP domain-containing protein [Bruguiera
  misc_feature (1)..(202): Homolog of NCBI NO: 14422444 NR Description: BURP domain-containing protein [Bruguiera
  misc_feature (1)..(202): Homolog of NCBI NO: 16588826 NR Description: dehydration-responsive protein RD22 [Prunus
  misc_feature (1)..(205): Homolog of NCBI NO: 15239478 NR Description: dehydration-induced protein RD22
  misc_feature (1)..(204): Homolog of NCBI NO: 24416614 NR Description: resistant specific protein-1(4) [Vigna radiata]
  misc_feature (1)..(202): Homolog of NCBI NO: 14422446 NR Description: BURP domain-containing protein [Bruguiera
  misc_feature (1)..(202): Homolog of NCBI NO: 14422442 NR Description: BURP domain-containing protein [Bruguiera
  misc_feature (1)..(202): Homolog of NCBI NO: 33578034 NR Description: BURP domain-containing protein [Gossypium
  misc_feature (1)..(202): Homolog of NCBI NO: 18447761 NR Description: dehydration-induced protein RD22-like protein
  misc_feature (1)..(202): Homolog of NCBI NO: 34910186 NR Description: putative dehydration-responsive protein RD22
  misc_feature (1)..(202): Homolog of NCBI NO: 14422448 NR Description: BURP domain-containing protein [Bruguiera
  misc_feature (1)..(202): Homolog of NCBI NO: 14422444 NR Description: BURP domain-containing protein [Bruguiera
  misc_feature (1)..(202): Homolog of NCBI NO: 16588826 NR Description: dehydration-responsive protein RD22 [Prunus
  misc_feature (1)..(205): Homolog of NCBI NO: 15239478 NR Description: dehydration-induced protein RD22
  misc_feature (1)..(202): Homolog of NCBI NO: 33578034 NR Description: BURP domain-containing protein [Gossypium
  misc_feature (1)..(202): Homolog of NCBI NO: 18447761 NR Description: dehydration-induced protein RD22-like protein
  misc_feature (1)..(202): Homolog of NCBI NO: 34910186 NR Description: putative dehydration-responsive protein RD22
  misc_feature (1)..(202): Homolog of NCBI NO: 14422448 NR Description: BURP domain-containing protein [Bruguiera
  misc_feature (1)..(202): Homolog of NCBI NO: 14422444 NR Description: BURP domain-containing protein [Bruguiera
  misc_feature (1)..(202): Homolog of NCBI NO: 16588826 NR Description: dehydration-responsive protein RD22 [Prunus
  misc_feature (1)..(205): Homolog of NCBI NO: 15239478 NR Description: dehydration-induced protein RD22
  misc_feature (1)..(204): Homolog of NCBI NO: 24416614 NR Description: resistant specific protein-1(4) [Vigna radiata]
  misc_feature (1)..(202): Homolog of NCBI NO: 14422446 NR Description: BURP domain-containing protein [Bruguiera
  misc_feature (1)..(202): Homolog of NCBI NO: 14422442 NR Description: BURP domain-containing protein [Bruguiera

SEQ ID NO: 37855 - DNA, 1617 bp, Arabidopsis thaliana
  misc_feature (1)..(1617): Ceres Seq. ID no. 12327188
  misc_feature: MA Experiment ID: 108573 Result: Up-regulated in Transcription
  misc_feature: MA Experiment 108573 PARAMETER Experiment Name: At_Drought_cDNA_P Parameter: Timepoint (hr) Value: 6
  misc_feature: MA Experiment 108573 PARAMETER Experiment Name: At_Drought_cDNA_P Parameter: Tissue Value: Aerial
  misc_feature: MA Experiment 108573 PARAMETER Experiment Name: At_Drought_cDNA_P Parameter: Treatment Value: Drought vs. No Drought
  misc_feature: MA Experiment ID: 108595 Result: Down-regulated in Transcription
  misc_feature: MA Experiment 108595 PARAMETER Experiment Name: At_Ler-pi_Ovule_cDNA_P Parameter: Plant Line Value: null
  misc_feature: MA Experiment ID: 20000068 Result: Down-regulated in Transcription
  misc_feature: MA Experiment ID: 20000069 Result: Down-regulated in Transcription
  misc_feature: MA Experiment 20000069 PARAMETER Experiment Name: At_100uM_ABA_Mutants_cDNA_P Parameter: Plant Line Value: CS23
  misc_feature: MA Experiment 20000069 PARAMETER Experiment Name: At_100uM_ABA_Mutants_cDNA_P Parameter: Timepoint (hr) Value: 6
  misc_feature: MA Experiment 20000069 PARAMETER Experiment Name: At_100uM_ABA_Mutants_cDNA_P Parameter: Tissue Value: Aerial
  misc_feature: MA Experiment 20000069 PARAMETER Experiment Name: At_100uM_ABA_Mutants_cDNA_P Parameter: Treatment Value: 100uM ABA vs. No Treatment
  misc_feature: MA Experiment ID: 20000087 Result: Down-regulated in Transcription
  misc_feature: MA Experiment 20000087 PARAMETER Experiment Name: At_100uM_ABA_Mutants_cDNA_P Parameter: Plant Line Value: WS
  misc_feature: MA Experiment 20000087 PARAMETER Experiment Name: At_100uM_ABA_Mutants_cDNA_P Parameter: Timepoint (hr) Value: 6
  misc_feature: MA Experiment 20000087 PARAMETER Experiment Name: At_100uM_ABA_Mutants_cDNA_P Parameter: Tissue Value: Aerial
  misc_feature: MA Experiment 20000087 PARAMETER Experiment Name: At_100uM_ABA_Mutants_cDNA_P Parameter: Treatment Value: 100uM ABA vs. No Treatment
  misc_feature: MA Experiment ID: 20000113 Result: Down-regulated in Transcription
  misc_feature: MA Experiment 20000113 PARAMETER Experiment Name: At_42deg_Heat_cDNA_P Parameter: Temperature (deg C) Value: 42 vs. 22
  misc_feature: MA Experiment 20000113 PARAMETER Experiment Name: At_42deg_Heat_cDNA_P Parameter: Timepoint (hr) Value: 8
  misc_feature: MA Experiment 20000113 PARAMETER Experiment Name: At_42deg_Heat_cDNA_P Parameter: Tissue Value: Aerial
  misc_feature: MA Experiment ID: 20000224 Result: Down-regulated in Transcription
  misc_feature: MA Experiment ID: 20000455 Result: Up-regulated in Transcription
  misc_feature: MA Experiment 20000455 PARAMETER Experiment Name: At_100uM_ABA_P Parameter: Age (day) Value: 16
  misc_feature: MA Experiment 20000455 PARAMETER Experiment Name: At_100uM_ABA_P Parameter: Organism Value: A. thaliana
  misc_feature: MA Experiment 20000455 PARAMETER Experiment Name: At_100uM_ABA_P Parameter: Plant Line Value: WS
  misc_feature: MA Experiment 20000455 PARAMETER Experiment Name: At_100uM_ABA_P Parameter: Timepoint (hr) Value: 48
  misc_feature: MA Experiment 20000455 PARAMETER Experiment Name: At_100uM_ABA_P Parameter: Tissue Value: Aerial
  misc_feature: MA Experiment 20000455 PARAMETER Experiment Name: At_100uM_ABA_P Parameter: Treatment Value: 100uM ABA vs. No Treatment
  misc_feature: MA Experiment ID: 20000495 Result: Down-regulated in Transcription
  misc_feature: MA Experiment 20000495 PARAMETER Experiment Name: At_Guard_Cells_P Parameter: Harvest Date Value: 8/2/2002
  misc_feature: MA Experiment 20000495 PARAMETER Experiment Name: At_Guard_Cells_P Parameter: Organism Value: A. thaliana
  misc_feature: MA Experiment 20000495 PARAMETER Experiment Name: At_Guard_Cells_P Parameter: Tissue Value: Guard Cells vs. Leaves
  misc_feature: MA Experiment ID: 20000496 Result: Down-regulated in Transcription
  misc_feature: MA Experiment 20000496 PARAMETER Experiment Name: At_Guard_Cells_P Parameter: Harvest Date Value: 7/19/2002
  misc_feature: MA Experiment 20000496 PARAMETER Experiment Name: At_Guard_Cells_P Parameter: Organism Value: Canola
  misc_feature: MA Experiment 20000496 PARAMETER Experiment Name: At_Guard_Cells_P Parameter: Tissue Value: Guard Cells vs. Leaves
  misc_feature: MA Experiment ID: 20001451 Result: Down-regulated in Transcription
  misc_feature: MA Experiment 20001451 PARAMETER Experiment Name: At_Far-red-induction_P Parameter: Age (day) Value: 7
  misc_feature: MA Experiment 20001451 PARAMETER Experiment Name: At_Far-red-induction_P Parameter: Light Value: Far-red vs. White
  misc_feature: MA Experiment 20001451 PARAMETER Experiment Name: At_Far-red-induction_P Parameter: Organism Value: A. thaliana
  misc_feature: MA Experiment 20001451 PARAMETER Experiment Name: At_Far-red-induction_P Parameter: Plant Line Value: Columbia
  misc_feature: MA Experiment 20001451 PARAMETER Experiment Name: At_Far-red-induction_P Parameter: Timepoint (hr) Value: 24
  misc_feature: MA Experiment 20001451 PARAMETER Experiment Name: At_Far-red-induction_P Parameter: Tissue Value: Whole Plant
cccgacagtagcaagcaaaaattcttcatcgactcaaattcaaaaactcatctctctctatctctatttctctggttccatagctcaccgtcgcatcgcagatctactccttccgcaataaattttaccggcggaggtatcagatctcgccgatctgttgtagcagctactgtattttgggcttctcatttgatattggggaaacgaggagtagaggacgatggaaaatctgatctctctggttaacaagatacagagagcttgcacggctttaggagaccatggagactccagcgctttacctactctttgggattccttgcctgcgatcgccgtcgttggtggtcagagctcagggaagtcttcagtcctggagagcatcgtgggaaaggactttttaccccgtggatctggcattgttactcgaaggccccttgtcttacagttgcaaaagatcgatgatggaacccgggagtatgcagagtttcttcacctcccgaggaaaaagtttactgattttgctgctgtgaggaaggagattcaagatgagactgacagagagactggacgcagcaaggctatttctagtgttcccattcaccttagcatatactctcccaatgttgtcaacttgacactgatagatcttccagggcttacaaaagttgctgttgatggacaatctgatagtatagtgaaggacattgaaaacatggttcggtcctacattgaaaagcccaactgcatcattttggcaatctcacctgcaaaccaagatcttgctacctcagatgcaattaaaatttcccgtgaggttgatccatcgggggacagaacatttggtgtcttgacaaagattgatcttatggacaaggggacggatgcagtggaaattctggaagggagatcttttaaacttaaatatccgtgggttggtgtcgtcaaccgttcccaagcagatattaacaagaatgtcgacatgattgcggctcggaaaagagagagggagtacttttccaatactactgagtataggcaccttgctaataaaatgggttccgagcatttggcaaagatgctctccaagcatctagaacgtgtgatcaagtcgagaattcctggcattcagtcacttattaacaaaacagtattagagctggaaactgaactaagtcgccttggaaagcctattgcagctgatgcaggggggaagttgtactcaataatggagatatgtcggctttttgatcaaatattcaaagagcatcttgatggagtgcgtgctggtggtgaaaaagtgtacaacgtgtttgataaccaccttcctgcggctctgaagagactccaatttgacaagcagctagcgatggacaacatccggaagctggtcactgaggctgatggttaccagcctcacttgattgctcctgagcaaggttaccgtcgtctcattgagtcttctattgtctccatcagaggccctgctgaagcatctgttgacaccgtatgaactctttactttcatctctaaaaagatgtatcaaaaacctaacacaaaacaataagcttctctctccgttttttttttttttctatggttaaatattaggttcatgc

SEQ ID NO: 37856 - protein, 429 aa, Arabidopsis thaliana
  peptide (1)..(429): Ceres Seq. ID no. 12327189
  misc_feature (222)..(429): Pfam Name: Dynamin central region Pfam Description: Dynamin central region
  misc_feature (1)..(429): Homolog of NCBI NO: 11357275 NR Description: dynamin-like protein 4 (ADL4) - Arabidopsis
  misc_feature (1)..(429): Homolog of NCBI NO: 18411520 NR Description: dynamin-like protein 4 (ADL4)
  misc_feature (1)..(152): Homolog of NCBI NO: 34911188 NR Description: putative dynamin-like protein
  misc_feature (134)..(416): Homolog of NCBI NO: 34911188 NR Description: putative dynamin-like protein
  misc_feature (1)..(429): Homolog of NCBI NO: 5931765 NR Description: phragmoplastin [Nicotiana tabacum]
  misc_feature (1)..(429): Homolog of NCBI NO: 2129826 NR Description: phragmoplastin 5 - soybean
  misc_feature (1)..(429): Homolog of NCBI NO: 2129825 NR Description: phragmoplastin 12 - soybean
  misc_feature (1)..(429): Homolog of NCBI NO: 2267213 NR Description: dynamin-like GTP binding protein [Arabidopsis
  misc_feature (1)..(429): Homolog of NCBI NO: 20453081 NR Description: AT5g42080/MJC20_19 [Arabidopsis thaliana]
  misc_feature (1)..(429): Homolog of NCBI NO: 21593776 NR Description: dynamin-like protein [Arabidopsis thaliana]
MENLISLVNKIQRACTALGDHGDSSALPTLWDSLPAIAVVGGQSSGKSSVLESIVGKDFLPRGSGIVTRRPLVLQLQKIDDGTREYAEFLHLPRKKFTDFAAVRKEIQDETDRETGRSKAISSVPIHLSIYSPNVVNLTLIDLPGLTKVAVDGQSDSIVKDIENMVRSYIEKPNCIILAISPANQDLATSDAIKISREVDPSGDRTFGVLTKIDLMDKGTDAVEILEGRSFKLKYPWVGVVNRSQADINKNVDMIAARKREREYFSNTTEYRHLANKMGSEHLAKMLSKHLERVIKSRIPGIQSLINKTVLELETELSRLGKPIAADAGGKLYSIMEICRLFDQIFKEHLDGVRAGGEKVYNVFDNHLPAALKRLQFDKQLAMDNIRKLVTEADGYQPHLIAPEQGYRRLIESSIVSIRGPAEASVDTV

SEQ ID NO: 37857 - protein, 265 aa, Arabidopsis thaliana
  peptide (1)..(265): Ceres Seq. ID no. 12327190
  misc_feature (58)..(265): Pfam Name: Dynamin central region Pfam Description: Dynamin central region
  misc_feature (1)..(265): Homolog of NCBI NO: 37536976 NR Description: putative phragmoplastin [Oryza sativa (japonica
  misc_feature (1)..(265): Homolog of NCBI NO: 11357275 NR Description: dynamin-like protein 4 (ADL4) - Arabidopsis
  misc_feature (1)..(265): Homolog of NCBI NO: 18411520 NR Description: dynamin-like protein 4 (ADL4)
  misc_feature (1)..(252): Homolog of NCBI NO: 34911188 NR Description: putative dynamin-like protein
  misc_feature (1)..(265): Homolog of NCBI NO: 5931765 NR Description: phragmoplastin [Nicotiana tabacum]
  misc_feature (1)..(265): Homolog of NCBI NO: 2129826 NR Description: phragmoplastin 5 - soybean
  misc_feature (1)..(265): Homolog of NCBI NO: 2129825 NR Description: phragmoplastin 12 - soybean
  misc_feature (1)..(265): Homolog of NCBI NO: 2267213 NR Description: dynamin-like GTP binding protein [Arabidopsis
  misc_feature (1)..(265): Homolog of NCBI NO: 20453081 NR Description: AT5g42080/MJC20_19 [Arabidopsis thaliana]
  misc_feature (1)..(265): Homolog of NCBI NO: 21593776 NR Description: dynamin-like protein [Arabidopsis thaliana]
MVRSYIEKPNCIILAISPANQDLATSDAIKISREVDPSGDRTFGVLTKIDLMDKGTDAVEILEGRSFKLKYPWVGVVNRSQADINKNVDMIAARKREREYFSNTTEYRHLANKMGSEHLAKMLSKHLERVIKSRIPGIQSLINKTVLELETELSRLGKPIAADAGGKLYSIMEICRLFDQIFKEHLDGVRAGGEKVYNVFDNHLPAALKRLQFDKQLAMDNIRKLVTEADGYQPHLIAPEQGYRRLIESSIVSIRGPAEASVDTV

SEQ ID NO: 37858 - protein, 214 aa, Arabidopsis thaliana
  peptide (1)..(214): Ceres Seq. ID no. 12327191
  misc_feature (7)..(214): Pfam Name: Dynamin central region Pfam Description: Dynamin central region
  misc_feature (1)..(214): Homolog of NCBI NO: 37536976 NR Description: putative phragmoplastin [Oryza sativa (japonica
  misc_feature (1)..(214): Homolog of NCBI NO: 11357275 NR Description: dynamin-like protein 4 (ADL4) - Arabidopsis
  misc_feature (1)..(214): Homolog of NCBI NO: 18411520 NR Description: dynamin-like protein 4 (ADL4)
  misc_feature (1)..(201): Homolog of NCBI NO: 34911188 NR Description: putative dynamin-like protein
  misc_feature (1)..(214): Homolog of NCBI NO: 5931765 NR Description: phragmoplastin [Nicotiana tabacum]
  misc_feature (1)..(214): Homolog of NCBI NO: 2129826 NR Description: phragmoplastin 5 - soybean
  misc_feature (1)..(214): Homolog of NCBI NO: 2129825 NR Description: phragmoplastin 12 - soybean
  misc_feature (1)..(214): Homolog of NCBI NO: 2267213 NR Description: dynamin-like GTP binding protein [Arabidopsis
  misc_feature (1)..(214): Homolog of NCBI NO: 20453081 NR Description: AT5g42080/MJC20_19 [Arabidopsis thaliana]
  misc_feature (1)..(214): Homolog of NCBI NO: 21593776 NR Description: dynamin-like protein [Arabidopsis thaliana]
MDKGTDAVEILEGRSFKLKYPWVGVVNRSQADINKNVDMIAARKREREYFSNTTEYRHLANKMGSEHLAKMLSKHLERVIKSRIPGIQSLINKTVLELETELSRLGKPIAADAGGKLYSIMEICRLFDQIFKEHLDGVRAGGEKVYNVFDNHLPAALKRLQFDKQLAMDNIRKLVTEADGYQPHLIAPEQGYRRLIESSIVSIRGPAEASVDTV

SEQ ID NO: 37859 - DNA, 1642 bp, Arabidopsis thaliana
  misc_feature (1)..(1642): Ceres Seq. ID no. 12580332
  misc_feature: MA Experiment ID: 20000224 Result: Down-regulated in Transcription
  misc_feature: MA Experiment ID: 20000437 Result: Up-regulated in Transcription
  misc_feature: MA Experiment 20000437 PARAMETER Experiment Name: At_Drought_P Parameter: Age (day) Value: 8
  misc_feature: MA Experiment 20000437 PARAMETER Experiment Name: At_Drought_P Parameter: Organism Value: A. thaliana
  misc_feature: MA Experiment 20000437 PARAMETER Experiment Name: At_Drought_P Parameter: Plant Line Value: WS
  misc_feature: MA Experiment 20000437 PARAMETER Experiment Name: At_Drought_P Parameter: Timepoint (hr) Value: 24
  misc_feature: MA Experiment 20000437 PARAMETER Experiment Name: At_Drought_P Parameter: Tissue Value: Whole Plant
  misc_feature: MA Experiment 20000437 PARAMETER Experiment Name: At_Drought_P Parameter: Treatment Value: Drought vs. No Drought
  misc_feature: MA Experiment ID: 20000439 Result: Down-regulated in Transcription
  misc_feature: MA Experiment 20000439 PARAMETER Experiment Name: At_Roots__P Parameter: Age (day) Value: 14 vs. 21
  misc_feature: MA Experiment 20000439 PARAMETER Experiment Name: At_Roots__P Parameter: Organism Value: A. thaliana
  misc_feature: MA Experiment 20000439 PARAMETER Experiment Name: At_Roots__P Parameter: Tissue Value: Roots vs. Whole Plant
  misc_feature: MA Experiment ID: 20001247 Result: Up-regulated in Transcription
  misc_feature: MA Experiment 20001247 PARAMETER Experiment Name: At_Far-red-induction_P Parameter: Age (day) Value: 7
  misc_feature: MA Experiment 20001247 PARAMETER Experiment Name: At_Far-red-induction_P Parameter: Light Value: Far-red vs. White
  misc_feature: MA Experiment 20001247 PARAMETER Experiment Name: At_Far-red-induction_P Parameter: Organism Value: A. thaliana
  misc_feature: MA Experiment 20001247 PARAMETER Experiment Name: At_Far-red-induction_P Parameter: Plant Line Value: Columbia
  misc_feature: MA Experiment 20001247 PARAMETER Experiment Name: At_Far-red-induction_P Parameter: Timepoint (hr) Value: 1
  misc_feature: MA Experiment 20001247 PARAMETER Experiment Name: At_Far-red-induction_P Parameter: Tissue Value: Whole Plant
  misc_feature: MA Experiment ID: 20001905 Result: Up-regulated in Transcription
  misc_feature: MA Experiment 20001905 PARAMETER Experiment Name: At_Drought_Reproduction_P Parameter: Age (day) Value: 40
  misc_feature: MA Experiment 20001905 PARAMETER Experiment Name: At_Drought_Reproduction_P Parameter: Organism Value: A. thaliana
  misc_feature: MA Experiment 20001905 PARAMETER Experiment Name: At_Drought_Reproduction_P Parameter: Plant Line Value: WS
  misc_feature: MA Experiment 20001905 PARAMETER Experiment Name: At_Drought_Reproduction_P Parameter: Timepoint (day) Value: 10
  misc_feature: MA Experiment 20001905 PARAMETER Experiment Name: At_Drought_Reproduction_P Parameter: Tissue Value: Rosettes
  misc_feature: MA Experiment 20001905 PARAMETER Experiment Name: At_Drought_Reproduction_P Parameter: Treatment Value: Drought vs. No Drought
attattatcccttcttcttcttcttcttcgtcttcgtctttgattctcctgattcatgtcgcttaaatttttagcgatcttcgaatcccattttccttcgggaatctgacattttttctcgggaaattttttacccaaatcggagtaaagtatcgaatctagagaatccgctatggatgagacctattttgatctattgaatttctttaagaatccctcttttacagagacatttgtcgacatcttactatgcgcagttccgatttggctcgccgttatgatcgggttattaatcggatggtcttggcgtccaagatggaccggtttgatctatttagggtttcgttctaagcttcggtttttatggaccgcaccgcctgggtttggtgctcgtcggctttggcttgctttcaccgctctctctgctttctccgtttgccgaaccatctggtcaaggaatgacaccagagctaataaatcggcgaccggttcagcttcgtcgcagacgcctgttgaggataatgatgaatcaggattggcctcaagaggtagcgataacgggacggtgacagaggatattgtgacagagaatgatttagagcatctgcttcagctgcttgaagttggaaatgcagctttggaatggcaatctatgatggataagactactccaaatatgagctaccaggcttggcgtcatgagcctgagacaggtcctgttatttatcgcagccggactgtgtttgaggatgcaactccagatattgttagggatttcttctgggatgatgagtttcgacctaaatgggatttcatgcttgccaacttcaaaacgttggaggaggacactcagacaggaacaatgattgttcagtggagaaaaaagtttccttttttctgtagtgaccgagagtatatcattggccggagaatatgggagtctgggaagaagtattattgtgtcacaaagggagttccttatccagctctaccaaagcgtgataagccaaggcgtgttgagctttatttctcaagttgggttatcatagcggttgaatcccgaaaaggagatggacagcaaacggcttgtgaagtttcccttgtccactacgaagacatgggcatcccaaaagacgtagcaaagttaggtgtccgtcatggcatgtggggagctgtcaagaagctaaactccggtttacgagcgtaccaatccgccagaaaatcagactcatctctatctcggatcgcccaaatggcaagaatctctacaaaactgaacatggattctgcagaatcttcttcaagagatgaagacagaagcagagcaatggaatatgcgagacaacgggaccatttgagaatggactggaaatgggttgttgtaggaggtgtcgcattggcttgtggccttcactctgggatcattggcaaggctttactggctggagctggccagagactggctcgtaggtgagaaaccttgtcgtattcttattatatcttcccttgacagaaaagagaaacatatgcatataactaagggaaatgtattatttttgcaactcctctgagaagggcatgtggttttggtggtgaaccatgtagagtagtagctttaaactatggagtcataagttatttg

SEQ ID NO: 37860 - protein, 433 aa, Arabidopsis thaliana
  peptide (1)..(433): Ceres Seq. ID no. 12580333
  misc_feature (185)..(264): Pfam Name: START domain Pfam Description: START domain
  misc_feature (21)..(52): Homolog of NCBI NO: 15217736 NR Description: membrane related protein CP5, putative
  misc_feature (76)..(432): Homolog of NCBI NO: 15217736 NR Description: membrane related protein CP5, putative
  misc_feature (21)..(52): Homolog of NCBI NO: 22135902 NR Description: membrane related protein CP5, putative
  misc_feature (76)..(432): Homolog of NCBI NO: 22135902 NR Description: membrane related protein CP5, putative
  misc_feature (5)..(42): Homolog of NCBI NO: 34393225 NR Description: putative membrane related protein CP5
  misc_feature (118)..(429): Homolog of NCBI NO: 34393225 NR Description: putative membrane related protein CP5
  misc_feature (9)..(433): Homolog of NCBI NO: 15810257 NR Description: unknown protein [Arabidopsis thaliana]
  misc_feature (9)..(433): Homolog of NCBI NO: 18403635 NR Description: expressed protein
  misc_feature (1)..(433): Homolog of NCBI NO: 7485064 NR Description: hypothetical protein - Arabidopsis thaliana
  misc_feature (1)..(433): Homolog of NCBI NO: 18414239 NR Description: expressed protein
MDETYFDLLNFFKNPSFTETFVDILLCAVPIWLAVMIGLLIGWSWRPRWTGLIYLGFRSKLRFLWTAPPGFGARRLWLAFTALSAFSVCRTIWSRNDTRANKSATGSASSQTPVEDNDESGLASRGSDNGTVTEDIVTENDLEHLLQLLEVGNAALEWQSMMDKTTPNMSYQAWRHEPETGPVIYRSRTVFEDATPDIVRDFFWDDEFRPKWDFMLANFKTLEEDTQTGTMIVQWRKKFPFFCSDREYIIGRRIWESGKKYYCVTKGVPYPALPKRDKPRRVELYFSSWVIIAVESRKGDGQQTACEVSLVHYEDMGIPKDVAKLGVRHGMWGAVKKLNSGLRAYQSARKSDSSLSRIAQMARISTKLNMDSAESSSRDEDRSRAMEYARQRDHLRMDWKWVVVGGVALACGLHSGIIGKALLAGAGQRLARR

SEQ ID NO: 37861 - protein, 398 aa, Arabidopsis thaliana
  peptide (1)..(398): Ceres Seq. ID no. 12580334
  misc_feature (150)..(229): Pfam Name: START domain Pfam Description: START domain
  misc_feature (102)..(396): Homolog of NCBI NO: 38344869 NR Description: OSJNBa0020P07.12 [Oryza sativa (japonica
  misc_feature (1)..(17): Homolog of NCBI NO: 15217736 NR Description: membrane related protein CP5, putative
  misc_feature (41)..(397): Homolog of NCBI NO: 15217736 NR Description: membrane related protein CP5, putative
  misc_feature (1)..(17): Homolog of NCBI NO: 22135902 NR Description: membrane related protein CP5, putative
  misc_feature (41)..(397): Homolog of NCBI NO: 22135902 NR Description: membrane related protein CP5, putative
  misc_feature (83)..(394): Homolog of NCBI NO: 34393225 NR Description: putative membrane related protein CP5
  misc_feature (1)..(398): Homolog of NCBI NO: 15810257 NR Description: unknown protein [Arabidopsis thaliana]
  misc_feature (1)..(398): Homolog of NCBI NO: 18403635 NR Description: expressed protein
  misc_feature (1)..(398): Homolog of NCBI NO: 7485064 NR Description: hypothetical protein - Arabidopsis thaliana
  misc_feature (1)..(398): Homolog of NCBI NO: 18414239 NR Description: expressed protein
MIGLLIGWSWRPRWTGLIYLGFRSKLRFLWTAPPGFGARRLWLAFTALSAFSVCRTIWSRNDTRANKSATGSASSQTPVEDNDESGLASRGSDNGTVTEDIVTENDLEHLLQLLEVGNAALEWQSMMDKTTPNMSYQAWRHEPETGPVIYRSRTVFEDATPDIVRDFFWDDEFRPKWDFMLANFKTLEEDTQTGTMIVQWRKKFPFFCSDREYIIGRRIWESGKKYYCVTKGVPYPALPKRDKPRRVELYFSSWVIIAVESRKGDGQQTACEVSLVHYEDMGIPKDVAKLGVRHGMWGAVKKLNSGLRAYQSARKSDSSLSRIAQMARISTKLNMDSAESSSRDEDRSRAMEYARQRDHLRMDWKWVVVGGVALACGLHSGIIGKALLAGAGQRLARR

SEQ ID NO: 37862 - protein, 273 aa, Arabidopsis thaliana
  peptide (1)..(273): Ceres Seq. ID no. 12580335
  misc_feature (25)..(104): Pfam Name: START domain Pfam Description: START domain
  misc_feature (1)..(269): Homolog of NCBI NO: 10178166 NR Description: membrane related protein-like [Arabidopsis
  misc_feature (1)..(269): Homolog of NCBI NO: 18033654 NR Description: putative nodule membrane protein [Medicago sativa]
  misc_feature (1)..(271): Homolog of NCBI NO: 38344869 NR Description: OSJNBa0020P07.12 [Oryza sativa (japonica
  misc_feature (1)..(272): Homolog of NCBI NO: 15217736 NR Description: membrane related protein CP5, putative
  misc_feature (1)..(272): Homolog of NCBI NO: 22135902 NR Description: membrane related protein CP5, putative
  misc_feature (1)..(269): Homolog of NCBI NO: 34393225 NR Description: putative membrane related protein CP5
  misc_feature (1)..(273): Homolog of NCBI NO: 15810257 NR Description: unknown protein [Arabidopsis thaliana]
  misc_feature (1)..(273): Homolog of NCBI NO: 18403635 NR Description: expressed protein
  misc_feature (1)..(273): Homolog of NCBI NO: 7485064 NR Description: hypothetical protein - Arabidopsis thaliana
  misc_feature (1)..(273): Homolog of NCBI NO: 18414239 NR Description: expressed protein
MMDKTTPNMSYQAWRHEPETGPVIYRSRTVFEDATPDIVRDFFWDDEFRPKWDFMLANFKTLEEDTQTGTMIVQWRKKFPFFCSDREYIIGRRIWESGKKYYCVTKGVPYPALPKRDKPRRVELYFSSWVIIAVESRKGDGQQTACEVSLVHYEDMGIPKDVAKLGVRHGMWGAVKKLNSGLRAYQSARKSDSSLSRIAQMARISTKLNMDSAESSSRDEDRSRAMEYARQRDHLRMDWKWVVVGGVALACGLHSGIIGKALLAGAGQRLARR

SEQ ID NO: 37863 - DNA, 1390 bp, Arabidopsis thaliana; identical to SEQ ID NO: 24583
  misc_feature (1)..(1390): Ceres Seq. ID no. 12338463
  misc_feature: MA Experiment ID: 20000184 Result: Down-regulated in Transcription
  misc_feature: MA Experiment 20000184 PARAMETER Experiment Name: At_Shoots__P Parameter: Age (day) Value: 7
  misc_feature: MA Experiment 20000184 PARAMETER Experiment Name: At_Shoots__P Parameter: Tissue Value: Shoots vs. Whole Plant
  misc_feature: MA Experiment ID: 20000185 Result: Down-regulated in Transcription
  misc_feature: MA Experiment 20000185 PARAMETER Experiment Name: At_Roots__P Parameter: Age (day) Value: 7 vs. 21
  misc_feature: MA Experiment 20000185 PARAMETER Experiment Name: At_Roots__P Parameter: Organism Value: A. thaliana
  misc_feature: MA Experiment 20000185 PARAMETER Experiment Name: At_Roots__P Parameter: Tissue Value: Roots vs. Whole Plant
  misc_feature: MA Experiment ID: 20000224 Result: Up-regulated in Transcription
  misc_feature: MA Experiment ID: 20000439 Result: Down-regulated in Transcription
  misc_feature: MA Experiment 20000439 PARAMETER Experiment Name: At_Roots__P Parameter: Age (day) Value: 14 vs. 21
  misc_feature: MA Experiment 20000439 PARAMETER Experiment Name: At_Roots__P Parameter: Organism Value: A. thaliana
  misc_feature: MA Experiment 20000439 PARAMETER Experiment Name: At_Roots__P Parameter: Tissue Value: Roots vs. Whole Plant
  misc_feature: Phenotype: WHOLE PLANT Color-Yellow-Green Viable 1
  misc_feature: Phenotype: WHOLE PLANT Color-Yellow-Green Viable 1
  misc_feature: Phenotype: WHOLE PLANT Color-Yellow-Green Viable 1
  misc_feature: Phenotype: WHOLE PLANT Color-Yellow-Green Viable 1
  misc_feature: Phenotype: WHOLE PLANT Color-Yellow-Green Viable 1
  misc_feature: Phenotype: WHOLE PLANT Color-Yellow-Green Viable 1
  misc_feature: Phenotype: WHOLE PLANT Color-Yellow-Green Viable 1
  misc_feature: Phenotype: WHOLE PLANT Color-Yellow-Green Viable 1
  misc_feature: Phenotype: WHOLE PLANT Color-Yellow-Green Viable 1
  misc_feature: Phenotype: WHOLE PLANT Color-Yellow-Green Viable 1

SEQ ID NO: 37864 - protein, 413 aa, Arabidopsis thaliana; identical to SEQ ID NO: 24584
  peptide (1)..(413): Ceres Seq. ID no. 12338464
  misc_feature (186)..(381): Pfam Name: Clp protease Pfam Description: Clp protease
  misc_feature (186)..(381): Pfam Name: Clp protease Pfam Description: Clp protease
  misc_feature (186)..(381): Homolog of NCBI NO: 33866182 NR Description: ATP-dependent Clp protease proteolytic subunit 4
  misc_feature (186)..(381): Homolog of NCBI NO: 33862588 NR Description: Clp protease proteolytic subunit
  misc_feature (187)..(382): Homolog of NCBI NO: 23126723 NR Description: hypothetical protein [Nostoc punctiforme]
  misc_feature (186)..(381): Homolog of NCBI NO: 33861869 NR Description: Clp protease proteolytic subunit
  misc_feature (187)..(382): Homolog of NCBI NO: 17231850 NR Description: ATP-dependent Clp protease proteolytic subunit
  misc_feature (186)..(381): Homolog of NCBI NO: 33866182 NR Description: ATP-dependent Clp protease proteolytic subunit 4
  misc_feature (187)..(382): Homolog of NCBI NO: 23126723 NR Description: hypothetical protein [Nostoc punctiforme]
  misc_feature (187)..(382): Homolog of NCBI NO: 17231850 NR Description: ATP-dependent Clp protease proteolytic subunit
  misc_feature (27)..(413): Homolog of NCBI NO: 18402863 NR Description: ATP-dependent Clp protease proteolytic subunit
  misc_feature (195)..(390): Homolog of NCBI NO: 13812146 NR Description: ATP-dependent Clp protease proteolytic subunit
  misc_feature (192)..(381): Homolog of NCBI NO: 22299302 NR Description: ATP-dependent Clp protease proteolytic subunit 3
  misc_feature (190)..(377): Homolog of NCBI NO: 18390982 NR Description: ATP-dependent Clp protease proteolytic subunit
  misc_feature (186)..(381): Homolog of NCBI NO: 33240836 NR Description: Protease subunit of ATP-dependent Clp protease
  misc_feature (186)..(381): Homolog of NCBI NO: 33861869 NR Description: Clp protease proteolytic subunit
  misc_feature (186)..(381): Homolog of NCBI NO: 33862588 NR Description: Clp protease proteolytic subunit
  misc_feature (186)..(381): Homolog of NCBI NO: 33240836 NR Description: Protease subunit of ATP-dependent Clp protease
  misc_feature (190)..(377): Homolog of NCBI NO: 18390982 NR Description: ATP-dependent Clp protease proteolytic subunit
  misc_feature (192)..(381): Homolog of NCBI NO: 22299302 NR Description: ATP-dependent Clp protease proteolytic subunit 3
  misc_feature (195)..(390): Homolog of NCBI NO: 13812146 NR Description: ATP-dependent Clp protease proteolytic subunit
  misc_feature (27)..(413): Homolog of NCBI NO: 18402863 NR Description: ATP-dependent Clp protease proteolytic subunit

SEQ ID NO: 37865 - protein, 387 aa, Arabidopsis thaliana; identical to SEQ ID NO: 24585
  peptide (1)..(387): Ceres Seq. ID no. 12338466
  misc_feature (160)..(355): Pfam Name: Clp protease Pfam Description: Clp protease
  misc_feature (160)..(355): Pfam Name: Clp protease Pfam Description: Clp protease
  misc_feature (160)..(355): Homolog of NCBI NO: 33866182 NR Description: ATP-dependent Clp protease proteolytic subunit 4
  misc_feature (160)..(355): Homolog of NCBI NO: 33862588 NR Description: Clp protease proteolytic subunit
  misc_feature (161)..(356): Homolog of NCBI NO: 23126723 NR Description: hypothetical protein [Nostoc punctiforme]
  misc_feature (160)..(355): Homolog of NCBI NO: 33861869 NR Description: Clp protease proteolytic subunit
  misc_feature (161)..(356): Homolog of NCBI NO: 17231850 NR Description: ATP-dependent Clp protease proteolytic subunit
  misc_feature (160)..(355): Homolog of NCBI NO: 33866182 NR Description: ATP-dependent Clp protease proteolytic subunit 4
  misc_feature (161)..(356): Homolog of NCBI NO: 23126723 NR Description: hypothetical protein [Nostoc punctiforme]
  misc_feature (161)..(356): Homolog of NCBI NO: 17231850 NR Description: ATP-dependent Clp protease proteolytic subunit
  misc_feature (1)..(387): Homolog of NCBI NO: 18402863 NR Description: ATP-dependent Clp protease proteolytic subunit
  misc_feature (169)..(364): Homolog of NCBI NO: 13812146 NR Description: ATP-dependent Clp protease proteolytic subunit
  misc_feature (166)..(355): Homolog of NCBI NO: 22299302 NR Description: ATP-dependent Clp protease proteolytic subunit 3
  misc_feature (164)..(351): Homolog of NCBI NO: 18390982 NR Description: ATP-dependent Clp protease proteolytic subunit
  misc_feature (160)..(355): Homolog of NCBI NO: 33240836 NR Description: Protease subunit of ATP-dependent Clp protease
  misc_feature (160)..(355): Homolog of NCBI NO: 33861869 NR Description: Clp protease proteolytic subunit
  misc_feature (160)..(355): Homolog of NCBI NO: 33862588 NR Description: Clp protease proteolytic subunit
  misc_feature (160)..(355): Homolog of NCBI NO: 33240836 NR Description: Protease subunit of ATP-dependent Clp protease
  misc_feature (164)..(351): Homolog of NCBI NO: 18390982 NR Description: ATP-dependent Clp protease proteolytic subunit
  misc_feature (166)..(355): Homolog of NCBI NO: 22299302 NR Description: ATP-dependent Clp protease proteolytic subunit 3
  misc_feature (169)..(364): Homolog of NCBI NO: 13812146 NR Description: ATP-dependent Clp protease proteolytic subunit
  misc_feature (1)..(387): Homolog of NCBI NO: 18402863 NR Description: ATP-dependent Clp protease proteolytic subunit

SEQ ID NO: 37866 - protein, 348 aa, Arabidopsis thaliana; identical to SEQ ID NO: 24586
  peptide (1)..(348): Ceres Seq. ID no. 12338467
  misc_feature (121)..(316): Pfam Name: Clp protease Pfam Description: Clp protease
  misc_feature (121)..(316): Pfam Name: Clp protease Pfam Description: Clp protease
  misc_feature (121)..(316): Homolog of NCBI NO: 33866182 NR Description: ATP-dependent Clp protease proteolytic subunit 4
  misc_feature (121)..(316): Homolog of NCBI NO: 33862588 NR Description: Clp protease proteolytic subunit
  misc_feature (122)..(317): Homolog of NCBI NO: 23126723 NR Description: hypothetical protein [Nostoc punctiforme]
  misc_feature (121)..(316): Homolog of NCBI NO: 33861869 NR Description: Clp protease proteolytic subunit
  misc_feature (122)..(317): Homolog of NCBI NO: 17231850 NR Description: ATP-dependent Clp protease proteolytic subunit
  misc_feature (121)..(316): Homolog of NCBI NO: 33866182 NR Description: ATP-dependent Clp protease proteolytic subunit 4
  misc_feature (122)..(317): Homolog of NCBI NO: 23126723 NR Description: hypothetical protein [Nostoc punctiforme]
  misc_feature (122)..(317): Homolog of NCBI NO: 17231850 NR Description: ATP-dependent Clp protease proteolytic subunit
  misc_feature (1)..(348): Homolog of NCBI NO: 18402863 NR Description: ATP-dependent Clp protease proteolytic subunit
  misc_feature (130)..(325): Homolog of NCBI NO: 13812146 NR Description: ATP-dependent Clp protease proteolytic subunit
  misc_feature (127)..(316): Homolog of NCBI NO: 22299302 NR Description: ATP-dependent Clp protease proteolytic subunit 3
  misc_feature (125)..(312): Homolog of NCBI NO: 18390982 NR Description: ATP-dependent Clp protease proteolytic subunit
  misc_feature (121)..(316): Homolog of NCBI NO: 33240836 NR Description: Protease subunit of ATP-dependent Clp protease
  misc_feature (121)..(316): Homolog of NCBI NO: 33861869 NR Description: Clp protease proteolytic subunit
  misc_feature (121)..(316): Homolog of NCBI NO: 33862588 NR Description: Clp protease proteolytic subunit
  misc_feature (121)..(316): Homolog of NCBI NO: 33240836 NR Description: Protease subunit of ATP-dependent Clp protease
  misc_feature (125)..(312): Homolog of NCBI NO: 18390982 NR Description: ATP-dependent Clp protease proteolytic subunit
  misc_feature (127)..(316): Homolog of NCBI NO: 22299302 NR Description: ATP-dependent Clp protease proteolytic subunit 3
  misc_feature (130)..(325): Homolog of NCBI NO: 13812146 NR Description: ATP-dependent Clp protease proteolytic subunit
  misc_feature (1)..(348): Homolog of NCBI NO: 18402863 NR Description: ATP-dependent Clp protease proteolytic subunit

SEQ ID NO: 37867 - DNA, 975 bp, Arabidopsis thaliana
  misc_feature (1)..(975): Ceres Seq. ID no. 13504902
gagatcccatttcttttgttggcttacttctctcgaatttacgcaggaagatcattagcagagaattctcatctgattcagtccatggctgccacggctcttttccgatcgattcgccgacgcgacgtcgtctccgcgcctctttccgtttacaaatcccttgctggtaatgctcaaccttcctggggtagttcatacattggtcagaactatgcaagtttctccagagctttcgggtcaaaacctgttgtgaatgacattcttggtactggtttgggcactaacaatgccattagagaggagagagagaagtcaaaatctactgaagctgcaattgttggtgctcaattgactcgatctttccgtgctcttgatgtgggaacatcgaaacgattgttttctacaatctcaggggatataaagacaacacaggaggaaccaaaaatcaaaagctttcgccctttatctcctcacctttctgtttaccagcctcagatgaactccatgctatcgattttcaacagaatctcaggggtttacttgaccggtgtcactttcgctggctaccttctctacctgaagatgggtatgatctgcctcacctacccgagtttctaccaagtcctttaccatacacaacagcaacttccagtcatcacctcggttactgcattagccgctatttatcatactatcaagagtactcactcactcttgacccattaaaaacctttaccaaagctctttcgatgaagccgccaaagtctccagtaagagtttctttgagatgattaataaggagacaagaaaacatttgttaaactctgtcttgaaaaggtaaagatttagcacctgtttctttggattcgaggcttttttgggggtatgtttgttgcttttctttgttctcagaccttttttgaatgatgtaataaatgtttaccaaagttctgttgctacgttactctttttgtt

SEQ ID NO: 37868 - protein, 241 aa, Arabidopsis thaliana
  peptide (1)..(241): Ceres Seq. ID no. 13504903
  misc_feature (118)..(239): Homolog of NCBI NO: 14861484 NR Description: succinate dehydrogenase subunit 3 [Gossypium
  misc_feature (29)..(241): Homolog of NCBI NO: 21593777 NR Description: unknown [Arabidopsis thaliana]
  misc_feature (29)..(241): Homolog of NCBI NO: 15242460 NR Description: expressed protein [Arabidopsis thaliana]
  misc_feature (2)..(241): Homolog of NCBI NO: 11022654 NR Description: gene_id:MTH16.1~pir||T05407~strong similarity to
  misc_feature (1)..(241): Homolog of NCBI NO: 15236709 NR Description: expressed protein [Arabidopsis thaliana]
EIPFLLLAYFSRIYAGRSLAENSHLIQSMAATALFRSIRRRDVVSAPLSVYKSLAGNAQPSWGSSYIGQNYASFSRAFGSKPVVNDILGTGLGTNNAIREEREKSKSTEAAIVGAQLTRSFRALDVGTSKRLFSTISGDIKTTQEEPKIKSFRPLSPHLSVYQPQMNSMLSIFNRISGVYLTGVTFAGYLLYLKMGMICLTYPSFYQVLYHTQQQLPVITSVTALAAIYHTIKSTHSLLTH

SEQ ID NO: 37869 - protein, 213 aa, Arabidopsis thaliana
  peptide (1)..(213): Ceres Seq. ID no. 13504904
  misc_feature (90)..(211): Homolog of NCBI NO: 14861484 NR Description: succinate dehydrogenase subunit 3 [Gossypium
  misc_feature (1)..(213): Homolog of NCBI NO: 21593777 NR Description: unknown [Arabidopsis thaliana]
  misc_feature (1)..(213): Homolog of NCBI NO: 15242460 NR Description: expressed protein [Arabidopsis thaliana]
  misc_feature (1)..(213): Homolog of NCBI NO: 11022654 NR Description: gene_id:MTH16.1~pir||T05407~strong similarity to
  misc_feature (1)..(213): Homolog of NCBI NO: 15236709 NR Description: expressed protein [Arabidopsis thaliana]
MAATALFRSIRRRDVVSAPLSVYKSLAGNAQPSWGSSYIGQNYASFSRAFGSKPVVNDILGTGLGTNNAIREEREKSKSTEAAIVGAQLTRSFRALDVGTSKRLFSTISGDIKTTQEEPKIKSFRPLSPHLSVYQPQMNSMLSIFNRISGVYLTGVTFAGYLLYLKMGMICLTYPSFYQVLYHTQQQLPVITSVTALAAIYHTIKSTHSLLTH

SEQ ID NO: 37870 - DNA, 1195 bp, Arabidopsis thaliana
  misc_feature (1)..(1195): Ceres Seq. ID no. 13487011
  misc_feature: MA Experiment ID: 108434 Result: Up-regulated in Transcription
  misc_feature: MA Experiment 108434 PARAMETER Experiment Name: At_Root_Tips_cDNA_P Parameter: Tissue Value: Root Tips
  misc_feature: MA Experiment ID: 108462 Result: Down-regulated in Transcription
  misc_feature: MA Experiment 108462 PARAMETER Experiment Name: At_Germinating_Seeds_cDNA_P Parameter: Age (day) Value: 2 vs. 0
  misc_feature: MA Experiment 108462 PARAMETER Experiment Name: At_Germinating_Seeds_cDNA_P Parameter: Tissue Value: Germinating Seeds
  misc_feature: MA Experiment ID: 108463 Result: Down-regulated in Transcription
  misc_feature: MA Experiment 108463 PARAMETER Experiment Name: At_Germinating_Seeds_cDNA_P Parameter: Age (day) Value: 3 vs. 0
  misc_feature: MA Experiment 108463 PARAMETER Experiment Name: At_Germinating_Seeds_cDNA_P Parameter: Tissue Value: Germinating Seeds
  misc_feature: MA Experiment ID: 108464 Result: Down-regulated in Transcription
  misc_feature: MA Experiment 108464 PARAMETER Experiment Name: At_Germinating_Seeds_cDNA_P Parameter: Age (day) Value: 4 vs. 0
  misc_feature: MA Experiment 108464 PARAMETER Experiment Name: At_Germinating_Seeds_cDNA_P Parameter: Tissue Value: Germinating Seeds
  misc_feature: MA Experiment ID: 108577 Result: Down-regulated in Transcription
  misc_feature: MA Experiment 108577 PARAMETER Experiment Name: At_42deg_Heat_cDNA_P Parameter: Temperature (deg C) Value: 42 vs. 22
  misc_feature: MA Experiment 108577 PARAMETER Experiment Name: At_42deg_Heat_cDNA_P Parameter: Timepoint (hr) Value: 6
  misc_feature: MA Experiment 108577 PARAMETER Experiment Name: At_42deg_Heat_cDNA_P Parameter: Tissue Value: Aerial
  misc_feature: MA Experiment ID: 108595 Result: Down-regulated in Transcription
  misc_feature: MA Experiment 108595 PARAMETER Experiment Name: At_Ler-pi_Ovule_cDNA_P Parameter: Plant Line Value: null
  misc_feature: MA Experiment ID: 20000113 Result: Down-regulated in Transcription
  misc_feature: MA Experiment 20000113 PARAMETER Experiment Name: At_42deg_Heat_cDNA_P Parameter: Temperature (deg C) Value: 42 vs. 22
  misc_feature: MA Experiment 20000113 PARAMETER Experiment Name: At_42deg_Heat_cDNA_P Parameter: Timepoint (hr) Value: 8
  misc_feature: MA Experiment 20000113 PARAMETER Experiment Name: At_42deg_Heat_cDNA_P Parameter: Tissue Value: Aerial
  misc_feature: MA Experiment ID: 20000173 Result: Down-regulated in Transcription
  misc_feature: MA Experiment 20000173 PARAMETER Experiment Name: At_42deg_Heat_P Parameter: Age (day) Value: 14
  misc_feature: MA Experiment 20000173 PARAMETER Experiment Name: At_42deg_Heat_P Parameter: Organism Value: A. thaliana
  misc_feature: MA Experiment 20000173 PARAMETER Experiment Name: At_42deg_Heat_P Parameter: Plant Line Value: WS
  misc_feature: MA Experiment 20000173 PARAMETER Experiment Name: At_42deg_Heat_P Parameter: Temperature (deg C) Value: 42 vs. 22
  misc_feature: MA Experiment 20000173 PARAMETER Experiment Name: At_42deg_Heat_P Parameter: Timepoint (hr) Value: 6
  misc_feature: MA Experiment 20000173 PARAMETER Experiment Name: At_42deg_Heat_P Parameter: Tissue Value: Aerial
  misc_feature: MA Experiment ID: 20000227 Result: Up-regulated in Transcription
  misc_feature: MA Experiment 20000227 PARAMETER Experiment Name: At_Root-Tips-vs-Tops_P Parameter: Tissue Value: Root Tips vs. Root Tops
  misc_feature: MA Experiment ID: 20000451 Result: Up-regulated in Transcription
  misc_feature: MA Experiment 20000451 PARAMETER Experiment Name: At_CS6879_Shoots-Roots_P Parameter: Age (day) Value: 14
  misc_feature: MA Experiment 20000451 PARAMETER Experiment Name: At_CS6879_Shoots-Roots_P Parameter: Organism Value: A. thaliana
  misc_feature: MA Experiment 20000451 PARAMETER Experiment Name: At_CS6879_Shoots-Roots_P Parameter: Plant Line Value: CS6879 vs. WS
  misc_feature: MA Experiment 20000451 PARAMETER Experiment Name: At_CS6879_Shoots-Roots_P Parameter: Tissue Value: Roots
  misc_feature: MA Experiment ID: 20001558 Result: Up-regulated in Transcription
  misc_feature: MA Experiment 20001558 PARAMETER Experiment Name: At_Drought_Soil_Dry_P Parameter: Age (day) Value: 27
  misc_feature: MA Experiment 20001558 PARAMETER Experiment Name: At_Drought_Soil_Dry_P Parameter: Organism Value: A. thaliana
  misc_feature: MA Experiment 20001558 PARAMETER Experiment Name: At_Drought_Soil_Dry_P Parameter: Plant Line Value: WS
  misc_feature: MA Experiment 20001558 PARAMETER Experiment Name: At_Drought_Soil_Dry_P Parameter: Post Timepoint (hr) Value: 6
  misc_feature: MA Experiment 20001558 PARAMETER Experiment Name: At_Drought_Soil_Dry_P Parameter: Post-Treatment Value: Re-Water vs. No Drought
  misc_feature: MA Experiment 20001558 PARAMETER Experiment Name: At_Drought_Soil_Dry_P Parameter: Timepoint (day) Value: 13
  misc_feature: MA Experiment 20001558 PARAMETER Experiment Name: At_Drought_Soil_Dry_P Parameter: Treatment Value: Drought vs. No Drought
aaaaactttcgtcttctcaacgaaatctgcagttccttgctcctttctcagtccaaattctctgatttttgattttttcgattcaatgggtttcaccaaagatcagttgcttgatcgacttcaggaacttgagattgattattccaagtatgaacatccgcctgtactaaccgtcgaagaacaggccaagtatgttagcagtagtaagggtgcactgagtaagaatctcttcttgaaggacaagaaacatcggtattatattgtttcagcgatggtggatacgaaagttgacatgaaagttttatctcagagacttggtcttggaaaaggagggattagaatggctccagaagaagcacttggtgagcttttgcaggtatccctcggatgtgttaccccgtttgcagttgtaaatgaatcagcaagagacgtgtctctcttgttagaccaaaaattcaagaaccaaacgcgttgcatcttccacccattgtctaacgatgtctcagtctctctgaacacattgggtctggacaagtttctgaagtcgattgggagagatcccgtatacgttgaccttgaggctaacccggtagttggtaaagaccaggctccagatctagctgtttgtgttccgtctaattcagttattgttcccgagattcctaatcaaacatcttctacacaaattcctcttccaaaaagtgtgtcagcagaggtcaagcctgtggcttcagccaaaacgagcaagccagcttgtaaggtgaagagcgtcgctgaaaattcagctccatcagcttacaagaacccggagaaatttgtgcaggagattttggacaaaacttcggctctattattgtccgaggctaagggagagtgcgtggaggctttggcagaaacactaagaaaacgacttacctcagagttgacccacctctctattatgtacaagaactcagcgtacgcagaaggtttttatgctggtacacgccaccagccgaagcgattgtaagaggtttggtttacatgttgaaccggagatatttgggagagaaacattaccggttcagcaatatattttccttcgttggacagcaaattttagataagactgaaaatgattacatttacatgaaagctcgaaccatttattcacttattgttgctttgtttgttcaatcaaagataaaccttttct

SEQ ID NO: 37871 - protein, 335 aa, Arabidopsis thaliana
  peptide (1)..(335): Ceres Seq. ID no. 13487012
  misc_feature (42)..(192): Pfam Name: YbaK / prolyl-tRNA synthetases associated domain Pfam Description: YbaK / prolyl-tRNA synthetases associated domain
  misc_feature (32)..(194): Homolog of NCBI NO: 13473736 NR Description: hypothetical protein, putative DNA-binding
  misc_feature (33)..(193): Homolog of NCBI NO: 34783837 NR Description: Unknown (protein for MGC:64201) [Danio rerio]
  misc_feature (32)..(199): Homolog of NCBI NO: 22968624 NR Description: hypothetical protein [Rhodospirillum rubrum]
  misc_feature (35)..(193): Homolog of NCBI NO: 21312706 NR Description: RIKEN cDNA 2010316F05 [Mus musculus]
  misc_feature (36)..(193): Homolog of NCBI NO: 27676960 NR Description: similar to RIKEN cDNA 2010316F05
  misc_feature (45)..(199): Homolog of NCBI NO: 16124366 NR Description: DNA-binding protein, putative [Caulobacter
  misc_feature (29)..(181): Homolog of NCBI NO: 25405166 NR Description: hypothetical protein T12C22.11 [imported] -
  misc_feature (114)..(334): Homolog of NCBI NO: 7271117 NR Description: 25.7 kDa protein [Cicer arietinum]
  misc_feature (166)..(335): Homolog of NCBI NO: 25405166 NR Description: hypothetical protein T12C22.11 [imported] -
  misc_feature (29)..(335): Homolog of NCBI NO: 30693857 NR Description: expressed protein [Arabidopsis thaliana]
KTFVFSTKSAVPCSFLSPNSLIFDFFDSMGFTKDQLLDRLQELEIDYSKYEHPPVLTVEEQAKYVSSSKGALSKNLFLKDKKHRYYIVSAMVDTKVDMKVLSQRLGLGKGGIRMAPEEALGELLQVSLGCVTPFAVVNESARDVSLLLDQKFKNQTRCIFHPLSNDVSVSLNTLGLDKFLKSIGRDPVYVDLEANPVVGKDQAPDLAVCVPSNSVIVPEIPNQTSSTQIPLPKSVSAEVKPVASAKTSKPACKVKSVAENSAPSAYKNPEKFVQEILDKTSALLLSEAKGECVEALAETLRKRLTSELTHLSIMYKNSAYAEGFYAGTRHQPKRL

SEQ ID NO: 37872 - protein, 307 aa, Arabidopsis thaliana
  peptide (1)..(307): Ceres Seq. ID no. 13487013
  misc_feature (14)..(164): Pfam Name: YbaK / prolyl-tRNA synthetases associated domain Pfam Description: YbaK / prolyl-tRNA synthetases associated domain
  misc_feature (4)..(166): Homolog of NCBI NO: 13473736 NR Description: hypothetical protein, putative DNA-binding
  misc_feature (5)..(165): Homolog of NCBI NO: 34783837 NR Description: Unknown (protein for MGC:64201) [Danio rerio]
  misc_feature (4)..(171): Homolog of NCBI NO: 22968624 NR Description: hypothetical protein [Rhodospirillum rubrum]
  misc_feature (7)..(165): Homolog of NCBI NO: 21312706 NR Description: RIKEN cDNA 2010316F05 [Mus musculus]
  misc_feature (8)..(165): Homolog of NCBI NO: 27676960 NR Description: similar to RIKEN cDNA 2010316F05
  misc_feature (17)..(171): Homolog of NCBI NO: 16124366 NR Description: DNA-binding protein, putative [Caulobacter
  misc_feature (1)..(153): Homolog of NCBI NO: 25405166 NR Description: hypothetical protein T12C22.11 [imported] -
  misc_feature (86)..(306): Homolog of NCBI NO: 7271117 NR Description: 25.7 kDa protein [Cicer arietinum]
  misc_feature (138)..(307): Homolog of NCBI NO: 25405166 NR Description: hypothetical protein T12C22.11 [imported] -
  misc_feature (1)..(307): Homolog of NCBI NO: 30693857 NR Description: expressed protein [Arabidopsis thaliana]
MGFTKDQLLDRLQELEIDYSKYEHPPVLTVEEQAKYVSSSKGALSKNLFLKDKKHRYYIVSAMVDTKVDMKVLSQRLGLGKGGIRMAPEEALGELLQVSLGCVTPFAVVNESARDVSLLLDQKFKNQTRCIFHPLSNDVSVSLNTLGLDKFLKSIGRDPVYVDLEANPVVGKDQAPDLAVCVPSNSVIVPEIPNQTSSTQIPLPKSVSAEVKPVASAKTSKPACKVKSVAENSAPSAYKNPEKFVQEILDKTSALLLSEAKGECVEALAETLRKRLTSELTHLSIMYKNSAYAEGFYAGTRHQPKRL

SEQ ID NO: 37873 - protein, 245 aa, Arabidopsis thaliana
  peptide (1)..(245): Ceres Seq. ID no. 13487014
  misc_feature (1)..(102): Pfam Name: YbaK / prolyl-tRNA synthetases associated domain Pfam Description: YbaK / prolyl-tRNA synthetases associated domain
  misc_feature (1)..(104): Homolog of NCBI NO: 13473736 NR Description: hypothetical protein, putative DNA-binding
  misc_feature (1)..(103): Homolog of NCBI NO: 34783837 NR Description: Unknown (protein for MGC:64201) [Danio rerio]
  misc_feature (1)..(109): Homolog of NCBI NO: 22968624 NR Description: hypothetical protein [Rhodospirillum rubrum]
  misc_feature (1)..(103): Homolog of NCBI NO: 21312706 NR Description: RIKEN cDNA 2010316F05 [Mus musculus]
  misc_feature (1)..(103): Homolog of NCBI NO: 27676960 NR Description: similar to RIKEN cDNA 2010316F05
  misc_feature (1)..(109): Homolog of NCBI NO: 16124366 NR Description: DNA-binding protein, putative [Caulobacter
  misc_feature (1)..(91): Homolog of NCBI NO: 25405166 NR Description: hypothetical protein T12C22.11 [imported] -
  misc_feature (24)..(244): Homolog of NCBI NO: 7271117 NR Description: 25.7 kDa protein [Cicer arietinum]
  misc_feature (76)..(245): Homolog of NCBI NO: 25405166 NR Description: hypothetical protein T12C22.11 [imported] -
  misc_feature (1)..(245): Homolog of NCBI NO: 30693857 NR Description: expressed protein [Arabidopsis thaliana]
MVDTKVDMKVLSQRLGLGKGGIRMAPEEALGELLQVSLGCVTPFAVVNESARDVSLLLDQKFKNQTRCIFHPLSNDVSVSLNTLGLDKFLKSIGRDPVYVDLEANPVVGKDQAPDLAVCVPSNSVIVPEIPNQTSSTQIPLPKSVSAEVKPVASAKTSKPACKVKSVAENSAPSAYKNPEKFVQEILDKTSALLLSEAKGECVEALAETLRKRLTSELTHLSIMYKNSAYAEGFYAGTRHQPKRL

SEQ ID NO: 37874 - DNA, 1257 bp, Arabidopsis thaliana
  misc_feature (1)..(1257): Ceres Seq. ID no. 12439537
  misc_feature: MA Experiment ID: 108569 Result: Up-regulated in Transcription
  misc_feature: MA Experiment 108569 PARAMETER Experiment Name: At_0.001%_MeJA__cDNA_P Parameter: Timepoint (hr) Value: 6
  misc_feature: MA Experiment 108569 PARAMETER Experiment Name: At_0.001%_MeJA__cDNA_P Parameter: Tissue Value: Aerial
  misc_feature: MA Experiment 108569 PARAMETER Experiment Name: At_0.001%_MeJA__cDNA_P Parameter: Treatment Value: 0.001% MeJA vs. No Treatment
  misc_feature: MA Experiment ID: 108573 Result: Down-regulated in Transcription
  misc_feature: MA Experiment 108573 PARAMETER Experiment Name: At_Drought_cDNA_P Parameter: Timepoint (hr) Value: 6
  misc_feature: MA Experiment 108573 PARAMETER Experiment Name: At_Drought_cDNA_P Parameter: Tissue Value: Aerial
  misc_feature: MA Experiment 108573 PARAMETER Experiment Name: At_Drought_cDNA_P Parameter: Treatment Value: Drought vs. No Drought
  misc_feature: MA Experiment ID: 108576 Result: Down-regulated in Transcription
  misc_feature: MA Experiment 108576 PARAMETER Experiment Name: At_42deg_Heat_cDNA_P Parameter: Temperature (deg C) Value: 42 vs. 22
  misc_feature: MA Experiment 108576 PARAMETER Experiment Name: At_42deg_Heat_cDNA_P Parameter: Timepoint (hr) Value: 1
  misc_feature: MA Experiment 108576 PARAMETER Experiment Name: At_42deg_Heat_cDNA_P Parameter: Tissue Value: Aerial
  misc_feature: MA Experiment ID: 108579 Result: Up-regulated in Transcription
  misc_feature: MA Experiment 108579 PARAMETER Experiment Name: At_4deg_Cold_cDNA_P Parameter: Temperature (deg C) Value: 4 vs. 22
  misc_feature: MA Experiment 108579 PARAMETER Experiment Name: At_4deg_Cold_cDNA_P Parameter: Timepoint (hr) Value: 6
  misc_feature: MA Experiment 108579 PARAMETER Experiment Name: At_4deg_Cold_cDNA_P Parameter: Tissue Value: Aerial
  misc_feature: MA Experiment ID: 108595 Result: Up-regulated in Transcription
  misc_feature: MA Experiment 108595 PARAMETER Experiment Name: At_Ler-pi_Ovule_cDNA_P Parameter: Plant Line Value: null
  misc_feature: MA Experiment ID: 20000093 Result: Down-regulated in Transcription
  misc_feature: MA Experiment 20000093 PARAMETER Experiment Name: At_42deg_Heat_cDNA_P Parameter: Temperature (deg C) Value: 42 vs. 22
  misc_feature: MA Experiment 20000093 PARAMETER Experiment Name: At_42deg_Heat_cDNA_P Parameter: Timepoint (hr) Value: 0.5
  misc_feature: MA Experiment 20000093 PARAMETER Experiment Name: At_42deg_Heat_cDNA_P Parameter: Tissue Value: Aerial
  misc_feature: MA Experiment ID: 20000180 Result: Up-regulated in Transcription
  misc_feature: MA Experiment 20000180 PARAMETER Experiment Name: At_Germinating_Seeds_P Parameter: Age (hr) Value: 24 vs. 0
  misc_feature: MA Experiment 20000180 PARAMETER Experiment Name: At_Germinating_Seeds_P Parameter: Tissue Value: Germinating Seeds
  misc_feature: MA Experiment ID: 20000234 Result: Up-regulated in Transcription
  misc_feature: MA Experiment 20000234 PARAMETER Experiment Name: At_Siliques_P Parameter: Age (day) Value: 21
  misc_feature: MA Experiment 20000234 PARAMETER Experiment Name: At_Siliques_P Parameter: Organism Value: A. thaliana
  misc_feature: MA Experiment 20000234 PARAMETER Experiment Name: At_Siliques_P Parameter: Plant Line Value: WS
  misc_feature: MA Experiment 20000234 PARAMETER Experiment Name: At_Siliques_P Parameter: Tissue Value: Less Than 5mm Siliques vs. Whole Plant
  misc_feature: MA Experiment ID: 20000264 Result: Up-regulated in Transcription
  misc_feature: MA Experiment 20000264 PARAMETER Experiment Name: At_Open_Flower_P Parameter: Age (day) Value: 21
  misc_feature: MA Experiment 20000264 PARAMETER Experiment Name: At_Open_Flower_P Parameter: Plant Line Value: WS
  misc_feature: MA Experiment 20000264 PARAMETER Experiment Name: At_Open_Flower_P Parameter: Tissue Value: Open Flower vs. Whole Plant
  misc_feature: MA Experiment ID: 20000268 Result: Up-regulated in Transcription
  misc_feature: MA Experiment 20000268 PARAMETER Experiment Name: At_100mM_NaCl__P Parameter: Age (day) Value: 14
  misc_feature: MA Experiment 20000268 PARAMETER Experiment Name: At_100mM_NaCl__P Parameter: Organism Value: A. thaliana
  misc_feature: MA Experiment 20000268 PARAMETER Experiment Name: At_100mM_NaCl__P Parameter: Plant Line Value: WS
  misc_feature: MA Experiment 20000268 PARAMETER Experiment Name: At_100mM_NaCl__P Parameter: Timepoint (hr) Value: 6
  misc_feature: MA Experiment 20000268 PARAMETER Experiment Name: At_100mM_NaCl__P Parameter: Tissue Value: Whole Plant
  misc_feature: MA Experiment 20000268 PARAMETER Experiment Name: At_100mM_NaCl__P Parameter: Treatment Value: 100mM NaCl vs. No Treatment
  misc_feature: MA Experiment ID: 20000308 Result: Up-regulated in Transcription
  misc_feature: MA Experiment 20000308 PARAMETER Experiment Name: At_100mM_NaCl__P Parameter: Age (day) Value: 17
  misc_feature: MA Experiment 20000308 PARAMETER Experiment Name: At_100mM_NaCl__P Parameter: Organism Value: A. thaliana
  misc_feature: MA Experiment 20000308 PARAMETER Experiment Name: At_100mM_NaCl__P Parameter: Plant Line Value: WS
  misc_feature: MA Experiment 20000308 PARAMETER Experiment Name: At_100mM_NaCl__P Parameter: Timepoint (hr) Value: 72
  misc_feature: MA Experiment 20000308 PARAMETER Experiment Name: At_100mM_NaCl__P Parameter: Tissue Value: Whole Plant
  misc_feature: MA Experiment 20000308 PARAMETER Experiment Name: At_100mM_NaCl__P Parameter: Treatment Value: 100mM NaCl vs. No Treatment
  misc_feature: MA Experiment ID: 20001248 Result: Down-regulated in Transcription
  misc_feature: MA Experiment 20001248 PARAMETER Experiment Name: At_Far-red-induction_P Parameter: Age (day) Value: 7
  misc_feature: MA Experiment 20001248 PARAMETER Experiment Name: At_Far-red-induction_P Parameter: Light Value: Far-red vs. White
  misc_feature: MA Experiment 20001248 PARAMETER Experiment Name: At_Far-red-induction_P Parameter: Organism Value: A. thaliana
  misc_feature: MA Experiment 20001248 PARAMETER Experiment Name: At_Far-red-induction_P Parameter: Plant Line Value: Columbia
  misc_feature: MA Experiment 20001248 PARAMETER Experiment Name: At_Far-red-induction_P Parameter: Timepoint (hr) Value: 4
  misc_feature: MA Experiment 20001248 PARAMETER Experiment Name: At_Far-red-induction_P Parameter: Tissue Value: Whole Plant
  misc_feature: MA Experiment ID: 20001556 Result: Up-regulated in Transcription
  misc_feature: MA Experiment 20001556 PARAMETER Experiment Name: At_Drought_Soil_Dry_P Parameter: Age (day) Value: 26
  misc_feature: MA Experiment 20001556 PARAMETER Experiment Name: At_Drought_Soil_Dry_P Parameter: Organism Value: A. thaliana
  misc_feature: MA Experiment 20001556 PARAMETER Experiment Name: At_Drought_Soil_Dry_P Parameter: Plant Line Value: WS
  misc_feature: MA Experiment 20001556 PARAMETER Experiment Name: At_Drought_Soil_Dry_P Parameter: Post Timepoint (hr) Value: None
  misc_feature: MA Experiment 20001556 PARAMETER Experiment Name: At_Drought_Soil_Dry_P Parameter: Post-Treatment Value: None
  misc_feature: MA Experiment 20001556 PARAMETER Experiment Name: At_Drought_Soil_Dry_P Parameter: Timepoint (day) Value: 12
  misc_feature: MA Experiment 20001556 PARAMETER Experiment Name: At_Drought_Soil_Dry_P Parameter: Treatment Value: Drought vs. No Drought
  misc_feature: MA Experiment ID: 20001757 Result: Down-regulated in Transcription
  misc_feature: MA Experiment 20001757 PARAMETER Experiment Name: At_50mM_NH4NO3_L-to-H_P Parameter: Timepoint (hr) Value: 6
  misc_feature: MA Experiment 20001757 PARAMETER Experiment Name: At_50mM_NH4NO3_L-to-H_P Parameter: Tissue Value: Leaf
  misc_feature: MA Experiment 20001757 PARAMETER Experiment Name: At_50mM_NH4NO3_L-to-H_P Parameter: Treatment Value: 50mM NH4NO3 vs 100mM Mannitol
  misc_feature: MA Experiment ID: 20001760 Result: Up-regulated in Transcription
  misc_feature: MA Experiment 20001760 PARAMETER Experiment Name: At_50mM_NH4NO3_L-to-H_P Parameter: Timepoint (hr) Value: 2
  misc_feature: MA Experiment 20001760 PARAMETER Experiment Name: At_50mM_NH4NO3_L-to-H_P Parameter: Tissue Value: Siliques
  misc_feature: MA Experiment 20001760 PARAMETER Experiment Name: At_50mM_NH4NO3_L-to-H_P Parameter: Treatment Value: 50mM NH4NO3 vs 100mM Mannitol
  misc_feature: MA Experiment ID: 20001904 Result: Up-regulated in Transcription
  misc_feature: MA Experiment 20001904 PARAMETER Experiment Name: At_Drought_Reproduction_P Parameter: Age (day) Value: 37
  misc_feature: MA Experiment 20001904 PARAMETER Experiment Name: At_Drought_Reproduction_P Parameter: Organism Value: A. thaliana
  misc_feature: MA Experiment 20001904 PARAMETER Experiment Name: At_Drought_Reproduction_P Parameter: Plant Line Value: WS
  misc_feature: MA Experiment 20001904 PARAMETER Experiment Name: At_Drought_Reproduction_P Parameter: Timepoint (day) Value: 7
  misc_feature: MA Experiment 20001904 PARAMETER Experiment Name: At_Drought_Reproduction_P Parameter: Tissue Value: Rosettes
  misc_feature: MA Experiment 20001904 PARAMETER Experiment Name: At_Drought_Reproduction_P Parameter: Treatment Value: Drought vs. No Drought
acttgcaaccaattacaaaaaagagtctttaaacagaagactaaagaagatggttgcggttgaaagagttgagagtctagcaaaaagcggaatcatatcgattccaaaagaatatattcgtccaaaagaagagctcgagagcatcaacgatgttttcctagaagagaagaaagaagacggtcctcaagttcccacaatcgatctaaagaacatcgagtcagacgatgaaaagatccgtgagaattgtattgaggagctgaaaaaggcatctttggattggggagtgatgcatttgatcaaccatggaataccagctgatctaatggagcgtgtcaagaaagccggagaagagtttttcagtttgtctgtggaagagaaggagaagtatgcaaacgatcaagccactggaaagattcaaggctatggaagtaaattggctaacaacgcgagtggacaattggaatgggaagattacttctttcatcttgcgtatcctgaagagaagagagatctatcaatttggcctaagacaccaagtgattacatagaagcaacgagtgagtacgcgaagtgtcttcgtttgctagcgactaaagtcttcaaggctctctctgtcggtctaggtttagagcctgaccgtctagagaaagaagttggtggtttagaagagcttcttctacaaatgaagataaattactatccaaaatgtcctcagcctgagctagcactcggtgtggaagctcacaccgatgtaagcgctttaactttcattctacacaacatggttccgggtttgcagcttttctacgagggcaaatgggtcactgcaaaatgtgttcctgattcgattgtgatgcacattggggatactttggagattcttagtaatgggaagtataagagtatacttcatcgtgggttggtgaataaggagaaggttaggatttcttgggctgtgttttgtgaacccccaaaggataagattgttcttaagccgttgccggagatggtgagtgttgagtctccggctaagtttcctccacggacttttgctcaacatattgagcataagttgtttgggaaggaacaagaggaattggtatccgagaaaaatgattaagtttctgtgtttactcttatttttgaaactctatgtgcgagtttcttttataatgtgtttgtgtctttctcatgaatttgatgtgtttgtgccttttatagtgaatattgcggagcttaacaagcaaactttaattt

SEQ ID NO: 37875 - protein, 372 aa, Arabidopsis thaliana
  peptide (1)..(372): Ceres Seq. ID no. 12439538
  misc_feature (224)..(323): Pfam Name: 2OG-Fe(II) oxygenase superfamily Pfam Description: 2OG-Fe(II) oxygenase superfamily
  misc_feature (22)..(365): Homolog of NCBI NO: 16754897 NR Description: anthocyanidin synthase [Ipomoea nil]
  misc_feature (22)..(369): Homolog of NCBI NO: 1730108 NR Description: LEUCOANTHOCYANIDIN DIOXYGENASE (LDOX)
  misc_feature (18)..(357): Homolog of NCBI NO: 7433227 NR Description: anthocyanidin synthase (EC 1.14.11.-) - clove
  misc_feature (22)..(369): Homolog of NCBI NO: 22266677 NR Description: leucoanthocyanidin dioxgenase [Vitis labrusca x
  misc_feature (22)..(367): Homolog of NCBI NO: 21038958 NR Description: anthocyanidin synthase [Malus x domestica]
  misc_feature (22)..(367): Homolog of NCBI NO: 1730107 NR Description: LEUCOANTHOCYANIDIN DIOXYGENASE (LDOX)
  misc_feature (17)..(370): Homolog of NCBI NO: 7433190 NR Description: leucoanthocyanidin dioxygenase (EC 1.14.11.-) -
  misc_feature (17)..(372): Homolog of NCBI NO: 29423729 NR Description: anthocyanidin synthase [Brassica oleracea]
  misc_feature (18)..(372): Homolog of NCBI NO: 20149854 NR Description: Chain A, Anthocyanidin Synthase From Arabidopsis
  misc_feature (17)..(372): Homolog of NCBI NO: 15235853 NR Description: putative leucoanthocyanidin dioxygenase (LDOX)
LATNYKKESLNRRLKKMVAVERVESLAKSGIISIPKEYIRPKEELESINDVFLEEKKEDGPQVPTIDLKNIESDDEKIRENCIEELKKASLDWGVMHLINHGIPADLMERVKKAGEEFFSLSVEEKEKYANDQATGKIQGYGSKLANNASGQLEWEDYFFHLAYPEEKRDLSIWPKTPSDYIEATSEYAKCLRLLATKVFKALSVGLGLEPDRLEKEVGGLEELLLQMKINYYPKCPQPELALGVEAHTDVSALTFILHNMVPGLQLFYEGKWVTAKCVPDSIVMHIGDTLEILSNGKYKSILHRGLVNKEKVRISWAVFCEPPKDKIVLKPLPEMVSVESPAKFPPRTFAQHIEHKLFGKEQEELVSEKND

SEQ ID NO: 37876 - protein, 356 aa, Arabidopsis thaliana
  peptide (1)..(356): Ceres Seq. ID no. 12439539
  misc_feature (208)..(307): Pfam Name: 2OG-Fe(II) oxygenase superfamily Pfam Description: 2OG-Fe(II) oxygenase superfamily
  misc_feature (6)..(349): Homolog of NCBI NO: 16754897 NR Description: anthocyanidin synthase [Ipomoea nil]
  misc_feature (6)..(353): Homolog of NCBI NO: 1730108 NR Description: LEUCOANTHOCYANIDIN DIOXYGENASE (LDOX)
  misc_feature (2)..(341): Homolog of NCBI NO: 7433227 NR Description: anthocyanidin synthase (EC 1.14.11.-) - clove
  misc_feature (6)..(353): Homolog of NCBI NO: 22266677 NR Description: leucoanthocyanidin dioxgenase [Vitis labrusca x
  misc_feature (6)..(351): Homolog of NCBI NO: 21038958 NR Description: anthocyanidin synthase [Malus x domestica]
  misc_feature (6)..(351): Homolog of NCBI NO: 1730107 NR Description: LEUCOANTHOCYANIDIN DIOXYGENASE (LDOX)
  misc_feature (1)..(354): Homolog of NCBI NO: 7433190 NR Description: leucoanthocyanidin dioxygenase (EC 1.14.11.-) -
  misc_feature (1)..(356): Homolog of NCBI NO: 29423729 NR Description: anthocyanidin synthase [Brassica oleracea]
  misc_feature (2)..(356): Homolog of NCBI NO: 20149854 NR Description: Chain A, Anthocyanidin Synthase From Arabidopsis
  misc_feature (1)..(356): Homolog of NCBI NO: 15235853 NR Description: putative leucoanthocyanidin dioxygenase (LDOX)
MVAVERVESLAKSGIISIPKEYIRPKEELESINDVFLEEKKEDGPQVPTIDLKNIESDDEKIRENCIEELKKASLDWGVMHLINHGIPADLMERVKKAGEEFFSLSVEEKEKYANDQATGKIQGYGSKLANNASGQLEWEDYFFHLAYPEEKRDLSIWPKTPSDYIEATSEYAKCLRLLATKVFKALSVGLGLEPDRLEKEVGGLEELLLQMKINYYPKCPQPELALGVEAHTDVSALTFILHNMVPGLQLFYEGKWVTAKCVPDSIVMHIGDTLEILSNGKYKSILHRGLVNKEKVRISWAVFCEPPKDKIVLKPLPEMVSVESPAKFPPRTFAQHIEHKLFGKEQEELVSEKND

SEQ ID NO: 37877 - protein, 277 aa, Arabidopsis thaliana
  peptide (1)..(277): Ceres Seq. ID no. 12439540
  misc_feature (129)..(228): Pfam Name: 2OG-Fe(II) oxygenase superfamily Pfam Description: 2OG-Fe(II) oxygenase superfamily
  misc_feature (1)..(270): Homolog of NCBI NO: 16754897 NR Description: anthocyanidin synthase [Ipomoea nil]
  misc_feature (1)..(274): Homolog of NCBI NO: 1730108 NR Description: LEUCOANTHOCYANIDIN DIOXYGENASE (LDOX)
  misc_feature (1)..(262): Homolog of NCBI NO: 7433227 NR Description: anthocyanidin synthase (EC 1.14.11.-) - clove
  misc_feature (1)..(274): Homolog of NCBI NO: 22266677 NR Description: leucoanthocyanidin dioxgenase [Vitis labrusca x
  misc_feature (1)..(272): Homolog of NCBI NO: 21038958 NR Description: anthocyanidin synthase [Malus x domestica]
  misc_feature (1)..(272): Homolog of NCBI NO: 1730107 NR Description: LEUCOANTHOCYANIDIN DIOXYGENASE (LDOX)
  misc_feature (1)..(275): Homolog of NCBI NO: 7433190 NR Description: leucoanthocyanidin dioxygenase (EC 1.14.11.-) -
  misc_feature (1)..(277): Homolog of NCBI NO: 29423729 NR Description: anthocyanidin synthase [Brassica oleracea]
  misc_feature (1)..(277): Homolog of NCBI NO: 20149854 NR Description: Chain A, Anthocyanidin Synthase From Arabidopsis
  misc_feature (1)..(277): Homolog of NCBI NO: 15235853 NR Description: putative leucoanthocyanidin dioxygenase (LDOX)
MHLINHGIPADLMERVKKAGEEFFSLSVEEKEKYANDQATGKIQGYGSKLANNASGQLEWEDYFFHLAYPEEKRDLSIWPKTPSDYIEATSEYAKCLRLLATKVFKALSVGLGLEPDRLEKEVGGLEELLLQMKINYYPKCPQPELALGVEAHTDVSALTFILHNMVPGLQLFYEGKWVTAKCVPDSIVMHIGDTLEILSNGKYKSILHRGLVNKEKVRISWAVFCEPPKDKIVLKPLPEMVSVESPAKFPPRTFAQHIEHKLFGKEQEELVSEKND

SEQ ID NO: 37878 - DNA, 1567 bp, Arabidopsis thaliana
  misc_feature (1)..(1567): Ceres Seq. ID no. 13492944
  misc_feature: MA Experiment ID: 108434 Result: Down-regulated in Transcription
  misc_feature: MA Experiment 108434 PARAMETER Experiment Name: At_Root_Tips_cDNA_P Parameter: Tissue Value: Root Tips
  misc_feature: MA Experiment ID: 108488 Result: Down-regulated in Transcription
  misc_feature: MA Experiment ID: 108605 Result: Up-regulated in Transcription
  misc_feature: MA Experiment 108605 PARAMETER Experiment Name: At_100uM_ABA_cDNA_P Parameter: Timepoint (hr) Value: 6
  misc_feature: MA Experiment 108605 PARAMETER Experiment Name: At_100uM_ABA_cDNA_P Parameter: Tissue Value: Aerial
  misc_feature: MA Experiment 108605 PARAMETER Experiment Name: At_100uM_ABA_cDNA_P Parameter: Treatment Value: 100uM ABA vs. No Treatment
  misc_feature: MA Experiment ID: 20000070 Result: Up-regulated in Transcription
  misc_feature: MA Experiment 20000070 PARAMETER Experiment Name: At_100uM_ABA_Mutants_cDNA_P Parameter: Plant Line Value: CS24
  misc_feature: MA Experiment 20000070 PARAMETER Experiment Name: At_100uM_ABA_Mutants_cDNA_P Parameter: Timepoint (hr) Value: 6
  misc_feature: MA Experiment 20000070 PARAMETER Experiment Name: At_100uM_ABA_Mutants_cDNA_P Parameter: Tissue Value: Aerial
  misc_feature: MA Experiment 20000070 PARAMETER Experiment Name: At_100uM_ABA_Mutants_cDNA_P Parameter: Treatment Value: 100uM ABA vs. No Treatment
  misc_feature: MA Experiment ID: 20000088 Result: Up-regulated in Transcription
  misc_feature: MA Experiment 20000088 PARAMETER Experiment Name: At_100uM_ABA_Mutants_cDNA_P Parameter: Plant Line Value: Landsberg
  misc_feature: MA Experiment 20000088 PARAMETER Experiment Name: At_100uM_ABA_Mutants_cDNA_P Parameter: Timepoint (hr) Value: 6
  misc_feature: MA Experiment 20000088 PARAMETER Experiment Name: At_100uM_ABA_Mutants_cDNA_P Parameter: Tissue Value: Aerial
  misc_feature: MA Experiment 20000088 PARAMETER Experiment Name: At_100uM_ABA_Mutants_cDNA_P Parameter: Treatment Value: 100uM ABA vs. No Treatment
  misc_feature: MA Experiment ID: 20000117 Result: Up-regulated in Transcription
  misc_feature: MA Experiment 20000117 PARAMETER Experiment Name: At_100uM_ABA_Mutants_cDNA_P Parameter: Plant Line Value: Columbia
  misc_feature: MA Experiment 20000117 PARAMETER Experiment Name: At_100uM_ABA_Mutants_cDNA_P Parameter: Timepoint (hr) Value: 6
  misc_feature: MA Experiment 20000117 PARAMETER Experiment Name: At_100uM_ABA_Mutants_cDNA_P Parameter: Tissue Value: Aerial
  misc_feature: MA Experiment 20000117 PARAMETER Experiment Name: At_100uM_ABA_Mutants_cDNA_P Parameter: Treatment Value: 100uM ABA vs. No Treatment
  misc_feature: MA Experiment ID: 20000234 Result: Down-regulated in Transcription
  misc_feature: MA Experiment 20000234 PARAMETER Experiment Name: At_Siliques_P Parameter: Age (day) Value: 21
  misc_feature: MA Experiment 20000234 PARAMETER Experiment Name: At_Siliques_P Parameter: Organism Value: A. thaliana
  misc_feature: MA Experiment 20000234 PARAMETER Experiment Name: At_Siliques_P Parameter: Plant Line Value: WS
  misc_feature: MA Experiment 20000234 PARAMETER Experiment Name: At_Siliques_P Parameter: Tissue Value: Less Than 5mm Siliques vs. Whole Plant
  misc_feature: MA Experiment ID: 20000235 Result: Down-regulated in Transcription
  misc_feature: MA Experiment 20000235 PARAMETER Experiment Name: At_Siliques_P Parameter: Age (day) Value: 21
  misc_feature: MA Experiment 20000235 PARAMETER Experiment Name: At_Siliques_P Parameter: Organism Value: A. thaliana
  misc_feature: MA Experiment 20000235 PARAMETER Experiment Name: At_Siliques_P Parameter: Plant Line Value: WS
  misc_feature: MA Experiment 20000235 PARAMETER Experiment Name: At_Siliques_P Parameter: Tissue Value: 5-10mm Siliques vs. Whole Plant
  misc_feature: MA Experiment ID: 20000436 Result: Up-regulated in Transcription
  misc_feature: MA Experiment 20000436 PARAMETER Experiment Name: At_Drought_P Parameter: Age (day) Value: 7
  misc_feature: MA Experiment 20000436 PARAMETER Experiment Name: At_Drought_P Parameter: Organism Value: A. thaliana
  misc_feature: MA Experiment 20000436 PARAMETER Experiment Name: At_Drought_P Parameter: Plant Line Value: WS
  misc_feature: MA Experiment 20000436 PARAMETER Experiment Name: At_Drought_P Parameter: Timepoint (hr) Value: 12
  misc_feature: MA Experiment 20000436 PARAMETER Experiment Name: At_Drought_P Parameter: Tissue Value: Whole Plant
  misc_feature: MA Experiment 20000436 PARAMETER Experiment Name: At_Drought_P Parameter: Treatment Value: Drought vs. No Drought
  misc_feature: MA Experiment ID: 20000437 Result: Up-regulated in Transcription
  misc_feature: MA Experiment 20000437 PARAMETER Experiment Name: At_Drought_P Parameter: Age (day) Value: 8
  misc_feature: MA Experiment 20000437 PARAMETER Experiment Name: At_Drought_P Parameter: Organism Value: A. thaliana
  misc_feature: MA Experiment 20000437 PARAMETER Experiment Name: At_Drought_P Parameter: Plant Line Value: WS
  misc_feature: MA Experiment 20000437 PARAMETER Experiment Name: At_Drought_P Parameter: Timepoint (hr) Value: 24
  misc_feature: MA Experiment 20000437 PARAMETER Experiment Name: At_Drought_P Parameter: Tissue Value: Whole Plant
  misc_feature: MA Experiment 20000437 PARAMETER Experiment Name: At_Drought_P Parameter: Treatment Value: Drought vs. No Drought
  misc_feature: MA Experiment ID: 20000438 Result: Down-regulated in Transcription
  misc_feature: MA Experiment 20000438 PARAMETER Experiment Name: At_Shoots__P Parameter: Age (day) Value: 14
  misc_feature: MA Experiment 20000438 PARAMETER Experiment Name: At_Shoots__P Parameter: Tissue Value: Shoots vs. Whole Plant
  misc_feature: MA Experiment ID: 20001904 Result: Up-regulated in Transcription
  misc_feature: MA Experiment 20001904 PARAMETER Experiment Name: At_Drought_Reproduction_P Parameter: Age (day) Value: 37
  misc_feature: MA Experiment 20001904 PARAMETER Experiment Name: At_Drought_Reproduction_P Parameter: Organism Value: A. thaliana
  misc_feature: MA Experiment 20001904 PARAMETER Experiment Name: At_Drought_Reproduction_P Parameter: Plant Line Value: WS
  misc_feature: MA Experiment 20001904 PARAMETER Experiment Name: At_Drought_Reproduction_P Parameter: Timepoint (day) Value: 7
  misc_feature: MA Experiment 20001904 PARAMETER Experiment Name: At_Drought_Reproduction_P Parameter: Tissue Value: Rosettes
  misc_feature: MA Experiment 20001904 PARAMETER Experiment Name: At_Drought_Reproduction_P Parameter: Treatment Value: Drought vs. No Drought
  misc_feature: MA Experiment ID: 20001905 Result: Up-regulated in Transcription
  misc_feature: MA Experiment 20001905 PARAMETER Experiment Name: At_Drought_Reproduction_P Parameter: Age (day) Value: 40
  misc_feature: MA Experiment 20001905 PARAMETER Experiment Name: At_Drought_Reproduction_P Parameter: Organism Value: A. thaliana
  misc_feature: MA Experiment 20001905 PARAMETER Experiment Name: At_Drought_Reproduction_P Parameter: Plant Line Value: WS
  misc_feature: MA Experiment 20001905 PARAMETER Experiment Name: At_Drought_Reproduction_P Parameter: Timepoint (day) Value: 10
  misc_feature: MA Experiment 20001905 PARAMETER Experiment Name: At_Drought_Reproduction_P Parameter: Tissue Value: Rosettes
  misc_feature: MA Experiment 20001905 PARAMETER Experiment Name: At_Drought_Reproduction_P Parameter: Treatment Value: Drought vs. No Drought
  misc_feature: MA Experiment ID: 20001911 Result: Up-regulated in Transcription
  misc_feature: MA Experiment 20001911 PARAMETER Experiment Name: At_Drought_Reproduction_P Parameter: Age (day) Value: 40
  misc_feature: MA Experiment 20001911 PARAMETER Experiment Name: At_Drought_Reproduction_P Parameter: Organism Value: A. thaliana
  misc_feature: MA Experiment 20001911 PARAMETER Experiment Name: At_Drought_Reproduction_P Parameter: Plant Line Value: WS
  misc_feature: MA Experiment 20001911 PARAMETER Experiment Name: At_Drought_Reproduction_P Parameter: Timepoint (day) Value: 10
  misc_feature: MA Experiment 20001911 PARAMETER Experiment Name: At_Drought_Reproduction_P Parameter: Tissue Value: Flowers
  misc_feature: MA Experiment 20001911 PARAMETER Experiment Name: At_Drought_Reproduction_P Parameter: Treatment Value: Drought vs. No Drought
taaaacaacaaagcaaagcgttgaagagagaagaagaagcaaagatataacccccaaaagtatcaattagtttccattttcgccgctaagattctgttttcgaacatttacaccctcaagaatcgccgccatgtgtggaggagctataatatccgatttcattccaccgccgaggtctcgccgtgttactagcgagtttatttggccggatctgaagaagaatttgaaaggatcgaagaaaagctcgaagaatcgttcgaatttcttcgattttgacgctgagttcgaagctgatttccaaggtttcaaagatgattcgtctatcgattgcgatgatgatttcgacgtcggtgatgttttcgccgatgtgaaaccattcgttttcacttcgactccaaaacccgccgtctccgccgctgcggaaggttcagtttttggtaagaaagttactggcttggatggggacgctgagaaatctgcaaataggaagaggaagaatcagtaccgagggattaggcaacgtccttggggaaaatgggctgctgagatacgtgatccaagggaaggtgctagaatctggcttggaacgttcaagacagctgaggaagctgctagagcttacgatgctgcagcgcggagaatccgtggatctaaagctaaggtgaatttccctgaagaaaacatgaaggctaattctcagaaacgctctgtgaaggctaatcttcagaaaccagtggctaaacctaaccctaacccaagtccagctttggttcagaactcgaacatctcctttgaaaatatgtgtttcatggaggagaaacaccaagtgagcaacaacaacaacaaccagtttgggatgacaaactccgttgatgctggatgtaatgggtatcagtatttcagctctgaccagggtagtaattctttcgattgttcggagtttggttggagcgatcaagctccgataactcccgacatctcttctgcggttatcaacaacaacaactcagctctgttctttgaggaagccaatccagctaagaagctcaagtctatggatttcgagacaccttacaacaacactgaatgggacgcttcactggatttcctcaacgaagatgctgtaacgactcaggacaatggtgcaaaccctatggacctatggagtattgatgaaattcattccatgattggaggagtcttctgaagagatccagtttcatgtaaataaggctgcatgtttgtgagtttcccgcatcgttcgtttatcaacctccaaaactttctaatgtctgttacttgcatcttcttctgctgtctctgtctgtctctctcaggagttcctgtttgcattgcgagaagccatgagcctctatcttgagggtagttgtgatgaagttaagtagaggcttatttttaggggttgtggtagtttttgttttagtgaatcttttgaattcgtttgtgttttgtttttgttactttatgccccaaaactcctttaacatttgtcataatgtgtttgaacctctcatctgtttaatcaaataaatcttctttgtatgtt

SEQ ID NO: 37879 - protein, 358 aa, Arabidopsis thaliana
  peptide (1)..(358): Ceres Seq. ID no. 13492945
  misc_feature (122)..(186): Pfam Name: AP2 domain Pfam Description: AP2 domain
  misc_feature (1)..(318): Homolog of NCBI NO: 38343926 NR Description: ethylene transcription factor [Fagus sylvatica]
  misc_feature (277)..(358): Homolog of NCBI NO: 30961941 NR Description: C-repeat/DRE-binding factor [Nicotiana tabacum]
  misc_feature (1)..(308): Homolog of NCBI NO: 30961941 NR Description: C-repeat/DRE-binding factor [Nicotiana tabacum]
  misc_feature (1)..(325): Homolog of NCBI NO: 21553709 NR Description: DNA-binding protein [Arabidopsis thaliana]
  misc_feature (1)..(339): Homolog of NCBI NO: 18400321 NR Description: AP2 domain protein RAP2.2 [Arabidopsis thaliana]
  misc_feature (1)..(339): Homolog of NCBI NO: 30683059 NR Description: AP2 domain protein RAP2.2 [Arabidopsis thaliana]
  misc_feature (1)..(339): Homolog of NCBI NO: 30683064 NR Description: AP2 domain protein RAP2.2 [Arabidopsis thaliana]
  misc_feature (42)..(358): Homolog of NCBI NO: 2281649 NR Description: AP2 domain containing protein RAP2.12
  misc_feature (1)..(358): Homolog of NCBI NO: 21593779 NR Description: AP2 domain containing protein, putative
  misc_feature (1)..(358): Homolog of NCBI NO: 15220971 NR Description: AP2 domain protein RAP2.12 [Arabidopsis thaliana]
MCGGAIISDFIPPPRSRRVTSEFIWPDLKKNLKGSKKSSKNRSNFFDFDAEFEADFQGFKDDSSIDCDDDFDVGDVFADVKPFVFTSTPKPAVSAAAEGSVFGKKVTGLDGDAEKSANRKRKNQYRGIRQRPWGKWAAEIRDPREGARIWLGTFKTAEEAARAYDAAARRIRGSKAKVNFPEENMKANSQKRSVKANLQKPVAKPNPNPSPALVQNSNISFENMCFMEEKHQVSNNNNNQFGMTNSVDAGCNGYQYFSSDQGSNSFDCSEFGWSDQAPITPDISSAVINNNNSALFFEEANPAKKLKSMDFETPYNNTEWDASLDFLNEDAVTTQDNGANPMDLWSIDEIHSMIGGVF

SEQ ID NO: 37880 - DNA, 1256 bp, Arabidopsis thaliana
  misc_feature (1)..(1256): Ceres Seq. ID no. 12348366
  misc_feature: MA Experiment ID: 108434 Result: Up-regulated in Transcription
  misc_feature: MA Experiment 108434 PARAMETER Experiment Name: At_Root_Tips_cDNA_P Parameter: Tissue Value: Root Tips
  misc_feature: MA Experiment ID: 108462 Result: Up-regulated in Transcription
  misc_feature: MA Experiment 108462 PARAMETER Experiment Name: At_Germinating_Seeds_cDNA_P Parameter: Age (day) Value: 2 vs. 0
  misc_feature: MA Experiment 108462 PARAMETER Experiment Name: At_Germinating_Seeds_cDNA_P Parameter: Tissue Value: Germinating Seeds
  misc_feature: MA Experiment ID: 108464 Result: Up-regulated in Transcription
  misc_feature: MA Experiment 108464 PARAMETER Experiment Name: At_Germinating_Seeds_cDNA_P Parameter: Age (day) Value: 4 vs. 0
  misc_feature: MA Experiment 108464 PARAMETER Experiment Name: At_Germinating_Seeds_cDNA_P Parameter: Tissue Value: Germinating Seeds
  misc_feature: MA Experiment ID: 108573 Result: Up-regulated in Transcription
  misc_feature: MA Experiment 108573 PARAMETER Experiment Name: At_Drought_cDNA_P Parameter: Timepoint (hr) Value: 6
  misc_feature: MA Experiment 108573 PARAMETER Experiment Name: At_Drought_cDNA_P Parameter: Tissue Value: Aerial
  misc_feature: MA Experiment 108573 PARAMETER Experiment Name: At_Drought_cDNA_P Parameter: Treatment Value: Drought vs. No Drought
  misc_feature: MA Experiment ID: 108585 Result: Up-regulated in Transcription
  misc_feature: MA Experiment 108585 PARAMETER Experiment Name: At_5mM_NaNP_cDNA_P Parameter: Timepoint (hr) Value: 6
  misc_feature: MA Experiment 108585 PARAMETER Experiment Name: At_5mM_NaNP_cDNA_P Parameter: Tissue Value: Aerial
  misc_feature: MA Experiment 108585 PARAMETER Experiment Name: At_5mM_NaNP_cDNA_P Parameter: Treatment Value: null
aaacaaaacacaggtttggtcggagaaggctttattaatccacttgtcctcctctcagactctacaaagtcaaagttgttcactttacctataaaaacgctttcttttcaatggcttcttcttcttgtttccttcgctcgattctcttctcttctcctactaaccttcgttcaaatcaccatctccccactttcttccccaagaatcatctcatttgctctcattccacttcttctcgcttcgaatcgctctcggtttcatcgatcggaactggatctaccaagaaatcatccgatactcggagaaaggtaaagagcatggctacgacaaatataggaaaggaggagaagaaaagagtcgagatttatgatctcgaagagaatttagcgattgatttggctaaattcacagcagatctctccgataagttttgtaaagagagaggcgctttcaccgtcgttgtctccggtggctctctcatcaaatcactccggaaattagtagaatctccttacgttgattctatagattgggcaaggtggcattttttctgggttgacgagagagttgttcccaagaatcacgatgatagcaactataaactcgcttatgatagttttctatccaaggtaccaattccgcctggaaatgtatatgcaatcaacgaagccctctccgctgaggctgcagcggatgattacgagacctgcctcaaacatttggtcaacaccaacattctccgtgtatctgaatcaactggctttcccaaatttgatctcatgcttctaggtatgggacctgatggtcatgtggcatcattattccctgggcatggtctctgcaacgagagcaagaaatgggtagtttcaatctctgactctccaaaaccaccgtctgagagaatcaccttcacgttcccggtcatcaactcatctgcacatgtagctctagttgtttgcggttctgggaaagctgaagctgtggaggcagctttaaagaagactgggaatgtaccacctgctggttctgtttctgctgaagacgagttggtttggttcctggacaaaccagcatcttccaagctctaaaaacaggtggtatgcttcccattccagtgaacttaccaatgtgactagtccggtttagtttttggattttgactctttggttctctccatttatgttgtgggaagagactgttgtgataaaagcgtgtactttacatggaaataatgaactaatcaatggtttctctg

SEQ ID NO: 37881 - protein, 325 aa, Arabidopsis thaliana
  peptide (1)..(325): Ceres Seq. ID no. 12348367
  misc_feature (96)..(324): Pfam Name: Glucosamine-6-phosphate Pfam Description: Glucosamine-6-phosphate
  misc_feature (81)..(325): Homolog of NCBI NO: 14009294 NR Description: putative 6-phosphogluconolactonase [Brassica
  misc_feature (80)..(325): Homolog of NCBI NO: 15238526 NR Description: 6-phosphogluconolactonase-like protein
  misc_feature (80)..(325): Homolog of NCBI NO: 21537412 NR Description: 6-phosphogluconolactonase-like protein
  misc_feature (70)..(325): Homolog of NCBI NO: 15238523 NR Description: 6-phosphogluconolactonase-like protein; protein
  misc_feature (80)..(325): Homolog of NCBI NO: 21536675 NR Description: 6-phosphogluconolactonase-like protein
  misc_feature (80)..(325): Homolog of NCBI NO: 15229127 NR Description: 6-phosphogluconolactonase - like protein
  misc_feature (80)..(325): Homolog of NCBI NO: 28140256 NR Description: putative 6-phosphogluconolactonase [Elaeis
  misc_feature (70)..(325): Homolog of NCBI NO: 10177901 NR Description: 6-phosphogluconolactonase-like protein
  misc_feature (1)..(325): Homolog of NCBI NO: 21554291 NR Description: 6-phosphogluconolactonase-like protein
  misc_feature (1)..(325): Homolog of NCBI NO: 18420789 NR Description: 6-phosphogluconolactonase-like protein
MASSSCFLRSILFSSPTNLRSNHHLPTFFPKNHLICSHSTSSRFESLSVSSIGTGSTKKSSDTRRKVKSMATTNIGKEEKKRVEIYDLEENLAIDLAKFTADLSDKFCKERGAFTVVVSGGSLIKSLRKLVESPYVDSIDWARWHFFWVDERVVPKNHDDSNYKLAYDSFLSKVPIPPGNVYAINEALSAEAAADDYETCLKHLVNTNILRVSESTGFPKFDLMLLGMGPDGHVASLFPGHGLCNESKKWVVSISDSPKPPSERITFTFPVINSSAHVALVVCGSGKAEAVEAALKKTGNVPPAGSVSAEDELVWFLDKPASSKL

SEQ ID NO: 37882 - protein, 256 aa, Arabidopsis thaliana
  peptide (1)..(256): Ceres Seq. ID no. 12348368
  misc_feature (27)..(255): Pfam Name: Glucosamine-6-phosphate Pfam Description: Glucosamine-6-phosphate
  misc_feature (12)..(256): Homolog of NCBI NO: 14009294 NR Description: putative 6-phosphogluconolactonase [Brassica
  misc_feature (11)..(256): Homolog of NCBI NO: 15238526 NR Description: 6-phosphogluconolactonase-like protein
  misc_feature (11)..(256): Homolog of NCBI NO: 21537412 NR Description: 6-phosphogluconolactonase-like protein
  misc_feature (1)..(256): Homolog of NCBI NO: 15238523 NR Description: 6-phosphogluconolactonase-like protein; protein
  misc_feature (11)..(256): Homolog of NCBI NO: 21536675 NR Description: 6-phosphogluconolactonase-like protein
  misc_feature (11)..(256): Homolog of NCBI NO: 15229127 NR Description: 6-phosphogluconolactonase - like protein
  misc_feature (11)..(256): Homolog of NCBI NO: 28140256 NR Description: putative 6-phosphogluconolactonase [Elaeis
  misc_feature (1)..(256): Homolog of NCBI NO: 10177901 NR Description: 6-phosphogluconolactonase-like protein
  misc_feature (1)..(256): Homolog of NCBI NO: 21554291 NR Description: 6-phosphogluconolactonase-like protein
  misc_feature (1)..(256): Homolog of NCBI NO: 18420789 NR Description: 6-phosphogluconolactonase-like protein
MATTNIGKEEKKRVEIYDLEENLAIDLAKFTADLSDKFCKERGAFTVVVSGGSLIKSLRKLVESPYVDSIDWARWHFFWVDERVVPKNHDDSNYKLAYDSFLSKVPIPPGNVYAINEALSAEAAADDYETCLKHLVNTNILRVSESTGFPKFDLMLLGMGPDGHVASLFPGHGLCNESKKWVVSISDSPKPPSERITFTFPVINSSAHVALVVCGSGKAEAVEAALKKTGNVPPAGSVSAEDELVWFLDKPASSKL

SEQ ID NO: 37883 - DNA, 1138 bp, Arabidopsis thaliana
  misc_feature (1)..(1138): Ceres Seq. ID no. 12337896
  misc_feature: MA Experiment ID: 20000180 Result: Up-regulated in Transcription
  misc_feature: MA Experiment 20000180 PARAMETER Experiment Name: At_Germinating_Seeds_P Parameter: Age (hr) Value: 24 vs. 0
  misc_feature: MA Experiment 20000180 PARAMETER Experiment Name: At_Germinating_Seeds_P Parameter: Tissue Value: Germinating Seeds
  misc_feature: MA Experiment ID: 20000185 Result: Down-regulated in Transcription
  misc_feature: MA Experiment 20000185 PARAMETER Experiment Name: At_Roots__P Parameter: Age (day) Value: 7 vs. 21
  misc_feature: MA Experiment 20000185 PARAMETER Experiment Name: At_Roots__P Parameter: Organism Value: A. thaliana
  misc_feature: MA Experiment 20000185 PARAMETER Experiment Name: At_Roots__P Parameter: Tissue Value: Roots vs. Whole Plant
  misc_feature: MA Experiment ID: 20000234 Result: Up-regulated in Transcription
  misc_feature: MA Experiment 20000234 PARAMETER Experiment Name: At_Siliques_P Parameter: Age (day) Value: 21
  misc_feature: MA Experiment 20000234 PARAMETER Experiment Name: At_Siliques_P Parameter: Organism Value: A. thaliana
  misc_feature: MA Experiment 20000234 PARAMETER Experiment Name: At_Siliques_P Parameter: Plant Line Value: WS
  misc_feature: MA Experiment 20000234 PARAMETER Experiment Name: At_Siliques_P Parameter: Tissue Value: Less Than 5mm Siliques vs. Whole Plant
  misc_feature: MA Experiment ID: 20000265 Result: Up-regulated in Transcription
  misc_feature: MA Experiment 20000265 PARAMETER Experiment Name: At_Open_Flower_P Parameter: Age (day) Value: 21
  misc_feature: MA Experiment 20000265 PARAMETER Experiment Name: At_Open_Flower_P Parameter: Plant Line Value: WS
  misc_feature: MA Experiment 20000265 PARAMETER Experiment Name: At_Open_Flower_P Parameter: Tissue Value: Closed Flower vs. Whole Plant
  misc_feature: MA Experiment ID: 20000286 Result: Up-regulated in Transcription
  misc_feature: MA Experiment 20000286 PARAMETER Experiment Name: At_Open_Flower_P Parameter: Age (day) Value: 21
  misc_feature: MA Experiment 20000286 PARAMETER Experiment Name: At_Open_Flower_P Parameter: Plant Line Value: WS
  misc_feature: MA Experiment 20000286 PARAMETER Experiment Name: At_Open_Flower_P Parameter: Tissue Value: Half Open vs. Whole Plant
  misc_feature: MA Experiment ID: 20000437 Result: Down-regulated in Transcription
  misc_feature: MA Experiment 20000437 PARAMETER Experiment Name: At_Drought_P Parameter: Age (day) Value: 8
  misc_feature: MA Experiment 20000437 PARAMETER Experiment Name: At_Drought_P Parameter: Organism Value: A. thaliana
  misc_feature: MA Experiment 20000437 PARAMETER Experiment Name: At_Drought_P Parameter: Plant Line Value: WS
  misc_feature: MA Experiment 20000437 PARAMETER Experiment Name: At_Drought_P Parameter: Timepoint (hr) Value: 24
  misc_feature: MA Experiment 20000437 PARAMETER Experiment Name: At_Drought_P Parameter: Tissue Value: Whole Plant
  misc_feature: MA Experiment 20000437 PARAMETER Experiment Name: At_Drought_P Parameter: Treatment Value: Drought vs. No Drought
  misc_feature: MA Experiment ID: 20000439 Result: Down-regulated in Transcription
  misc_feature: MA Experiment 20000439 PARAMETER Experiment Name: At_Roots__P Parameter: Age (day) Value: 14 vs. 21
  misc_feature: MA Experiment 20000439 PARAMETER Experiment Name: At_Roots__P Parameter: Organism Value: A. thaliana
  misc_feature: MA Experiment 20000439 PARAMETER Experiment Name: At_Roots__P Parameter: Tissue Value: Roots vs. Whole Plant
  misc_feature: MA Experiment ID: 20000495 Result: Up-regulated in Transcription
  misc_feature: MA Experiment 20000495 PARAMETER Experiment Name: At_Guard_Cells_P Parameter: Harvest Date Value: 8/2/2002
  misc_feature: MA Experiment 20000495 PARAMETER Experiment Name: At_Guard_Cells_P Parameter: Organism Value: A. thaliana
  misc_feature: MA Experiment 20000495 PARAMETER Experiment Name: At_Guard_Cells_P Parameter: Tissue Value: Guard Cells vs. Leaves
  misc_feature: MA Experiment ID: 20001248 Result: Down-regulated in Transcription
  misc_feature: MA Experiment 20001248 PARAMETER Experiment Name: At_Far-red-induction_P Parameter: Age (day) Value: 7
  misc_feature: MA Experiment 20001248 PARAMETER Experiment Name: At_Far-red-induction_P Parameter: Light Value: Far-red vs. White
  misc_feature: MA Experiment 20001248 PARAMETER Experiment Name: At_Far-red-induction_P Parameter: Organism Value: A. thaliana
  misc_feature: MA Experiment 20001248 PARAMETER Experiment Name: At_Far-red-induction_P Parameter: Plant Line Value: Columbia
  misc_feature: MA Experiment 20001248 PARAMETER Experiment Name: At_Far-red-induction_P Parameter: Timepoint (hr) Value: 4
  misc_feature: MA Experiment 20001248 PARAMETER Experiment Name: At_Far-red-induction_P Parameter: Tissue Value: Whole Plant
  misc_feature: MA Experiment ID: 20001555 Result: Down-regulated in Transcription
  misc_feature: MA Experiment 20001555 PARAMETER Experiment Name: At_Drought_Soil_Dry_P Parameter: Age (day) Value: 24
  misc_feature: MA Experiment 20001555 PARAMETER Experiment Name: At_Drought_Soil_Dry_P Parameter: Organism Value: A. thaliana
  misc_feature: MA Experiment 20001555 PARAMETER Experiment Name: At_Drought_Soil_Dry_P Parameter: Plant Line Value: WS
  misc_feature: MA Experiment 20001555 PARAMETER Experiment Name: At_Drought_Soil_Dry_P Parameter: Post Timepoint (hr) Value: None
  misc_feature: MA Experiment 20001555 PARAMETER Experiment Name: At_Drought_Soil_Dry_P Parameter: Post-Treatment Value: None
  misc_feature: MA Experiment 20001555 PARAMETER Experiment Name: At_Drought_Soil_Dry_P Parameter: Timepoint (day) Value: 10
  misc_feature: MA Experiment 20001555 PARAMETER Experiment Name: At_Drought_Soil_Dry_P Parameter: Treatment Value: Drought vs. No Drought
aaaaaacacattcatctatccaacaaaaaaaaaaaaaaaaaaggagaaatggaaggaatctatcatagaatggtgagtgtcaatggcataactatgcacattgccgagaaaggtcccaaagaaggacctgtggtgcttctcctccatggattccctgatctctggtacacgtggcgtcaccagattagtgggttatcatctctaggttaccgcgctgtagctccagacctccgaggctacggagactctgattcgccagagtctttctccgagtacacgtgtcttaacgtcgttggggacctcgtagctcttctggacagtgttgctggaaatcaagagaaggtgtttctggtcggtcatgattggggagccattatcggatggtttctctgtttgtttcgacctgaaaagattaacggctttgtgtgtttgagtgtgccgtatagatcaagaaaccctaaagtcaagcccgttcaagggttcaaggctgtatttggagatgattactacatttgtagatttcaggaaccggggaagattgaaggagagattgcaagtgcagatccaagaatatttctgaggaacctcttcacagggaggacactcggtccgccgattttacctaaggataatccctttggggaaaaacctaaccctaatagcgaaaacattgaattgcctgaatggttttctaagaaagatctcgatttctatgtctccaaattcgagaaggcaggatttaccggtggattgaactactacagagccatggatctgaattgggagctcactgcaccatggaccggagctaagattcaagttccagtgaagttcatgacaggtgacttcgacatggtttacaccacaccagggatgaaagagtacattcacggtggtggatttgctgcagatgttccaactcttcaagagatagtggtgattgaagatgctggtcacttcgttaaccaagagaaacctcaagaggtcactgctcacatcaatgacttcttcaccaagcttcgggacaacaacaaaagcttttagagttctcgtttggttctattatgttggctctcaaaacaagttggttcttgcatgtgttgtttcgacaagattttgaataagacttggcattatg

SEQ ID NO: 37884 - protein, 347 aa, Arabidopsis thaliana
  peptide (1)..(347): Ceres Seq. ID no. 12337897
  misc_feature (70)..(335): Pfam Name: alpha/beta hydrolase fold Pfam Description: alpha/beta hydrolase fold
  misc_feature (17)..(347): Homolog of NCBI NO: 15230018 NR Description: putative epoxide hydrolase
KKHIHLSNKKKKKKGEMEGIYHRMVSVNGITMHIAEKGPKEGPVVLLLHGFPDLWYTWRHQISGLSSLGYRAVAPDLRGYGDSDSPESFSEYTCLNVVGDLVALLDSVAGNQEKVFLVGHDWGAIIGWFLCLFRPEKINGFVCLSVPYRSRNPKVKPVQGFKAVFGDDYYICRFQEPGKIEGEIASADPRIFLRNLFTGRTLGPPILPKDNPFGEKPNPNSENIELPEWFSKKDLDFYVSKFEKAGFTGGLNYYRAMDLNWELTAPWTGAKIQVPVKFMTGDFDMVYTTPGMKEYIHGGGFAADVPTLQEIVVIEDAGHFVNQEKPQEVTAHINDFFTKLRDNNKSF

SEQ ID NO: 37885 - protein, 331 aa, Arabidopsis thaliana
  peptide (1)..(331): Ceres Seq. ID no. 12337898
  misc_feature (54)..(319): Pfam Name: alpha/beta hydrolase fold Pfam Description: alpha/beta hydrolase fold
  misc_feature (1)..(331): Homolog of NCBI NO: 15230018 NR Description: putative epoxide hydrolase
MEGIYHRMVSVNGITMHIAEKGPKEGPVVLLLHGFPDLWYTWRHQISGLSSLGYRAVAPDLRGYGDSDSPESFSEYTCLNVVGDLVALLDSVAGNQEKVFLVGHDWGAIIGWFLCLFRPEKINGFVCLSVPYRSRNPKVKPVQGFKAVFGDDYYICRFQEPGKIEGEIASADPRIFLRNLFTGRTLGPPILPKDNPFGEKPNPNSENIELPEWFSKKDLDFYVSKFEKAGFTGGLNYYRAMDLNWELTAPWTGAKIQVPVKFMTGDFDMVYTTPGMKEYIHGGGFAADVPTLQEIVVIEDAGHFVNQEKPQEVTAHINDFFTKLRDNNKSF

SEQ ID NO: 37886 - protein, 324 aa, Arabidopsis thaliana; identical to SEQ ID NO: 21477
  peptide (1)..(324): Ceres Seq. ID no. 12337899
  misc_feature (47)..(312): Pfam Name: alpha/beta hydrolase fold Pfam Description: alpha/beta hydrolase fold
  misc_feature (1)..(324): Homolog of NCBI NO: 15230018 NR Description: putative epoxide hydrolase

SEQ ID NO: 37887 - DNA, 1146 bp, Arabidopsis thaliana; identical to SEQ ID NO: 25459
  misc_feature (1)..(1146): Ceres Seq. ID no. 12336445
  misc_feature: MA Experiment ID: 20000185 Result: Down-regulated in Transcription
  misc_feature: MA Experiment 20000185 PARAMETER Experiment Name: At_Roots__P Parameter: Age (day) Value: 7 vs. 21
  misc_feature: MA Experiment 20000185 PARAMETER Experiment Name: At_Roots__P Parameter: Organism Value: A. thaliana
  misc_feature: MA Experiment 20000185 PARAMETER Experiment Name: At_Roots__P Parameter: Tissue Value: Roots vs. Whole Plant
  misc_feature: MA Experiment ID: 20000227 Result: Down-regulated in Transcription
  misc_feature: MA Experiment 20000227 PARAMETER Experiment Name: At_Root-Tips-vs-Tops_P Parameter: Tissue Value: Root Tips vs. Root Tops
  misc_feature: MA Experiment ID: 20000264 Result: Down-regulated in Transcription
  misc_feature: MA Experiment 20000264 PARAMETER Experiment Name: At_Open_Flower_P Parameter: Age (day) Value: 21
  misc_feature: MA Experiment 20000264 PARAMETER Experiment Name: At_Open_Flower_P Parameter: Plant Line Value: WS
  misc_feature: MA Experiment 20000264 PARAMETER Experiment Name: At_Open_Flower_P Parameter: Tissue Value: Open Flower vs. Whole Plant
  misc_feature: MA Experiment ID: 20000269 Result: Down-regulated in Transcription
  misc_feature: MA Experiment 20000269 PARAMETER Experiment Name: At_1mM_KNO3_L-vs-H_Roots_P Parameter: Age (day) Value: 7,10,12
  misc_feature: MA Experiment 20000269 PARAMETER Experiment Name: At_1mM_KNO3_L-vs-H_Roots_P Parameter: Organism Value: A. thaliana
  misc_feature: MA Experiment 20000269 PARAMETER Experiment Name: At_1mM_KNO3_L-vs-H_Roots_P Parameter: Plant Line Value: WS
  misc_feature: MA Experiment 20000269 PARAMETER Experiment Name: At_1mM_KNO3_L-vs-H_Roots_P Parameter: Timepoint (day) Value: 7,10,12
  misc_feature: MA Experiment 20000269 PARAMETER Experiment Name: At_1mM_KNO3_L-vs-H_Roots_P Parameter: Tissue Value: Roots
  misc_feature: MA Experiment 20000269 PARAMETER Experiment Name: At_1mM_KNO3_L-vs-H_Roots_P Parameter: Treatment Value: 1mM KNO3 vs. 50mM KNO3
  misc_feature: MA Experiment ID: 20000439 Result: Down-regulated in Transcription
  misc_feature: MA Experiment 20000439 PARAMETER Experiment Name: At_Roots__P Parameter: Age (day) Value: 14 vs. 21
  misc_feature: MA Experiment 20000439 PARAMETER Experiment Name: At_Roots__P Parameter: Organism Value: A. thaliana
  misc_feature: MA Experiment 20000439 PARAMETER Experiment Name: At_Roots__P Parameter: Tissue Value: Roots vs. Whole Plant
  misc_feature: MA Experiment ID: 20000794 Result: Down-regulated in Transcription
  misc_feature: MA Experiment 20000794 PARAMETER Experiment Name: At_Petals_P Parameter: Age (day) Value: 23-25 days
  misc_feature: MA Experiment 20000794 PARAMETER Experiment Name: At_Petals_P Parameter: Plant Line Value: WS
  misc_feature: MA Experiment 20000794 PARAMETER Experiment Name: At_Petals_P Parameter: Tissue Value: Petals vs. Whole plant
  misc_feature: MA Experiment ID: 20001904 Result: Down-regulated in Transcription
  misc_feature: MA Experiment 20001904 PARAMETER Experiment Name: At_Drought_Reproduction_P Parameter: Age (day) Value: 37
  misc_feature: MA Experiment 20001904 PARAMETER Experiment Name: At_Drought_Reproduction_P Parameter: Organism Value: A. thaliana
  misc_feature: MA Experiment 20001904 PARAMETER Experiment Name: At_Drought_Reproduction_P Parameter: Plant Line Value: WS
  misc_feature: MA Experiment 20001904 PARAMETER Experiment Name: At_Drought_Reproduction_P Parameter: Timepoint (day) Value: 7
  misc_feature: MA Experiment 20001904 PARAMETER Experiment Name: At_Drought_Reproduction_P Parameter: Tissue Value: Rosettes
  misc_feature: MA Experiment 20001904 PARAMETER Experiment Name: At_Drought_Reproduction_P Parameter: Treatment Value: Drought vs. No Drought
  misc_feature: MA Experiment ID: 20001905 Result: Down-regulated in Transcription
  misc_feature: MA Experiment 20001905 PARAMETER Experiment Name: At_Drought_Reproduction_P Parameter: Age (day) Value: 40
  misc_feature: MA Experiment 20001905 PARAMETER Experiment Name: At_Drought_Reproduction_P Parameter: Organism Value: A. thaliana
  misc_feature: MA Experiment 20001905 PARAMETER Experiment Name: At_Drought_Reproduction_P Parameter: Plant Line Value: WS
  misc_feature: MA Experiment 20001905 PARAMETER Experiment Name: At_Drought_Reproduction_P Parameter: Timepoint (day) Value: 10
  misc_feature: MA Experiment 20001905 PARAMETER Experiment Name: At_Drought_Reproduction_P Parameter: Tissue Value: Rosettes
  misc_feature: MA Experiment 20001905 PARAMETER Experiment Name: At_Drought_Reproduction_P Parameter: Treatment Value: Drought vs. No Drought
  misc_feature: Phenotype: WHOLE PLANT Color-Yellow-Green Viable 1
  misc_feature: Phenotype: WHOLE PLANT Color-Yellow-Green Viable 1
  misc_feature: Phenotype: WHOLE PLANT Size-Small
  misc_feature: Phenotype: WHOLE PLANT Color-Yellow-Green Viable 1
  misc_feature: Phenotype: WHOLE PLANT Color-Yellow-Green Viable 1
  misc_feature: Phenotype: WHOLE PLANT Size-Small
  misc_feature: Phenotype: WHOLE PLANT Color-Yellow-Green Viable 1
  misc_feature: Phenotype: WHOLE PLANT Color-Yellow-Green Viable 1
  misc_feature: Phenotype: WHOLE PLANT Size-Small
  misc_feature: Phenotype: WHOLE PLANT Color-Yellow-Green Viable 1
  misc_feature: Phenotype: WHOLE PLANT Color-Yellow-Green Viable 1
  misc_feature: Phenotype: WHOLE PLANT Size-Small
  misc_feature: Phenotype: WHOLE PLANT Color-Yellow-Green Viable 1
  misc_feature: Phenotype: WHOLE PLANT Color-Yellow-Green Viable 1
  misc_feature: Phenotype: WHOLE PLANT Size-Small
  misc_feature: Phenotype: WHOLE PLANT Color-Yellow-Green Viable 1
  misc_feature: Phenotype: WHOLE PLANT Color-Yellow-Green Viable 1
  misc_feature: Phenotype: WHOLE PLANT Size-Small
  misc_feature: Phenotype: WHOLE PLANT Color-Yellow-Green Viable 1
  misc_feature: Phenotype: WHOLE PLANT Color-Yellow-Green Viable 1
  misc_feature: Phenotype: WHOLE PLANT Size-Small
  misc_feature: Phenotype: WHOLE PLANT Color-Yellow-Green Viable 1
  misc_feature: Phenotype: WHOLE PLANT Color-Yellow-Green Viable 1
  misc_feature: Phenotype: WHOLE PLANT Color-Yellow-Green Viable 1
  misc_feature: Phenotype: WHOLE PLANT Color-Yellow-Green Viable 1
  misc_feature: Phenotype: WHOLE PLANT Color-Yellow-Green Viable 1

SEQ ID NO: 37888 - protein, 115 aa, Arabidopsis thaliana; identical to SEQ ID NO: 25460
  peptide (1)..(115): Ceres Seq. ID no. 12336446
  misc_feature (51)..(102): Homolog of NCBI NO: 7485188 NR Description: hypothetical protein - Arabidopsis thaliana
  misc_feature (51)..(102): Homolog of NCBI NO: 21555799 NR Description: Lil3 protein [Arabidopsis thaliana]
  misc_feature (51)..(102): Homolog of NCBI NO: 18414927 NR Description: Lil3 protein
  misc_feature (51)..(104): Homolog of NCBI NO: 8978078 NR Description: Lil3 protein [Arabidopsis thaliana]
  misc_feature (47)..(104): Homolog of NCBI NO: 30695110 NR Description: Lil3 protein [Arabidopsis thaliana]
  misc_feature (51)..(102): Homolog of NCBI NO: 7485188 NR Description: hypothetical protein - Arabidopsis thaliana
  misc_feature (51)..(102): Homolog of NCBI NO: 21555799 NR Description: Lil3 protein [Arabidopsis thaliana]
  misc_feature (51)..(102): Homolog of NCBI NO: 18414927 NR Description: Lil3 protein
  misc_feature (51)..(104): Homolog of NCBI NO: 8978078 NR Description: Lil3 protein [Arabidopsis thaliana]
  misc_feature (47)..(104): Homolog of NCBI NO: 30695110 NR Description: Lil3 protein [Arabidopsis thaliana]
  misc_feature (51)..(102): Homolog of NCBI NO: 7485188 NR Description: hypothetical protein - Arabidopsis thaliana
  misc_feature (51)..(102): Homolog of NCBI NO: 21555799 NR Description: Lil3 protein [Arabidopsis thaliana]
  misc_feature (51)..(102): Homolog of NCBI NO: 18414927 NR Description: Lil3 protein
  misc_feature (51)..(104): Homolog of NCBI NO: 8978078 NR Description: Lil3 protein [Arabidopsis thaliana]
  misc_feature (47)..(104): Homolog of NCBI NO: 30695110 NR Description: Lil3 protein [Arabidopsis thaliana]
  misc_feature (51)..(102): Homolog of NCBI NO: 7485188 NR Description: hypothetical protein - Arabidopsis thaliana
  misc_feature (51)..(102): Homolog of NCBI NO: 21555799 NR Description: Lil3 protein [Arabidopsis thaliana]
  misc_feature (51)..(102): Homolog of NCBI NO: 18414927 NR Description: Lil3 protein
  misc_feature (51)..(104): Homolog of NCBI NO: 8978078 NR Description: Lil3 protein [Arabidopsis thaliana]
  misc_feature (47)..(104): Homolog of NCBI NO: 30695110 NR Description: Lil3 protein [Arabidopsis thaliana]

SEQ ID NO: 37889 - protein, 97 aa, Arabidopsis thaliana; identical to SEQ ID NO: 25461
  peptide (1)..(97): Ceres Seq. ID no. 12336447
  misc_feature (1)..(97): Homolog of NCBI NO: 18414927 NR Description: Lil3 protein
  misc_feature (1)..(97): Homolog of NCBI NO: 7485188 NR Description: hypothetical protein - Arabidopsis thaliana
  misc_feature (1)..(97): Homolog of NCBI NO: 21555799 NR Description: Lil3 protein [Arabidopsis thaliana]
  misc_feature (1)..(97): Homolog of NCBI NO: 30695110 NR Description: Lil3 protein [Arabidopsis thaliana]
  misc_feature (1)..(97): Homolog of NCBI NO: 8978078 NR Description: Lil3 protein [Arabidopsis thaliana]
  misc_feature (1)..(97): Homolog of NCBI NO: 18414927 NR Description: Lil3 protein
  misc_feature (1)..(97): Homolog of NCBI NO: 7485188 NR Description: hypothetical protein - Arabidopsis thaliana
  misc_feature (1)..(97): Homolog of NCBI NO: 21555799 NR Description: Lil3 protein [Arabidopsis thaliana]
  misc_feature (1)..(97): Homolog of NCBI NO: 30695110 NR Description: Lil3 protein [Arabidopsis thaliana]
  misc_feature (1)..(97): Homolog of NCBI NO: 8978078 NR Description: Lil3 protein [Arabidopsis thaliana]
  misc_feature (1)..(97): Homolog of NCBI NO: 18414927 NR Description: Lil3 protein
  misc_feature (1)..(97): Homolog of NCBI NO: 7485188 NR Description: hypothetical protein - Arabidopsis thaliana
  misc_feature (1)..(97): Homolog of NCBI NO: 21555799 NR Description: Lil3 protein [Arabidopsis thaliana]
  misc_feature (1)..(97): Homolog of NCBI NO: 30695110 NR Description: Lil3 protein [Arabidopsis thaliana]
  misc_feature (1)..(97): Homolog of NCBI NO: 8978078 NR Description: Lil3 protein [Arabidopsis thaliana]
  misc_feature (1)..(97): Homolog of NCBI NO: 18414927 NR Description: Lil3 protein
  misc_feature (1)..(97): Homolog of NCBI NO: 7485188 NR Description: hypothetical protein - Arabidopsis thaliana
  misc_feature (1)..(97): Homolog of NCBI NO: 21555799 NR Description: Lil3 protein [Arabidopsis thaliana]
  misc_feature (1)..(97): Homolog of NCBI NO: 30695110 NR Description: Lil3 protein [Arabidopsis thaliana]
  misc_feature (1)..(97): Homolog of NCBI NO: 8978078 NR Description: Lil3 protein [Arabidopsis thaliana]

SEQ ID NO: 37890 - protein, 80 aa, Arabidopsis thaliana; identical to SEQ ID NO: 25462
  peptide (1)..(80): Ceres Seq. ID no. 12336448
  misc_feature (1)..(80): Homolog of NCBI NO: 18414927 NR Description: Lil3 protein
  misc_feature (1)..(80): Homolog of NCBI NO: 7485188 NR Description: hypothetical protein - Arabidopsis thaliana
  misc_feature (1)..(80): Homolog of NCBI NO: 21555799 NR Description: Lil3 protein [Arabidopsis thaliana]
  misc_feature (1)..(80): Homolog of NCBI NO: 30695110 NR Description: Lil3 protein [Arabidopsis thaliana]
  misc_feature (1)..(80): Homolog of NCBI NO: 8978078 NR Description: Lil3 protein [Arabidopsis thaliana]
  misc_feature (1)..(80): Homolog of NCBI NO: 18414927 NR Description: Lil3 protein
  misc_feature (1)..(80): Homolog of NCBI NO: 7485188 NR Description: hypothetical protein - Arabidopsis thaliana
  misc_feature (1)..(80): Homolog of NCBI NO: 21555799 NR Description: Lil3 protein [Arabidopsis thaliana]
  misc_feature (1)..(80): Homolog of NCBI NO: 30695110 NR Description: Lil3 protein [Arabidopsis thaliana]
  misc_feature (1)..(80): Homolog of NCBI NO: 8978078 NR Description: Lil3 protein [Arabidopsis thaliana]
  misc_feature (1)..(80): Homolog of NCBI NO: 18414927 NR Description: Lil3 protein
  misc_feature (1)..(80): Homolog of NCBI NO: 7485188 NR Description: hypothetical protein - Arabidopsis thaliana
  misc_feature (1)..(80): Homolog of NCBI NO: 21555799 NR Description: Lil3 protein [Arabidopsis thaliana]
  misc_feature (1)..(80): Homolog of NCBI NO: 30695110 NR Description: Lil3 protein [Arabidopsis thaliana]
  misc_feature (1)..(80): Homolog of NCBI NO: 8978078 NR Description: Lil3 protein [Arabidopsis thaliana]
  misc_feature (1)..(80): Homolog of NCBI NO: 18414927 NR Description: Lil3 protein
  misc_feature (1)..(80): Homolog of NCBI NO: 7485188 NR Description: hypothetical protein - Arabidopsis thaliana
  misc_feature (1)..(80): Homolog of NCBI NO: 21555799 NR Description: Lil3 protein [Arabidopsis thaliana]
  misc_feature (1)..(80): Homolog of NCBI NO: 30695110 NR Description: Lil3 protein [Arabidopsis thaliana]
  misc_feature (1)..(80): Homolog of NCBI NO: 8978078 NR Description: Lil3 protein [Arabidopsis thaliana]

SEQ ID NO: 37891 - protein, 69 aa, Arabidopsis thaliana; identical to SEQ ID NO: 25463
  peptide (1)..(69): Ceres Seq. ID no. 12336449
  misc_feature (5)..(56): Homolog of NCBI NO: 7485188 NR Description: hypothetical protein - Arabidopsis thaliana
  misc_feature (5)..(56): Homolog of NCBI NO: 21555799 NR Description: Lil3 protein [Arabidopsis thaliana]
  misc_feature (5)..(56): Homolog of NCBI NO: 18414927 NR Description: Lil3 protein
  misc_feature (5)..(58): Homolog of NCBI NO: 8978078 NR Description: Lil3 protein [Arabidopsis thaliana]
  misc_feature (1)..(58): Homolog of NCBI NO: 30695110 NR Description: Lil3 protein [Arabidopsis thaliana]
  misc_feature (5)..(56): Homolog of NCBI NO: 7485188 NR Description: hypothetical protein - Arabidopsis thaliana
  misc_feature (5)..(56): Homolog of NCBI NO: 21555799 NR Description: Lil3 protein [Arabidopsis thaliana]
  misc_feature (5)..(56): Homolog of NCBI NO: 18414927 NR Description: Lil3 protein
  misc_feature (5)..(58): Homolog of NCBI NO: 8978078 NR Description: Lil3 protein [Arabidopsis thaliana]
  misc_feature (1)..(58): Homolog of NCBI NO: 30695110 NR Description: Lil3 protein [Arabidopsis thaliana]
  misc_feature (5)..(56): Homolog of NCBI NO: 7485188 NR Description: hypothetical protein - Arabidopsis thaliana
  misc_feature (5)..(56): Homolog of NCBI NO: 21555799 NR Description: Lil3 protein [Arabidopsis thaliana]
  misc_feature (5)..(56): Homolog of NCBI NO: 18414927 NR Description: Lil3 protein
  misc_feature (5)..(58): Homolog of NCBI NO: 8978078 NR Description: Lil3 protein [Arabidopsis thaliana]
  misc_feature (1)..(58): Homolog of NCBI NO: 30695110 NR Description: Lil3 protein [Arabidopsis thaliana]
  misc_feature (5)..(56): Homolog of NCBI NO: 7485188 NR Description: hypothetical protein - Arabidopsis thaliana
  misc_feature (5)..(56): Homolog of NCBI NO: 21555799 NR Description: Lil3 protein [Arabidopsis thaliana]
  misc_feature (5)..(56): Homolog of NCBI NO: 18414927 NR Description: Lil3 protein
  misc_feature (5)..(58): Homolog of NCBI NO: 8978078 NR Description: Lil3 protein [Arabidopsis thaliana]
  misc_feature (1)..(58): Homolog of NCBI NO: 30695110 NR Description: Lil3 protein [Arabidopsis thaliana]

SEQ ID NO: 37892 - DNA, 1476 bp, Arabidopsis thaliana
  misc_feature (1)..(1476): Ceres Seq. ID no. 13487711
  misc_feature: MA Experiment ID: 108434 Result: Up-regulated in Transcription
  misc_feature: MA Experiment 108434 PARAMETER Experiment Name: At_Root_Tips_cDNA_P Parameter: Tissue Value: Root Tips
  misc_feature: MA Experiment ID: 108435 Result: Up-regulated in Transcription
  misc_feature: MA Experiment 108435 PARAMETER Experiment Name: At_stm_Mutants_cDNA_P Parameter: Plant Line Value: wt Landsburg vs stm
  misc_feature: MA Experiment 108435 PARAMETER Experiment Name: At_stm_Mutants_cDNA_P Parameter: Tissue Value: Shoot Apical Meristem Region
  misc_feature: MA Experiment ID: 108461 Result: Up-regulated in Transcription
  misc_feature: MA Experiment 108461 PARAMETER Experiment Name: At_Germinating_Seeds_cDNA_P Parameter: Age (day) Value: 1 vs. 0
  misc_feature: MA Experiment 108461 PARAMETER Experiment Name: At_Germinating_Seeds_cDNA_P Parameter: Tissue Value: Germinating Seeds
  misc_feature: MA Experiment ID: 20000179 Result: Up-regulated in Transcription
  misc_feature: MA Experiment 20000179 PARAMETER Experiment Name: At_Germinating_Seeds_P Parameter: Age (hr) Value: 6 vs. 0
  misc_feature: MA Experiment 20000179 PARAMETER Experiment Name: At_Germinating_Seeds_P Parameter: Tissue Value: Germinating Seeds
  misc_feature: MA Experiment ID: 20000265 Result: Up-regulated in Transcription
  misc_feature: MA Experiment 20000265 PARAMETER Experiment Name: At_Open_Flower_P Parameter: Age (day) Value: 21
  misc_feature: MA Experiment 20000265 PARAMETER Experiment Name: At_Open_Flower_P Parameter: Plant Line Value: WS
  misc_feature: MA Experiment 20000265 PARAMETER Experiment Name: At_Open_Flower_P Parameter: Tissue Value: Closed Flower vs. Whole Plant
  misc_feature: MA Experiment ID: 20000286 Result: Up-regulated in Transcription
  misc_feature: MA Experiment 20000286 PARAMETER Experiment Name: At_Open_Flower_P Parameter: Age (day) Value: 21
  misc_feature: MA Experiment 20000286 PARAMETER Experiment Name: At_Open_Flower_P Parameter: Plant Line Value: WS
  misc_feature: MA Experiment 20000286 PARAMETER Experiment Name: At_Open_Flower_P Parameter: Tissue Value: Half Open vs. Whole Plant
  misc_feature: MA Experiment ID: 20000437 Result: Down-regulated in Transcription
  misc_feature: MA Experiment 20000437 PARAMETER Experiment Name: At_Drought_P Parameter: Age (day) Value: 8
  misc_feature: MA Experiment 20000437 PARAMETER Experiment Name: At_Drought_P Parameter: Organism Value: A. thaliana
  misc_feature: MA Experiment 20000437 PARAMETER Experiment Name: At_Drought_P Parameter: Plant Line Value: WS
  misc_feature: MA Experiment 20000437 PARAMETER Experiment Name: At_Drought_P Parameter: Timepoint (hr) Value: 24
  misc_feature: MA Experiment 20000437 PARAMETER Experiment Name: At_Drought_P Parameter: Tissue Value: Whole Plant
  misc_feature: MA Experiment 20000437 PARAMETER Experiment Name: At_Drought_P Parameter: Treatment Value: Drought vs. No Drought
  misc_feature: MA Experiment ID: 20000495 Result: Up-regulated in Transcription
  misc_feature: MA Experiment 20000495 PARAMETER Experiment Name: At_Guard_Cells_P Parameter: Harvest Date Value: 8/2/2002
  misc_feature: MA Experiment 20000495 PARAMETER Experiment Name: At_Guard_Cells_P Parameter: Organism Value: A. thaliana
  misc_feature: MA Experiment 20000495 PARAMETER Experiment Name: At_Guard_Cells_P Parameter: Tissue Value: Guard Cells vs. Leaves
  misc_feature: MA Experiment ID: 20001450 Result: Down-regulated in Transcription
  misc_feature: MA Experiment 20001450 PARAMETER Experiment Name: At_Far-red-induction_P Parameter: Age (day) Value: 7
  misc_feature: MA Experiment 20001450 PARAMETER Experiment Name: At_Far-red-induction_P Parameter: Light Value: Far-red vs. White
  misc_feature: MA Experiment 20001450 PARAMETER Experiment Name: At_Far-red-induction_P Parameter: Organism Value: A. thaliana
  misc_feature: MA Experiment 20001450 PARAMETER Experiment Name: At_Far-red-induction_P Parameter: Plant Line Value: Columbia
  misc_feature: MA Experiment 20001450 PARAMETER Experiment Name: At_Far-red-induction_P Parameter: Timepoint (hr) Value: 8
  misc_feature: MA Experiment 20001450 PARAMETER Experiment Name: At_Far-red-induction_P Parameter: Tissue Value: Whole Plant
  misc_feature: MA Experiment ID: 20001458 Result: Up-regulated in Transcription
  misc_feature: MA Experiment 20001458 PARAMETER Experiment Name: At_50mM_NH4NO3_L-to-H_P Parameter: Age (day) Value: Undefined
  misc_feature: MA Experiment 20001458 PARAMETER Experiment Name: At_50mM_NH4NO3_L-to-H_P Parameter: Organism Value: Undefined
  misc_feature: MA Experiment 20001458 PARAMETER Experiment Name: At_50mM_NH4NO3_L-to-H_P Parameter: Plant Line Value: Undefined
  misc_feature: MA Experiment 20001458 PARAMETER Experiment Name: At_50mM_NH4NO3_L-to-H_P Parameter: Timepoint (hr) Value: 2
  misc_feature: MA Experiment 20001458 PARAMETER Experiment Name: At_50mM_NH4NO3_L-to-H_P Parameter: Tissue Value: Siliques
  misc_feature: MA Experiment 20001458 PARAMETER Experiment Name: At_50mM_NH4NO3_L-to-H_P Parameter: Treatment Value: 50mM NH4NO3 vs. 100mM Manitol
  misc_feature: MA Experiment ID: 20001556 Result: Down-regulated in Transcription
  misc_feature: MA Experiment 20001556 PARAMETER Experiment Name: At_Drought_Soil_Dry_P Parameter: Age (day) Value: 26
  misc_feature: MA Experiment 20001556 PARAMETER Experiment Name: At_Drought_Soil_Dry_P Parameter: Organism Value: A. thaliana
  misc_feature: MA Experiment 20001556 PARAMETER Experiment Name: At_Drought_Soil_Dry_P Parameter: Plant Line Value: WS
  misc_feature: MA Experiment 20001556 PARAMETER Experiment Name: At_Drought_Soil_Dry_P Parameter: Post Timepoint (hr) Value: None
  misc_feature: MA Experiment 20001556 PARAMETER Experiment Name: At_Drought_Soil_Dry_P Parameter: Post-Treatment Value: None
  misc_feature: MA Experiment 20001556 PARAMETER Experiment Name: At_Drought_Soil_Dry_P Parameter: Timepoint (day) Value: 12
  misc_feature: MA Experiment 20001556 PARAMETER Experiment Name: At_Drought_Soil_Dry_P Parameter: Treatment Value: Drought vs. No Drought
aaaaagttgcgaagctctctcattgagtaaactaacggctatattctctctgatattcaaaatttgctcgaagaaacgacgatggcagccgaaacgaaggttcaggtttcagatccagaggcagagtttcttaattcgaagcaggagactggatacgagtgggagcttttcaaggagaacgtccggccattgaagagaggtcgcaatgttggtattctcaaccacgctctcaaatctcactctgaccaccaattgagaaagaatctcatcgagaaacgcaggaatttgattgaagccattgatgagtatgaaggagatgaccctttatctccatggatagagtgtataaaatgggtacaagaggcttttccaccaggaggagaatgttcaggactgttagtgatatatgagcaatgtgttcgtaaattttggcactctgaacgttacaaggatgatcttcgttatcttaaagtctggttggaatatgcggagcattgcgctgatgcggaagtgatttacaagtttttggaggtcaatgagattggaaagacacatgctgtctactatatagcttatgctttgcacattgagtttaagaataaggtcaaaactgctaatgagatcttcaatcttggaatctctagggatgcaaagccagtggaaaagttgaatgacgcgtacaagaagtttatggtgagaacgatgagaaggtccaacacagctgatgaagaaccaaaggagaataatgacttaccgtcaagaagctttggcactttattgtccaggggagataataatgcaagaaggcaggcgttaggaagttctaacccacaagccaaaaagctaaagccaaatcaatcatccaagacaccttttgctatctacgcagatgcagtttcagacaccacatcagggaatcaaccagagtcagacaagtcaagaccagagtttggtagttggctcatgcttggaggcagagcagagaggaacaaagaaaacaattctttacctagaaaatgggcatcattcaaggttcctcagaaacccattgtgagaactgttgcagcagcatctgctttcacctttgaggtttttgtcgatgaagaagaatgtacagaagaggaagaagaaaagaagaagaatgatgaaactatctcatcatcatcaaacgttctgccccttaatggcggccgtgagataaaaaaagaaacagagctgctacgacagaaccctttaagacatttcccacccaacagcttcctacgatgatgatattggactttcttctctacacgatcttatggtttgagatttgagcttttgtctataaagctccttgtgtgtttttgcctatttggatttgtttttgtgatgtactgggatatactatcctactatgtaccatgatgtgcctttcatgttttgaaattaatgtgacttgtcttgtttcaatccttatatgatttgtttctcctg

SEQ ID NO: 37893 - protein, 395 aa, Arabidopsis thaliana
  peptide (1)..(395): Ceres Seq. ID no. 13487712
  misc_feature (24)..(322): Homolog of NCBI NO: 21619502 NR Description: MGC36092 protein [Mus musculus]
  misc_feature (21)..(372): Homolog of NCBI NO: 28317135 NR Description: LD23835p [Drosophila melanogaster]
  misc_feature (22)..(341): Homolog of NCBI NO: 22128593 NR Description: spindle checkpoint protein BubR1 [Xenopus laevis]
  misc_feature (26)..(387): Homolog of NCBI NO: 29725501 NR Description: spindle checkpoint protein BubR1 [Gallus gallus]
  misc_feature (26)..(188): Homolog of NCBI NO: 5441887 NR Description: Similar to Arabidopsis thaliana BAC genomic
  misc_feature (136)..(261): Homolog of NCBI NO: 25370767 NR Description: hypothetical protein At2g33560 [imported] -
  misc_feature (260)..(346): Homolog of NCBI NO: 25370767 NR Description: hypothetical protein At2g33560 [imported] -
  misc_feature (1)..(110): Homolog of NCBI NO: 25370767 NR Description: hypothetical protein At2g33560 [imported] -
  misc_feature (1)..(395): Homolog of NCBI NO: 18403316 NR Description: expressed protein [Arabidopsis thaliana]
  misc_feature (1)..(395): Homolog of NCBI NO: 21593781 NR Description: unknown [Arabidopsis thaliana]
MAAETKVQVSDPEAEFLNSKQETGYEWELFKENVRPLKRGRNVGILNHALKSHSDHQLRKNLIEKRRNLIEAIDEYEGDDPLSPWIECIKWVQEAFPPGGECSGLLVIYEQCVRKFWHSERYKDDLRYLKVWLEYAEHCADAEVIYKFLEVNEIGKTHAVYYIAYALHIEFKNKVKTANEIFNLGISRDAKPVEKLNDAYKKFMVRTMRRSNTADEEPKENNDLPSRSFGTLLSRGDNNARRQALGSSNPQAKKLKPNQSSKTPFAIYADAVSDTTSGNQPESDKSRPEFGSWLMLGGRAERNKENNSLPRKWASFKVPQKPIVRTVAAASAFTFEVFVDEEECTEEEEEKKKNDETISSSSNVLPLNGGREIKKETELLRQNPLRHFPPNSFLR

SEQ ID NO: 37894 - DNA, 889 bp, Arabidopsis thaliana
  misc_feature (1)..(889): Ceres Seq. ID no. 12357485
  misc_feature: MA Experiment ID: 20000794 Result: Down-regulated in Transcription
  misc_feature: MA Experiment 20000794 PARAMETER Experiment Name: At_Petals_P Parameter: Age (day) Value: 23-25 days
  misc_feature: MA Experiment 20000794 PARAMETER Experiment Name: At_Petals_P Parameter: Plant Line Value: WS
  misc_feature: MA Experiment 20000794 PARAMETER Experiment Name: At_Petals_P Parameter: Tissue Value: Petals vs. Whole plant
aatcaaatctctgagctttcagatatactctgatagaggagaagaagaagaagagatcagctgagcaacaatggccaccgcgatacctctcttcgcctctttcaagtacgccgatagtctcaccgtcgtcggaatctctttctgcacggcgttggtctgcgaagcaatctcgtggatcttaatctatcgcacaagctcgtacaaatcgttgaaatcttccattgacaaagcctctaagaagctcgagacgatgaagacagataatcctacctcgaagctaacaaacaagaaatcaaagacgaagaagatagatcgcgttgaatccagcttaaaggaatcgagcagagatctatcactcttcaagtttaaatctggtgccgttgtggctttggttctctttgtcgtgtttggattgttgaattcgcttttcgaagggaaagttgtagcgaagcttccgtttcatccgattacgattgtgaggaagatgagtcatagaggattgaaaggcgatgattccactgattgttccatggcttttctttatctgctttgttctattagtataaggactaatctgcagaagttcttgggtttctctccacctagaggagctgctggtgctggtggtttgttcccaatgcctgatccaaagaccaattgatcaggtttgatctgatgatgaattggattctggattctgagctcgttgttactctgaaattttcatagataacttcaatgctctgatgtagtggtgttgttttcagttcgtttgatgagaaacactttcaaagtttcgagttttgagttttcttctagtatgaggtttggatttggatcccttaacatgatctactccttttcaaattcagtcttgattattgtgtgc

SEQ ID NO: 37895 - protein, 196 aa, Arabidopsis thaliana
  peptide (1)..(196): Ceres Seq. ID no. 12357486
  misc_feature (13)..(191): Homolog of NCBI NO: 24585112 NR Description: CG10470-PA [Drosophila melanogaster]
  misc_feature (19)..(193): Homolog of NCBI NO: 33328806 NR Description: meg-2-like protein [Rattus norvegicus]
  misc_feature (5)..(191): Homolog of NCBI NO: 31238723 NR Description: ENSANGP00000016559 [Anopheles gambiae]
  misc_feature (14)..(182): Homolog of NCBI NO: 39587169 NR Description: Hypothetical protein CBG00622 [Caenorhabditis
  misc_feature (10)..(193): Homolog of NCBI NO: 23956188 NR Description: RIKEN cDNA 1190006A08 [Mus musculus]
  misc_feature (10)..(193): Homolog of NCBI NO: 3283893 NR Description: unknown [Homo sapiens]
  misc_feature (1)..(196): Homolog of NCBI NO: 21553820 NR Description: unknown [Arabidopsis thaliana]
  misc_feature (1)..(196): Homolog of NCBI NO: 18399454 NR Description: expressed protein
  misc_feature (1)..(196): Homolog of NCBI NO: 21554161 NR Description: unknown [Arabidopsis thaliana]
  misc_feature (1)..(196): Homolog of NCBI NO: 15240119 NR Description: putative protein
MATAIPLFASFKYADSLTVVGISFCTALVCEAISWILIYRTSSYKSLKSSIDKASKKLETMKTDNPTSKLTNKKSKTKKIDRVESSLKESSRDLSLFKFKSGAVVALVLFVVFGLLNSLFEGKVVAKLPFHPITIVRKMSHRGLKGDDSTDCSMAFLYLLCSISIRTNLQKFLGFSPPRGAAGAGGLFPMPDPKTN

SEQ ID NO: 37896 - protein, 136 aa, Arabidopsis thaliana
  peptide (1)..(136): Ceres Seq. ID no. 12357487
  misc_feature (1)..(131): Homolog of NCBI NO: 24585112 NR Description: CG10470-PA [Drosophila melanogaster]
  misc_feature (1)..(133): Homolog of NCBI NO: 33328806 NR Description: meg-2-like protein [Rattus norvegicus]
  misc_feature (1)..(131): Homolog of NCBI NO: 31238723 NR Description: ENSANGP00000016559 [Anopheles gambiae]
  misc_feature (1)..(122): Homolog of NCBI NO: 39587169 NR Description: Hypothetical protein CBG00622 [Caenorhabditis
  misc_feature (1)..(133): Homolog of NCBI NO: 23956188 NR Description: RIKEN cDNA 1190006A08 [Mus musculus]
  misc_feature (1)..(133): Homolog of NCBI NO: 3283893 NR Description: unknown [Homo sapiens]
  misc_feature (1)..(136): Homolog of NCBI NO: 21553820 NR Description: unknown [Arabidopsis thaliana]
  misc_feature (1)..(136): Homolog of NCBI NO: 18399454 NR Description: expressed protein
  misc_feature (1)..(136): Homolog of NCBI NO: 21554161 NR Description: unknown [Arabidopsis thaliana]
  misc_feature (1)..(136): Homolog of NCBI NO: 15240119 NR Description: putative protein
MKTDNPTSKLTNKKSKTKKIDRVESSLKESSRDLSLFKFKSGAVVALVLFVVFGLLNSLFEGKVVAKLPFHPITIVRKMSHRGLKGDDSTDCSMAFLYLLCSISIRTNLQKFLGFSPPRGAAGAGGLFPMPDPKTN

SEQ ID NO: 37897 - DNA, 1428 bp, Arabidopsis thaliana
  misc_feature (1)..(1428): Ceres Seq. ID no. 12327207
  misc_feature: MA Experiment ID: 108434 Result: Up-regulated in Transcription
  misc_feature: MA Experiment 108434 PARAMETER Experiment Name: At_Root_Tips_cDNA_P Parameter: Tissue Value: Root Tips
  misc_feature: MA Experiment ID: 108573 Result: Up-regulated in Transcription
  misc_feature: MA Experiment 108573 PARAMETER Experiment Name: At_Drought_cDNA_P Parameter: Timepoint (hr) Value: 6
  misc_feature: MA Experiment 108573 PARAMETER Experiment Name: At_Drought_cDNA_P Parameter: Tissue Value: Aerial
  misc_feature: MA Experiment 108573 PARAMETER Experiment Name: At_Drought_cDNA_P Parameter: Treatment Value: Drought vs. No Drought
  misc_feature: MA Experiment ID: 20000224 Result: Down-regulated in Transcription
taaaaagtttgaactttccgtcgaatcaaatgggaagcggaagatatctagacgaccctttaacatttactagaaacccaccttcctcgtcgtctccaatcaccgaatctagctttctcgcagaatcgatctctcgctctggtagcttcgagagtgggagcttacgaggaggcgatggtgattgctttagcgacgtcgatttcgcacttgataaactcgctgggactgtacagttctacgagaggcatgtcttcttgtgctacaaaaaaccatccgtttggcctgcgaggatcgaagcgtctgagtttgatcggttaccgaggcttctctcttccgttatattggcgaggaagagtagtatgaagaaagagactttactcacaatatgtgagggacatgatggttcagagacatcaaatggggatgttctgatatttccagatatgatcagatacagaaggttgactcattttgatgtggacacatttgttgaggaggtgcttgtgaagggtgttgagtggttgcctggaaatcctgaatctcttagtggttcatatgtctttgtatgttgtcatggatctcgagaccggcgatgtggggtttgtggaccttctctagttagtcgattcagagaagaaattgactcgtgtgctcttcgaggtgaagtttcagtcagcccttgttctcacattggtggtcacaaatacactggagatgttatcatctatggattaaatatcaaccagagagtcacaggacactggtatggatgtgtgactctagaggatgttcctcttttgttggagcaacacattaacaaaggcgaaattgtagaccggctttggaggggtgaaatgggtctgccagaagaagatcagaagaaaagtcaagaacaaaggttacaattaaacagcgaaaagatcagcaacagagaggtgactcaagaatcagttaataatagtatctgttgccagtctcgagctgtcccagctgaacggtagtggttgccaacaaaatgggaactcctcttactgtctggaggagattcacacagagaaaaatacctcggagagagtaacctctgtaaaaaatgcatctcttcggatcggtagcagcgagaatggatcttctggtggattcaaggtttgtgcggtgatgtcaatgtggttggagacttgggagagagaagatacatatgctgctttagctgttgcttgtgctgctgcatctgtggctattgcttataactgctataaacaattgaaatgaagctatgtgttttatatttagcttctatgcaatggtaattatctcagtctttagattagttgtttcctcttcgtctgtacagagttagaagagggttttaactcttaagtaagaactgcttgttgataacatatgattattatatatccatttgtaagt

SEQ ID NO: 37898 - protein, 332 aa, Arabidopsis thaliana
  peptide (1)..(332): Ceres Seq. ID no. 12327208
  misc_feature (72)..(324): Homolog of NCBI NO: 21553503 NR Description: sucrose cleavage protein-like [Arabidopsis
  misc_feature (72)..(324): Homolog of NCBI NO: 30688845 NR Description: sucrose cleavage protein -related [Arabidopsis
  misc_feature (72)..(324): Homolog of NCBI NO: 16604338 NR Description: AT3g27570/MMJ24_12 [Arabidopsis thaliana]
  misc_feature (72)..(324): Homolog of NCBI NO: 11994184 NR Description: sucrose cleavage protein-like [Arabidopsis
  misc_feature (71)..(327): Homolog of NCBI NO: 1086252 NR Description: sucrose cleavage protein - potato
  misc_feature (282)..(324): Homolog of NCBI NO: 7488353 NR Description: sucrose cleavage protein homolog T15N24.70 -
  misc_feature (10)..(227): Homolog of NCBI NO: 7488353 NR Description: sucrose cleavage protein homolog T15N24.70 -
  misc_feature (10)..(327): Homolog of NCBI NO: 16604384 NR Description: AT4g26620/T15N24_70 [Arabidopsis thaliana]
  misc_feature (10)..(327): Homolog of NCBI NO: 18416788 NR Description: sucrase-like protein
  misc_feature (10)..(329): Homolog of NCBI NO: 15241075 NR Description: sucrose cleavage protein-like
KSLNFPSNQMGSGRYLDDPLTFTRNPPSSSSPITESSFLAESISRSGSFESGSLRGGDGDCFSDVDFALDKLAGTVQFYERHVFLCYKKPSVWPARIEASEFDRLPRLLSSVILARKSSMKKETLLTICEGHDGSETSNGDVLIFPDMIRYRRLTHFDVDTFVEEVLVKGVEWLPGNPESLSGSYVFVCCHGSRDRRCGVCGPSLVSRFREEIDSCALRGEVSVSPCSHIGGHKYTGDVIIYGLNINQRVTGHWYGCVTLEDVPLLLEQHINKGEIVDRLWRGEMGLPEEDQKKSQEQRLQLNSEKISNREVTQESVNNSICCQSRAVPAER

SEQ ID NO: 37899 - protein, 323 aa, Arabidopsis thaliana
  peptide (1)..(323): Ceres Seq. ID no. 12327209
  misc_feature (63)..(315): Homolog of NCBI NO: 21553503 NR Description: sucrose cleavage protein-like [Arabidopsis
  misc_feature (63)..(315): Homolog of NCBI NO: 30688845 NR Description: sucrose cleavage protein -related [Arabidopsis
  misc_feature (63)..(315): Homolog of NCBI NO: 16604338 NR Description: AT3g27570/MMJ24_12 [Arabidopsis thaliana]
  misc_feature (63)..(315): Homolog of NCBI NO: 11994184 NR Description: sucrose cleavage protein-like [Arabidopsis
  misc_feature (62)..(318): Homolog of NCBI NO: 1086252 NR Description: sucrose cleavage protein - potato
  misc_feature (273)..(315): Homolog of NCBI NO: 7488353 NR Description: sucrose cleavage protein homolog T15N24.70 -
  misc_feature (1)..(218): Homolog of NCBI NO: 7488353 NR Description: sucrose cleavage protein homolog T15N24.70 -
  misc_feature (1)..(318): Homolog of NCBI NO: 16604384 NR Description: AT4g26620/T15N24_70 [Arabidopsis thaliana]
  misc_feature (1)..(318): Homolog of NCBI NO: 18416788 NR Description: sucrase-like protein
  misc_feature (1)..(320): Homolog of NCBI NO: 15241075 NR Description: sucrose cleavage protein-like
MGSGRYLDDPLTFTRNPPSSSSPITESSFLAESISRSGSFESGSLRGGDGDCFSDVDFALDKLAGTVQFYERHVFLCYKKPSVWPARIEASEFDRLPRLLSSVILARKSSMKKETLLTICEGHDGSETSNGDVLIFPDMIRYRRLTHFDVDTFVEEVLVKGVEWLPGNPESLSGSYVFVCCHGSRDRRCGVCGPSLVSRFREEIDSCALRGEVSVSPCSHIGGHKYTGDVIIYGLNINQRVTGHWYGCVTLEDVPLLLEQHINKGEIVDRLWRGEMGLPEEDQKKSQEQRLQLNSEKISNREVTQESVNNSICCQSRAVPAER

SEQ ID NO: 37900 - protein, 213 aa, Arabidopsis thaliana
  peptide (1)..(213): Ceres Seq. ID no. 12327210
  misc_feature (1)..(205): Homolog of NCBI NO: 21553503 NR Description: sucrose cleavage protein-like [Arabidopsis
  misc_feature (1)..(205): Homolog of NCBI NO: 30688845 NR Description: sucrose cleavage protein -related [Arabidopsis
  misc_feature (1)..(205): Homolog of NCBI NO: 16604338 NR Description: AT3g27570/MMJ24_12 [Arabidopsis thaliana]
  misc_feature (1)..(205): Homolog of NCBI NO: 11994184 NR Description: sucrose cleavage protein-like [Arabidopsis
  misc_feature (1)..(208): Homolog of NCBI NO: 1086252 NR Description: sucrose cleavage protein - potato
  misc_feature (163)..(205): Homolog of NCBI NO: 7488353 NR Description: sucrose cleavage protein homolog T15N24.70 -
  misc_feature (1)..(108): Homolog of NCBI NO: 7488353 NR Description: sucrose cleavage protein homolog T15N24.70 -
  misc_feature (1)..(208): Homolog of NCBI NO: 16604384 NR Description: AT4g26620/T15N24_70 [Arabidopsis thaliana]
  misc_feature (1)..(208): Homolog of NCBI NO: 18416788 NR Description: sucrase-like protein
  misc_feature (1)..(210): Homolog of NCBI NO: 15241075 NR Description: sucrose cleavage protein-like
MKKETLLTICEGHDGSETSNGDVLIFPDMIRYRRLTHFDVDTFVEEVLVKGVEWLPGNPESLSGSYVFVCCHGSRDRRCGVCGPSLVSRFREEIDSCALRGEVSVSPCSHIGGHKYTGDVIIYGLNINQRVTGHWYGCVTLEDVPLLLEQHINKGEIVDRLWRGEMGLPEEDQKKSQEQRLQLNSEKISNREVTQESVNNSICCQSRAVPAER

SEQ ID NO: 37901 - DNA, 1221 bp, Arabidopsis thaliana
  misc_feature (1)..(1221): Ceres Seq. ID no. 12580520
  misc_feature: MA Experiment ID: 108434 Result: Down-regulated in Transcription
  misc_feature: MA Experiment 108434 PARAMETER Experiment Name: At_Root_Tips_cDNA_P Parameter: Tissue Value: Root Tips
  misc_feature: MA Experiment ID: 108435 Result: Up-regulated in Transcription
  misc_feature: MA Experiment 108435 PARAMETER Experiment Name: At_stm_Mutants_cDNA_P Parameter: Plant Line Value: wt Landsburg vs stm
  misc_feature: MA Experiment 108435 PARAMETER Experiment Name: At_stm_Mutants_cDNA_P Parameter: Tissue Value: Shoot Apical Meristem Region
  misc_feature: MA Experiment ID: 108462 Result: Up-regulated in Transcription
  misc_feature: MA Experiment 108462 PARAMETER Experiment Name: At_Germinating_Seeds_cDNA_P Parameter: Age (day) Value: 2 vs. 0
  misc_feature: MA Experiment 108462 PARAMETER Experiment Name: At_Germinating_Seeds_cDNA_P Parameter: Tissue Value: Germinating Seeds
  misc_feature: MA Experiment ID: 108463 Result: Up-regulated in Transcription
  misc_feature: MA Experiment 108463 PARAMETER Experiment Name: At_Germinating_Seeds_cDNA_P Parameter: Age (day) Value: 3 vs. 0
  misc_feature: MA Experiment 108463 PARAMETER Experiment Name: At_Germinating_Seeds_cDNA_P Parameter: Tissue Value: Germinating Seeds
  misc_feature: MA Experiment ID: 108464 Result: Up-regulated in Transcription
  misc_feature: MA Experiment 108464 PARAMETER Experiment Name: At_Germinating_Seeds_cDNA_P Parameter: Age (day) Value: 4 vs. 0
  misc_feature: MA Experiment 108464 PARAMETER Experiment Name: At_Germinating_Seeds_cDNA_P Parameter: Tissue Value: Germinating Seeds
  misc_feature: MA Experiment ID: 108489 Result: Up-regulated in Transcription
  misc_feature: MA Experiment ID: 108569 Result: Up-regulated in Transcription
  misc_feature: MA Experiment 108569 PARAMETER Experiment Name: At_0.001%_MeJA__cDNA_P Parameter: Timepoint (hr) Value: 6
  misc_feature: MA Experiment 108569 PARAMETER Experiment Name: At_0.001%_MeJA__cDNA_P Parameter: Tissue Value: Aerial
  misc_feature: MA Experiment 108569 PARAMETER Experiment Name: At_0.001%_MeJA__cDNA_P Parameter: Treatment Value: 0.001% MeJA vs. No Treatment
  misc_feature: MA Experiment ID: 108573 Result: Up-regulated in Transcription
  misc_feature: MA Experiment 108573 PARAMETER Experiment Name: At_Drought_cDNA_P Parameter: Timepoint (hr) Value: 6
  misc_feature: MA Experiment 108573 PARAMETER Experiment Name: At_Drought_cDNA_P Parameter: Tissue Value: Aerial
  misc_feature: MA Experiment 108573 PARAMETER Experiment Name: At_Drought_cDNA_P Parameter: Treatment Value: Drought vs. No Drought
  misc_feature: MA Experiment ID: 20000184 Result: Up-regulated in Transcription
  misc_feature: MA Experiment 20000184 PARAMETER Experiment Name: At_Shoots__P Parameter: Age (day) Value: 7
  misc_feature: MA Experiment 20000184 PARAMETER Experiment Name: At_Shoots__P Parameter: Tissue Value: Shoots vs. Whole Plant
  misc_feature: MA Experiment ID: 20000185 Result: Up-regulated in Transcription
  misc_feature: MA Experiment 20000185 PARAMETER Experiment Name: At_Roots__P Parameter: Age (day) Value: 7 vs. 21
  misc_feature: MA Experiment 20000185 PARAMETER Experiment Name: At_Roots__P Parameter: Organism Value: A. thaliana
  misc_feature: MA Experiment 20000185 PARAMETER Experiment Name: At_Roots__P Parameter: Tissue Value: Roots vs. Whole Plant
  misc_feature: MA Experiment ID: 20000227 Result: Down-regulated in Transcription
  misc_feature: MA Experiment 20000227 PARAMETER Experiment Name: At_Root-Tips-vs-Tops_P Parameter: Tissue Value: Root Tips vs. Root Tops
  misc_feature: MA Experiment ID: 20000269 Result: Down-regulated in Transcription
  misc_feature: MA Experiment 20000269 PARAMETER Experiment Name: At_1mM_KNO3_L-vs-H_Roots_P Parameter: Age (day) Value: 7,10,12
  misc_feature: MA Experiment 20000269 PARAMETER Experiment Name: At_1mM_KNO3_L-vs-H_Roots_P Parameter: Organism Value: A. thaliana
  misc_feature: MA Experiment 20000269 PARAMETER Experiment Name: At_1mM_KNO3_L-vs-H_Roots_P Parameter: Plant Line Value: WS
  misc_feature: MA Experiment 20000269 PARAMETER Experiment Name: At_1mM_KNO3_L-vs-H_Roots_P Parameter: Timepoint (day) Value: 7,10,12
  misc_feature: MA Experiment 20000269 PARAMETER Experiment Name: At_1mM_KNO3_L-vs-H_Roots_P Parameter: Tissue Value: Roots
  misc_feature: MA Experiment 20000269 PARAMETER Experiment Name: At_1mM_KNO3_L-vs-H_Roots_P Parameter: Treatment Value: 1mM KNO3 vs. 50mM KNO3
  misc_feature: MA Experiment ID: 20000438 Result: Up-regulated in Transcription
  misc_feature: MA Experiment 20000438 PARAMETER Experiment Name: At_Shoots__P Parameter: Age (day) Value: 14
  misc_feature: MA Experiment 20000438 PARAMETER Experiment Name: At_Shoots__P Parameter: Tissue Value: Shoots vs. Whole Plant
  misc_feature: MA Experiment ID: 20000439 Result: Up-regulated in Transcription
  misc_feature: MA Experiment 20000439 PARAMETER Experiment Name: At_Roots__P Parameter: Age (day) Value: 14 vs. 21
  misc_feature: MA Experiment 20000439 PARAMETER Experiment Name: At_Roots__P Parameter: Organism Value: A. thaliana
  misc_feature: MA Experiment 20000439 PARAMETER Experiment Name: At_Roots__P Parameter: Tissue Value: Roots vs. Whole Plant
  misc_feature: MA Experiment ID: 20000452 Result: Up-regulated in Transcription
  misc_feature: MA Experiment 20000452 PARAMETER Experiment Name: At_CS6879_Shoots-Roots_P Parameter: Age (day) Value: 14
  misc_feature: MA Experiment 20000452 PARAMETER Experiment Name: At_CS6879_Shoots-Roots_P Parameter: Organism Value: A. thaliana
  misc_feature: MA Experiment 20000452 PARAMETER Experiment Name: At_CS6879_Shoots-Roots_P Parameter: Plant Line Value: CS6879 vs. WS
  misc_feature: MA Experiment 20000452 PARAMETER Experiment Name: At_CS6879_Shoots-Roots_P Parameter: Tissue Value: Shoots
  misc_feature: MA Experiment ID: 20000453 Result: Up-regulated in Transcription
  misc_feature: MA Experiment 20000453 PARAMETER Experiment Name: At_100uM_ABA_P Parameter: Age (day) Value: 15
  misc_feature: MA Experiment 20000453 PARAMETER Experiment Name: At_100uM_ABA_P Parameter: Organism Value: A. thaliana
  misc_feature: MA Experiment 20000453 PARAMETER Experiment Name: At_100uM_ABA_P Parameter: Plant Line Value: WS
  misc_feature: MA Experiment 20000453 PARAMETER Experiment Name: At_100uM_ABA_P Parameter: Timepoint (hr) Value: 24
  misc_feature: MA Experiment 20000453 PARAMETER Experiment Name: At_100uM_ABA_P Parameter: Tissue Value: Aerial
  misc_feature: MA Experiment 20000453 PARAMETER Experiment Name: At_100uM_ABA_P Parameter: Treatment Value: 100uM ABA vs. No Treatment
  misc_feature: MA Experiment ID: 20000460 Result: Down-regulated in Transcription
  misc_feature: MA Experiment 20000460 PARAMETER Experiment Name: At_10percent_PEG_P Parameter: Age (day) Value: 12
  misc_feature: MA Experiment 20000460 PARAMETER Experiment Name: At_10percent_PEG_P Parameter: Organism Value: A. thaliana
  misc_feature: MA Experiment 20000460 PARAMETER Experiment Name: At_10percent_PEG_P Parameter: Plant Line Value: WS
  misc_feature: MA Experiment 20000460 PARAMETER Experiment Name: At_10percent_PEG_P Parameter: Timepoint (day) Value: 12
  misc_feature: MA Experiment 20000460 PARAMETER Experiment Name: At_10percent_PEG_P Parameter: Tissue Value: Whole Plant
  misc_feature: MA Experiment 20000460 PARAMETER Experiment Name: At_10percent_PEG_P Parameter: Treatment Value: 10percent PEG vs. No Treatment
  misc_feature: MA Experiment ID: 20001451 Result: Down-regulated in Transcription
  misc_feature: MA Experiment 20001451 PARAMETER Experiment Name: At_Far-red-induction_P Parameter: Age (day) Value: 7
  misc_feature: MA Experiment 20001451 PARAMETER Experiment Name: At_Far-red-induction_P Parameter: Light Value: Far-red vs. White
  misc_feature: MA Experiment 20001451 PARAMETER Experiment Name: At_Far-red-induction_P Parameter: Organism Value: A. thaliana
  misc_feature: MA Experiment 20001451 PARAMETER Experiment Name: At_Far-red-induction_P Parameter: Plant Line Value: Columbia
  misc_feature: MA Experiment 20001451 PARAMETER Experiment Name: At_Far-red-induction_P Parameter: Timepoint (hr) Value: 24
  misc_feature: MA Experiment 20001451 PARAMETER Experiment Name: At_Far-red-induction_P Parameter: Tissue Value: Whole Plant
  misc_feature: MA Experiment ID: 20001904 Result: Up-regulated in Transcription
  misc_feature: MA Experiment 20001904 PARAMETER Experiment Name: At_Drought_Reproduction_P Parameter: Age (day) Value: 37
  misc_feature: MA Experiment 20001904 PARAMETER Experiment Name: At_Drought_Reproduction_P Parameter: Organism Value: A. thaliana
  misc_feature: MA Experiment 20001904 PARAMETER Experiment Name: At_Drought_Reproduction_P Parameter: Plant Line Value: WS
  misc_feature: MA Experiment 20001904 PARAMETER Experiment Name: At_Drought_Reproduction_P Parameter: Timepoint (day) Value: 7
  misc_feature: MA Experiment 20001904 PARAMETER Experiment Name: At_Drought_Reproduction_P Parameter: Tissue Value: Rosettes
  misc_feature: MA Experiment 20001904 PARAMETER Experiment Name: At_Drought_Reproduction_P Parameter: Treatment Value: Drought vs. No Drought
acacactcacaactcaaatcatctttttgtctccctcctgaaaaaatggggttttcgtcttcattatcttgcagtgctatgggagccctaatagtgggttgccttctgcttcaagcatcaaactctaatgctcagttgagacctgacttctacttcaggacttgcccacctattttcaacatcattggggataccatcgtcaatgagctgcggactgatcctcgtattgccgcgagcctccttcggcttcacttccatgactgctttgttcgtggttgtgatgcatcgatcttgcttgacaattccacatcattccggaccgagaaagatgctgctccaaacaaaaattcggttcgagggttcgatgtcatagatagaatgaaagcagccattgagagagcttgcccaagaacagtttcttgcgcagatattatcaccatcgcctctcagatatcagttcttttgtctggcggtccatggtggccagttccgttggggagaagagacagcgtagaagctttcttcgctctggctaatacagctcttccctctccattttccactcttactcaacttaaaacagcttttgctgacgttggcctaaaccgcccttcggatttagtcgccctctccggtggtcacacatttggaaaagcacaatgccaattcgtgacacctcgtctttacaacttcaacggtaccaacagaccagacccaagtttgaacccaacttacctcgttgaactccgtcgattgtgtcctcaaaacggaaacggcaccgttctggttaacttcgattccgtgactccaactactttcgatagacaatattacaccaatcttcttaatgggaaaggtttgattcagagtgaccaagtgcttttctcaactccaggagctgatacgattccactagtaaaccaatacagcagcaacacgttcgtgttctttggagcattcgttgatgcaatgattaggatgggaaatcttaaacctttgactggaactcaaggagagataagacagaattgtagggttgtgaatccaagaattagggttgtggagaacgacgatggtgttgtgagttctatctgattatgcatgttggggatatatggatatgtaagaacgtataaaatgtgtgggattgtgggaacatttcgactaaataaagttctcacaagttgtgtgatttatgaaatttggtcttaattaacactt

SEQ ID NO: 37902 - protein, 364 aa, Arabidopsis thaliana
  peptide (1)..(364): Ceres Seq. ID no. 12580521
  misc_feature (62)..(312): Pfam Name: Peroxidase Pfam Description: Peroxidase
  misc_feature (16)..(348): Homolog of NCBI NO: 480907 NR Description: peroxidase (EC 1.11.1.7) Cb - Arabidopsis
  misc_feature (16)..(348): Homolog of NCBI NO: 15229095 NR Description: peroxidase, putative
  misc_feature (16)..(348): Homolog of NCBI NO: 25453209 NR Description: Peroxidase 32 precursor (Atperox P32) (PRXR3)
  misc_feature (16)..(348): Homolog of NCBI NO: 30690396 NR Description: peroxidase, putative [Arabidopsis thaliana]
  misc_feature (16)..(348): Homolog of NCBI NO: 21592888 NR Description: peroxidase [Arabidopsis thaliana]
  misc_feature (45)..(350): Homolog of NCBI NO: 26398007 NR Description: Peroxidase E5
  misc_feature (16)..(364): Homolog of NCBI NO: 81653 NR Description: peroxidase (EC 1.11.1.7) E - Arabidopsis thaliana
  misc_feature (16)..(364): Homolog of NCBI NO: 15224496 NR Description: peroxidase
  misc_feature (16)..(364): Homolog of NCBI NO: 129812 NR Description: Peroxidase C3 precursor
  misc_feature (16)..(364): Homolog of NCBI NO: 15224497 NR Description: peroxidase, putative
THSQLKSSFCLPPEKMGFSSSLSCSAMGALIVGCLLLQASNSNAQLRPDFYFRTCPPIFNIIGDTIVNELRTDPRIAASLLRLHFHDCFVRGCDASILLDNSTSFRTEKDAAPNKNSVRGFDVIDRMKAAIERACPRTVSCADIITIASQISVLLSGGPWWPVPLGRRDSVEAFFALANTALPSPFSTLTQLKTAFADVGLNRPSDLVALSGGHTFGKAQCQFVTPRLYNFNGTNRPDPSLNPTYLVELRRLCPQNGNGTVLVNFDSVTPTTFDRQYYTNLLNGKGLIQSDQVLFSTPGADTIPLVNQYSSNTFVFFGAFVDAMIRMGNLKPLTGTQGEIRQNCRVVNPRIRVVENDDGVVSSI

SEQ ID NO: 37903 - protein, 349 aa, Arabidopsis thaliana
  peptide (1)..(349): Ceres Seq. ID no. 12580522
  misc_feature (47)..(297): Pfam Name: Peroxidase Pfam Description: Peroxidase
  misc_feature (1)..(333): Homolog of NCBI NO: 480907 NR Description: peroxidase (EC 1.11.1.7) Cb - Arabidopsis
  misc_feature (1)..(333): Homolog of NCBI NO: 15229095 NR Description: peroxidase, putative
  misc_feature (1)..(333): Homolog of NCBI NO: 25453209 NR Description: Peroxidase 32 precursor (Atperox P32) (PRXR3)
  misc_feature (1)..(333): Homolog of NCBI NO: 30690396 NR Description: peroxidase, putative [Arabidopsis thaliana]
  misc_feature (1)..(333): Homolog of NCBI NO: 21592888 NR Description: peroxidase [Arabidopsis thaliana]
  misc_feature (30)..(335): Homolog of NCBI NO: 26398007 NR Description: Peroxidase E5
  misc_feature (1)..(349): Homolog of NCBI NO: 81653 NR Description: peroxidase (EC 1.11.1.7) E - Arabidopsis thaliana
  misc_feature (1)..(349): Homolog of NCBI NO: 15224496 NR Description: peroxidase
  misc_feature (1)..(349): Homolog of NCBI NO: 129812 NR Description: Peroxidase C3 precursor
  misc_feature (1)..(349): Homolog of NCBI NO: 15224497 NR Description: peroxidase, putative
MGFSSSLSCSAMGALIVGCLLLQASNSNAQLRPDFYFRTCPPIFNIIGDTIVNELRTDPRIAASLLRLHFHDCFVRGCDASILLDNSTSFRTEKDAAPNKNSVRGFDVIDRMKAAIERACPRTVSCADIITIASQISVLLSGGPWWPVPLGRRDSVEAFFALANTALPSPFSTLTQLKTAFADVGLNRPSDLVALSGGHTFGKAQCQFVTPRLYNFNGTNRPDPSLNPTYLVELRRLCPQNGNGTVLVNFDSVTPTTFDRQYYTNLLNGKGLIQSDQVLFSTPGADTIPLVNQYSSNTFVFFGAFVDAMIRMGNLKPLTGTQGEIRQNCRVVNPRIRVVENDDGVVSSI

SEQ ID NO: 37904 - protein, 338 aa, Arabidopsis thaliana
  peptide (1)..(338): Ceres Seq. ID no. 12580523
  misc_feature (36)..(286): Pfam Name: Peroxidase Pfam Description: Peroxidase
  misc_feature (1)..(322): Homolog of NCBI NO: 480907 NR Description: peroxidase (EC 1.11.1.7) Cb - Arabidopsis
  misc_feature (1)..(322): Homolog of NCBI NO: 15229095 NR Description: peroxidase, putative
  misc_feature (1)..(322): Homolog of NCBI NO: 25453209 NR Description: Peroxidase 32 precursor (Atperox P32) (PRXR3)
  misc_feature (1)..(322): Homolog of NCBI NO: 30690396 NR Description: peroxidase, putative [Arabidopsis thaliana]
  misc_feature (1)..(322): Homolog of NCBI NO: 21592888 NR Description: peroxidase [Arabidopsis thaliana]
  misc_feature (19)..(324): Homolog of NCBI NO: 26398007 NR Description: Peroxidase E5
  misc_feature (1)..(338): Homolog of NCBI NO: 81653 NR Description: peroxidase (EC 1.11.1.7) E - Arabidopsis thaliana
  misc_feature (1)..(338): Homolog of NCBI NO: 15224496 NR Description: peroxidase
  misc_feature (1)..(338): Homolog of NCBI NO: 129812 NR Description: Peroxidase C3 precursor
  misc_feature (1)..(338): Homolog of NCBI NO: 15224497 NR Description: peroxidase, putative
MGALIVGCLLLQASNSNAQLRPDFYFRTCPPIFNIIGDTIVNELRTDPRIAASLLRLHFHDCFVRGCDASILLDNSTSFRTEKDAAPNKNSVRGFDVIDRMKAAIERACPRTVSCADIITIASQISVLLSGGPWWPVPLGRRDSVEAFFALANTALPSPFSTLTQLKTAFADVGLNRPSDLVALSGGHTFGKAQCQFVTPRLYNFNGTNRPDPSLNPTYLVELRRLCPQNGNGTVLVNFDSVTPTTFDRQYYTNLLNGKGLIQSDQVLFSTPGADTIPLVNQYSSNTFVFFGAFVDAMIRMGNLKPLTGTQGEIRQNCRVVNPRIRVVENDDGVVSSI

SEQ ID NO: 37905 - DNA, 1387 bp, Arabidopsis thaliana; identical to SEQ ID NO: 23698
  misc_feature (1)..(1387): Ceres Seq. ID no. 13486745
  misc_feature: MA Experiment ID: 108434 Result: Up-regulated in Transcription
  misc_feature: MA Experiment 108434 PARAMETER Experiment Name: At_Root_Tips_cDNA_P Parameter: Tissue Value: Root Tips
  misc_feature: MA Experiment ID: 108435 Result: Up-regulated in Transcription
  misc_feature: MA Experiment 108435 PARAMETER Experiment Name: At_stm_Mutants_cDNA_P Parameter: Plant Line Value: wt Landsburg vs stm
  misc_feature: MA Experiment 108435 PARAMETER Experiment Name: At_stm_Mutants_cDNA_P Parameter: Tissue Value: Shoot Apical Meristem Region
  misc_feature: MA Experiment ID: 108461 Result: Down-regulated in Transcription
  misc_feature: MA Experiment 108461 PARAMETER Experiment Name: At_Germinating_Seeds_cDNA_P Parameter: Age (day) Value: 1 vs. 0
  misc_feature: MA Experiment 108461 PARAMETER Experiment Name: At_Germinating_Seeds_cDNA_P Parameter: Tissue Value: Germinating Seeds
  misc_feature: MA Experiment ID: 108462 Result: Down-regulated in Transcription
  misc_feature: MA Experiment 108462 PARAMETER Experiment Name: At_Germinating_Seeds_cDNA_P Parameter: Age (day) Value: 2 vs. 0
  misc_feature: MA Experiment 108462 PARAMETER Experiment Name: At_Germinating_Seeds_cDNA_P Parameter: Tissue Value: Germinating Seeds
  misc_feature: MA Experiment ID: 108463 Result: Down-regulated in Transcription
  misc_feature: MA Experiment 108463 PARAMETER Experiment Name: At_Germinating_Seeds_cDNA_P Parameter: Age (day) Value: 3 vs. 0
  misc_feature: MA Experiment 108463 PARAMETER Experiment Name: At_Germinating_Seeds_cDNA_P Parameter: Tissue Value: Germinating Seeds
  misc_feature: MA Experiment ID: 108464 Result: Down-regulated in Transcription
  misc_feature: MA Experiment 108464 PARAMETER Experiment Name: At_Germinating_Seeds_cDNA_P Parameter: Age (day) Value: 4 vs. 0
  misc_feature: MA Experiment 108464 PARAMETER Experiment Name: At_Germinating_Seeds_cDNA_P Parameter: Tissue Value: Germinating Seeds
  misc_feature: MA Experiment ID: 108573 Result: Up-regulated in Transcription
  misc_feature: MA Experiment 108573 PARAMETER Experiment Name: At_Drought_cDNA_P Parameter: Timepoint (hr) Value: 6
  misc_feature: MA Experiment 108573 PARAMETER Experiment Name: At_Drought_cDNA_P Parameter: Tissue Value: Aerial
  misc_feature: MA Experiment 108573 PARAMETER Experiment Name: At_Drought_cDNA_P Parameter: Treatment Value: Drought vs. No Drought
  misc_feature: MA Experiment ID: 108585 Result: Up-regulated in Transcription
  misc_feature: MA Experiment 108585 PARAMETER Experiment Name: At_5mM_NaNP_cDNA_P Parameter: Timepoint (hr) Value: 6
  misc_feature: MA Experiment 108585 PARAMETER Experiment Name: At_5mM_NaNP_cDNA_P Parameter: Tissue Value: Aerial
  misc_feature: MA Experiment 108585 PARAMETER Experiment Name: At_5mM_NaNP_cDNA_P Parameter: Treatment Value: null
  misc_feature: MA Experiment ID: 20000093 Result: Up-regulated in Transcription
  misc_feature: MA Experiment 20000093 PARAMETER Experiment Name: At_42deg_Heat_cDNA_P Parameter: Temperature (deg C) Value: 42 vs. 22
  misc_feature: MA Experiment 20000093 PARAMETER Experiment Name: At_42deg_Heat_cDNA_P Parameter: Timepoint (hr) Value: 0.5
  misc_feature: MA Experiment 20000093 PARAMETER Experiment Name: At_42deg_Heat_cDNA_P Parameter: Tissue Value: Aerial
  misc_feature: MA Experiment ID: 20000111 Result: Up-regulated in Transcription
  misc_feature: MA Experiment 20000111 PARAMETER Experiment Name: At_42deg_Heat_cDNA_P Parameter: Temperature (deg C) Value: 42 vs. 22
  misc_feature: MA Experiment 20000111 PARAMETER Experiment Name: At_42deg_Heat_cDNA_P Parameter: Timepoint (hr) Value: 6
  misc_feature: MA Experiment 20000111 PARAMETER Experiment Name: At_42deg_Heat_cDNA_P Parameter: Tissue Value: Aerial
  misc_feature: MA Experiment ID: 20000112 Result: Up-regulated in Transcription
  misc_feature: MA Experiment 20000112 PARAMETER Experiment Name: At_42deg_Heat_cDNA_P Parameter: Temperature (deg C) Value: 42 vs. 22
  misc_feature: MA Experiment 20000112 PARAMETER Experiment Name: At_42deg_Heat_cDNA_P Parameter: Timepoint (hr) Value: 2
  misc_feature: MA Experiment 20000112 PARAMETER Experiment Name: At_42deg_Heat_cDNA_P Parameter: Tissue Value: Aerial
  misc_feature: MA Experiment ID: 20000113 Result: Up-regulated in Transcription
  misc_feature: MA Experiment 20000113 PARAMETER Experiment Name: At_42deg_Heat_cDNA_P Parameter: Temperature (deg C) Value: 42 vs. 22
  misc_feature: MA Experiment 20000113 PARAMETER Experiment Name: At_42deg_Heat_cDNA_P Parameter: Timepoint (hr) Value: 8
  misc_feature: MA Experiment 20000113 PARAMETER Experiment Name: At_42deg_Heat_cDNA_P Parameter: Tissue Value: Aerial
  misc_feature: MA Experiment ID: 20000144 Result: Up-regulated in Transcription
  misc_feature: MA Experiment 20000144 PARAMETER Experiment Name: At_42deg_Heat_cDNA_P Parameter: Temperature (deg C) Value: 42 vs. 22
  misc_feature: MA Experiment 20000144 PARAMETER Experiment Name: At_42deg_Heat_cDNA_P Parameter: Timepoint (hr) Value: 1
  misc_feature: MA Experiment 20000144 PARAMETER Experiment Name: At_42deg_Heat_cDNA_P Parameter: Tissue Value: Aerial
  misc_feature: MA Experiment ID: 20000179 Result: Down-regulated in Transcription
  misc_feature: MA Experiment 20000179 PARAMETER Experiment Name: At_Germinating_Seeds_P Parameter: Age (hr) Value: 6 vs. 0
  misc_feature: MA Experiment 20000179 PARAMETER Experiment Name: At_Germinating_Seeds_P Parameter: Tissue Value: Germinating Seeds
  misc_feature: MA Experiment ID: 20000180 Result: Down-regulated in Transcription
  misc_feature: MA Experiment 20000180 PARAMETER Experiment Name: At_Germinating_Seeds_P Parameter: Age (hr) Value: 24 vs. 0
  misc_feature: MA Experiment 20000180 PARAMETER Experiment Name: At_Germinating_Seeds_P Parameter: Tissue Value: Germinating Seeds

SEQ ID NO: 37906 - protein, 303 aa, Arabidopsis thaliana; identical to SEQ ID NO: 23699
  peptide (1)..(303): Ceres Seq. ID no. 13486746
  misc_feature (18)..(89): Pfam Name: RNA recognition motif. (a.k.a. RRM, RBD, or RNP domain) Pfam Description: RNA recognition motif. (a.k.a. RRM, RBD, or RNP
  misc_feature (18)..(89): Pfam Name: RNA recognition motif. (a.k.a. RRM, RBD, or RNP domain) Pfam Description: RNA recognition motif. (a.k.a. RRM, RBD, or RNP
  misc_feature (5)..(298): Homolog of NCBI NO: 29735276 NR Description: similar to 46kD arginine/serine-rich splicing
  misc_feature (5)..(279): Homolog of NCBI NO: 15055543 NR Description: Splicing factor, arginine/serine-rich, 46kD [Homo
  misc_feature (4)..(234): Homolog of NCBI NO: 4506899 NR Description: splicing factor, arginine/serine-rich 2 [Homo
  misc_feature (4)..(234): Homolog of NCBI NO: 6755478 NR Description: splicing factor, arginine/serine-rich 2
  misc_feature (4)..(234): Homolog of NCBI NO: 266991 NR Description: Splicing factor, arginine/serine-rich 2 (Splicing
  misc_feature (5)..(298): Homolog of NCBI NO: 29735276 NR Description: similar to 46kD arginine/serine-rich splicing
  misc_feature (4)..(234): Homolog of NCBI NO: 4506899 NR Description: splicing factor, arginine/serine-rich 2 [Homo
  misc_feature (4)..(234): Homolog of NCBI NO: 266991 NR Description: Splicing factor, arginine/serine-rich 2 (Splicing
  misc_feature (1)..(303): Homolog of NCBI NO: 15237641 NR Description: arginine/serine-rich splicing factor SC35
  misc_feature (1)..(303): Homolog of NCBI NO: 9843653 NR Description: splicing factor SC35 [Arabidopsis thaliana]
  misc_feature (1)..(280): Homolog of NCBI NO: 33146621 NR Description: putative splicing factor, arginine/serine-rich 2
  misc_feature (1)..(288): Homolog of NCBI NO: 7446336 NR Description: probable arginine/serine-rich splicing factor -
  misc_feature (4)..(216): Homolog of NCBI NO: 28279759 NR Description: Similar to splicing factor, arginine/serine-rich
  misc_feature (4)..(234): Homolog of NCBI NO: 6755478 NR Description: splicing factor, arginine/serine-rich 2
  misc_feature (5)..(279): Homolog of NCBI NO: 15055543 NR Description: Splicing factor, arginine/serine-rich, 46kD [Homo
  misc_feature (4)..(216): Homolog of NCBI NO: 28279759 NR Description: Similar to splicing factor, arginine/serine-rich
  misc_feature (1)..(288): Homolog of NCBI NO: 7446336 NR Description: probable arginine/serine-rich splicing factor -
  misc_feature (1)..(280): Homolog of NCBI NO: 33146621 NR Description: putative splicing factor, arginine/serine-rich 2
  misc_feature (1)..(303): Homolog of NCBI NO: 9843653 NR Description: splicing factor SC35 [Arabidopsis thaliana]
  misc_feature (1)..(303): Homolog of NCBI NO: 15237641 NR Description: arginine/serine-rich splicing factor SC35

SEQ ID NO: 37907 - DNA, 1539 bp, Arabidopsis thaliana
  misc_feature (1)..(1539): Ceres Seq. ID no. 13487911
  misc_feature: MA Experiment ID: 108462 Result: Up-regulated in Transcription
  misc_feature: MA Experiment 108462 PARAMETER Experiment Name: At_Germinating_Seeds_cDNA_P Parameter: Age (day) Value: 2 vs. 0
  misc_feature: MA Experiment 108462 PARAMETER Experiment Name: At_Germinating_Seeds_cDNA_P Parameter: Tissue Value: Germinating Seeds
  misc_feature: MA Experiment ID: 108463 Result: Up-regulated in Transcription
  misc_feature: MA Experiment 108463 PARAMETER Experiment Name: At_Germinating_Seeds_cDNA_P Parameter: Age (day) Value: 3 vs. 0
  misc_feature: MA Experiment 108463 PARAMETER Experiment Name: At_Germinating_Seeds_cDNA_P Parameter: Tissue Value: Germinating Seeds
  misc_feature: MA Experiment ID: 108464 Result: Up-regulated in Transcription
  misc_feature: MA Experiment 108464 PARAMETER Experiment Name: At_Germinating_Seeds_cDNA_P Parameter: Age (day) Value: 4 vs. 0
  misc_feature: MA Experiment 108464 PARAMETER Experiment Name: At_Germinating_Seeds_cDNA_P Parameter: Tissue Value: Germinating Seeds
  misc_feature: MA Experiment ID: 108577 Result: Down-regulated in Transcription
  misc_feature: MA Experiment 108577 PARAMETER Experiment Name: At_42deg_Heat_cDNA_P Parameter: Temperature (deg C) Value: 42 vs. 22
  misc_feature: MA Experiment 108577 PARAMETER Experiment Name: At_42deg_Heat_cDNA_P Parameter: Timepoint (hr) Value: 6
  misc_feature: MA Experiment 108577 PARAMETER Experiment Name: At_42deg_Heat_cDNA_P Parameter: Tissue Value: Aerial
  misc_feature: MA Experiment ID: 108595 Result: Down-regulated in Transcription
  misc_feature: MA Experiment 108595 PARAMETER Experiment Name: At_Ler-pi_Ovule_cDNA_P Parameter: Plant Line Value: null
  misc_feature: MA Experiment ID: 20000113 Result: Down-regulated in Transcription
  misc_feature: MA Experiment 20000113 PARAMETER Experiment Name: At_42deg_Heat_cDNA_P Parameter: Temperature (deg C) Value: 42 vs. 22
  misc_feature: MA Experiment 20000113 PARAMETER Experiment Name: At_42deg_Heat_cDNA_P Parameter: Timepoint (hr) Value: 8
  misc_feature: MA Experiment 20000113 PARAMETER Experiment Name: At_42deg_Heat_cDNA_P Parameter: Tissue Value: Aerial
  misc_feature: MA Experiment ID: 20000179 Result: Down-regulated in Transcription
  misc_feature: MA Experiment 20000179 PARAMETER Experiment Name: At_Germinating_Seeds_P Parameter: Age (hr) Value: 6 vs. 0
  misc_feature: MA Experiment 20000179 PARAMETER Experiment Name: At_Germinating_Seeds_P Parameter: Tissue Value: Germinating Seeds
  misc_feature: MA Experiment ID: 20000184 Result: Up-regulated in Transcription
  misc_feature: MA Experiment 20000184 PARAMETER Experiment Name: At_Shoots__P Parameter: Age (day) Value: 7
  misc_feature: MA Experiment 20000184 PARAMETER Experiment Name: At_Shoots__P Parameter: Tissue Value: Shoots vs. Whole Plant
  misc_feature: MA Experiment ID: 20000185 Result: Down-regulated in Transcription
  misc_feature: MA Experiment 20000185 PARAMETER Experiment Name: At_Roots__P Parameter: Age (day) Value: 7 vs. 21
  misc_feature: MA Experiment 20000185 PARAMETER Experiment Name: At_Roots__P Parameter: Organism Value: A. thaliana
  misc_feature: MA Experiment 20000185 PARAMETER Experiment Name: At_Roots__P Parameter: Tissue Value: Roots vs. Whole Plant
  misc_feature: MA Experiment ID: 20000438 Result: Up-regulated in Transcription
  misc_feature: MA Experiment 20000438 PARAMETER Experiment Name: At_Shoots__P Parameter: Age (day) Value: 14
  misc_feature: MA Experiment 20000438 PARAMETER Experiment Name: At_Shoots__P Parameter: Tissue Value: Shoots vs. Whole Plant
  misc_feature: MA Experiment ID: 20000439 Result: Down-regulated in Transcription
  misc_feature: MA Experiment 20000439 PARAMETER Experiment Name: At_Roots__P Parameter: Age (day) Value: 14 vs. 21
  misc_feature: MA Experiment 20000439 PARAMETER Experiment Name: At_Roots__P Parameter: Organism Value: A. thaliana
  misc_feature: MA Experiment 20000439 PARAMETER Experiment Name: At_Roots__P Parameter: Tissue Value: Roots vs. Whole Plant
  misc_feature: MA Experiment ID: 20000573 Result: Down-regulated in Transcription
  misc_feature: MA Experiment 20000573 PARAMETER Experiment Name: At_100uM_ABA_Mutants__P Parameter: Organism Value: A. thaliana
  misc_feature: MA Experiment 20000573 PARAMETER Experiment Name: At_100uM_ABA_Mutants__P Parameter: Plant Line Value: CS22 vs. Ler wt
  misc_feature: MA Experiment 20000573 PARAMETER Experiment Name: At_100uM_ABA_Mutants__P Parameter: Timepoint (hr) Value: N/A
  misc_feature: MA Experiment 20000573 PARAMETER Experiment Name: At_100uM_ABA_Mutants__P Parameter: Tissue Value: Whole Plant
  misc_feature: MA Experiment 20000573 PARAMETER Experiment Name: At_100uM_ABA_Mutants__P Parameter: Treatment Value: None
  misc_feature: MA Experiment ID: 20000574 Result: Down-regulated in Transcription
  misc_feature: MA Experiment 20000574 PARAMETER Experiment Name: At_100uM_ABA_Mutants__P Parameter: Organism Value: A. thaliana
  misc_feature: MA Experiment 20000574 PARAMETER Experiment Name: At_100uM_ABA_Mutants__P Parameter: Plant Line Value: CS23 vs. Ler wt
  misc_feature: MA Experiment 20000574 PARAMETER Experiment Name: At_100uM_ABA_Mutants__P Parameter: Timepoint (hr) Value: N/A
  misc_feature: MA Experiment 20000574 PARAMETER Experiment Name: At_100uM_ABA_Mutants__P Parameter: Tissue Value: Whole Plant
  misc_feature: MA Experiment 20000574 PARAMETER Experiment Name: At_100uM_ABA_Mutants__P Parameter: Treatment Value: None
  misc_feature: MA Experiment ID: 20001248 Result: Down-regulated in Transcription
  misc_feature: MA Experiment 20001248 PARAMETER Experiment Name: At_Far-red-induction_P Parameter: Age (day) Value: 7
  misc_feature: MA Experiment 20001248 PARAMETER Experiment Name: At_Far-red-induction_P Parameter: Light Value: Far-red vs. White
  misc_feature: MA Experiment 20001248 PARAMETER Experiment Name: At_Far-red-induction_P Parameter: Organism Value: A. thaliana
  misc_feature: MA Experiment 20001248 PARAMETER Experiment Name: At_Far-red-induction_P Parameter: Plant Line Value: Columbia
  misc_feature: MA Experiment 20001248 PARAMETER Experiment Name: At_Far-red-induction_P Parameter: Timepoint (hr) Value: 4
  misc_feature: MA Experiment 20001248 PARAMETER Experiment Name: At_Far-red-induction_P Parameter: Tissue Value: Whole Plant
  misc_feature: MA Experiment ID: 20001559 Result: Down-regulated in Transcription
  misc_feature: MA Experiment 20001559 PARAMETER Experiment Name: At_Drought_Soil_Dry_P Parameter: Age (day) Value: 28
  misc_feature: MA Experiment 20001559 PARAMETER Experiment Name: At_Drought_Soil_Dry_P Parameter: Organism Value: A. thaliana
  misc_feature: MA Experiment 20001559 PARAMETER Experiment Name: At_Drought_Soil_Dry_P Parameter: Plant Line Value: WS
  misc_feature: MA Experiment 20001559 PARAMETER Experiment Name: At_Drought_Soil_Dry_P Parameter: Post Timepoint (hr) Value: 29
  misc_feature: MA Experiment 20001559 PARAMETER Experiment Name: At_Drought_Soil_Dry_P Parameter: Post-Treatment Value: Re-Water vs. No Drought
  misc_feature: MA Experiment 20001559 PARAMETER Experiment Name: At_Drought_Soil_Dry_P Parameter: Timepoint (day) Value: 14
  misc_feature: MA Experiment 20001559 PARAMETER Experiment Name: At_Drought_Soil_Dry_P Parameter: Treatment Value: Drought vs. No Drought
  misc_feature: MA Experiment ID: 20001905 Result: Down-regulated in Transcription
  misc_feature: MA Experiment 20001905 PARAMETER Experiment Name: At_Drought_Reproduction_P Parameter: Age (day) Value: 40
  misc_feature: MA Experiment 20001905 PARAMETER Experiment Name: At_Drought_Reproduction_P Parameter: Organism Value: A. thaliana
  misc_feature: MA Experiment 20001905 PARAMETER Experiment Name: At_Drought_Reproduction_P Parameter: Plant Line Value: WS
  misc_feature: MA Experiment 20001905 PARAMETER Experiment Name: At_Drought_Reproduction_P Parameter: Timepoint (day) Value: 10
  misc_feature: MA Experiment 20001905 PARAMETER Experiment Name: At_Drought_Reproduction_P Parameter: Tissue Value: Rosettes
  misc_feature: MA Experiment 20001905 PARAMETER Experiment Name: At_Drought_Reproduction_P Parameter: Treatment Value: Drought vs. No Drought
  misc_feature: MA Experiment ID: 20001906 Result: Down-regulated in Transcription
  misc_feature: MA Experiment 20001906 PARAMETER Experiment Name: At_Drought_Reproduction_P Parameter: Age (day) Value: 35
  misc_feature: MA Experiment 20001906 PARAMETER Experiment Name: At_Drought_Reproduction_P Parameter: Organism Value: A. thaliana
  misc_feature: MA Experiment 20001906 PARAMETER Experiment Name: At_Drought_Reproduction_P Parameter: Plant Line Value: WS
  misc_feature: MA Experiment 20001906 PARAMETER Experiment Name: At_Drought_Reproduction_P Parameter: Timepoint (day) Value: 5
  misc_feature: MA Experiment 20001906 PARAMETER Experiment Name: At_Drought_Reproduction_P Parameter: Tissue Value: Siliques
  misc_feature: MA Experiment 20001906 PARAMETER Experiment Name: At_Drought_Reproduction_P Parameter: Treatment Value: Drought vs. No Drought
  misc_feature: MA Experiment ID: 20001908 Result: Down-regulated in Transcription
  misc_feature: MA Experiment 20001908 PARAMETER Experiment Name: At_Drought_Reproduction_P Parameter: Age (day) Value: 40
  misc_feature: MA Experiment 20001908 PARAMETER Experiment Name: At_Drought_Reproduction_P Parameter: Organism Value: A. thaliana
  misc_feature: MA Experiment 20001908 PARAMETER Experiment Name: At_Drought_Reproduction_P Parameter: Plant Line Value: WS
  misc_feature: MA Experiment 20001908 PARAMETER Experiment Name: At_Drought_Reproduction_P Parameter: Timepoint (day) Value: 10
  misc_feature: MA Experiment 20001908 PARAMETER Experiment Name: At_Drought_Reproduction_P Parameter: Tissue Value: Siliques
  misc_feature: MA Experiment 20001908 PARAMETER Experiment Name: At_Drought_Reproduction_P Parameter: Treatment Value: Drought vs. No Drought
aatcaaaccttaggaagagccatgggtgaagaagctatagttctgtatcctgcaccaccaataggtcacttagtgtccatggttgagttaggtaaaaccatcctctccaaaaacccatctctctccatccacattatcttagttccaccgccttatcagccggaatcaaccgccacttacatctcctccgtctcctcctccttcccttcaataaccttccaccatcttcccgccgtcacaccgtactcctcctcctccacctctcgccaccaccacgaatctctcctcctagagatcctctgttttagcaacccaagtgtccaccgaactcttttctcactctctcggaatttcaatgtccgagcaatgatcatcgatttcttctgcaccgccgttttagacatcaccgctgacttcacgttcccggtttacttcttctacacctctggagccgcatgtctcgccttttccttctatctcccgaccatcgacgaaacaacccccggaaaaaacctcaaagacattcctacagttcatatccccggcgttcctccgatgaagggctccgatatgcctaaggcggtgctcgaacgagacgatgaggtctacgatgtttttataatgttcggtaaacagctctcgaagtcgtcagggattattatcaatacgtttgatgctttagaaaacagagccatcaaggccataacagaggagctctgttttcgcaatatttatccaattggaccgctcattgtaaacggaagaatcgaagatagaaacgacaacaaggcagtttcttgtctcaattggctggattcgcagccggaaaagagtgttgtgtttctctgttttggaagcttaggtttgttctcaaaagaacaggtgatagagattgctgttggtttagagaaaagtgggcagagattcttgtgggtggtccgtaatccacccgagttagaaaagacagaactggatttgaaatcactcttaccagaaggattcttaagccgaaccgaagacaaagggatggtcgtgaaatcatgggctccgcaagttccggttctgaatcataaagcagtcgggggattcgtcactcattgcggttggaattcaattcttgaagctgtttgtgctggtgtgccgatggtggcttggccgttgtacgctgagcagaggtttaatagagtgatgattgtggatgagatcaagattgcgatttcgatgaatgaatcagagacgggtttcgtgagctctacagaggtggagaaacgagtccaagagataattggggagtgtccggttagggagcgaaccatggctatgaagaacgcagccgaattagccttgacagaaactggttcgtctcataccgcattaactactttactccagtcgtggagcccaaagtgatctttgaaattaagtcttgcatcaattaataactttgtagtctctcagaatcatgtctttgggggttattcgttttactagttcaaagttatgtctctgagaccgcagatggaaagaacaatttatacc

SEQ ID NO: 37908 - protein, 469 aa, Arabidopsis thaliana
  peptide (1)..(469): Ceres Seq. ID no. 13487912
  misc_feature (12)..(469): Pfam Name: UDP-glucoronosyl and UDP-glucosyl transferase Pfam Description: UDP-glucoronosyl and UDP-glucosyl transferase
  misc_feature (98)..(417): Homolog of NCBI NO: 17484017 NR Description: UDP-glycosyltransfersase [Jatropha curcas]
  misc_feature (14)..(466): Homolog of NCBI NO: 34910208 NR Description: putative flavonol glucosyltransferase
  misc_feature (10)..(464): Homolog of NCBI NO: 34910204 NR Description: putative flavonol glucosyltransferase
  misc_feature (10)..(466): Homolog of NCBI NO: 19911193 NR Description: glucosyltransferase-5 [Vigna angularis]
  misc_feature (8)..(466): Homolog of NCBI NO: 19911189 NR Description: glucosyltransferase-3 [Vigna angularis]
  misc_feature (13)..(466): Homolog of NCBI NO: 22535568 NR Description: putative glucosyltransferase
  misc_feature (8)..(452): Homolog of NCBI NO: 30684106 NR Description: glycosyltransferase family [Arabidopsis thaliana]
  misc_feature (8)..(452): Homolog of NCBI NO: 18401155 NR Description: glycosyltransferase family [Arabidopsis thaliana]
  misc_feature (8)..(469): Homolog of NCBI NO: 21593785 NR Description: putative glucosyltransferase [Arabidopsis
  misc_feature (8)..(469): Homolog of NCBI NO: 18401158 NR Description: glycosyltransferase family [Arabidopsis thaliana]
NQTLGRAMGEEAIVLYPAPPIGHLVSMVELGKTILSKNPSLSIHIILVPPPYQPESTATYISSVSSSFPSITFHHLPAVTPYSSSSTSRHHHESLLLEILCFSNPSVHRTLFSLSRNFNVRAMIIDFFCTAVLDITADFTFPVYFFYTSGAACLAFSFYLPTIDETTPGKNLKDIPTVHIPGVPPMKGSDMPKAVLERDDEVYDVFIMFGKQLSKSSGIIINTFDALENRAIKAITEELCFRNIYPIGPLIVNGRIEDRNDNKAVSCLNWLDSQPEKSVVFLCFGSLGLFSKEQVIEIAVGLEKSGQRFLWVVRNPPELEKTELDLKSLLPEGFLSRTEDKGMVVKSWAPQVPVLNHKAVGGFVTHCGWNSILEAVCAGVPMVAWPLYAEQRFNRVMIVDEIKIAISMNESETGFVSSTEVEKRVQEIIGECPVRERTMAMKNAAELALTETGSSHTALTTLLQSWSPK

SEQ ID NO: 37909 - protein, 462 aa, Arabidopsis thaliana
  peptide (1)..(462): Ceres Seq. ID no. 13487913
  misc_feature (5)..(462): Pfam Name: UDP-glucoronosyl and UDP-glucosyl transferase Pfam Description: UDP-glucoronosyl and UDP-glucosyl transferase
  misc_feature (91)..(410): Homolog of NCBI NO: 17484017 NR Description: UDP-glycosyltransfersase [Jatropha curcas]
  misc_feature (7)..(459): Homolog of NCBI NO: 34910208 NR Description: putative flavonol glucosyltransferase
  misc_feature (3)..(457): Homolog of NCBI NO: 34910204 NR Description: putative flavonol glucosyltransferase
  misc_feature (3)..(459): Homolog of NCBI NO: 19911193 NR Description: glucosyltransferase-5 [Vigna angularis]
  misc_feature (1)..(459): Homolog of NCBI NO: 19911189 NR Description: glucosyltransferase-3 [Vigna angularis]
  misc_feature (6)..(459): Homolog of NCBI NO: 22535568 NR Description: putative glucosyltransferase
  misc_feature (1)..(445): Homolog of NCBI NO: 30684106 NR Description: glycosyltransferase family [Arabidopsis thaliana]
  misc_feature (1)..(445): Homolog of NCBI NO: 18401155 NR Description: glycosyltransferase family [Arabidopsis thaliana]
  misc_feature (1)..(462): Homolog of NCBI NO: 21593785 NR Description: putative glucosyltransferase [Arabidopsis
  misc_feature (1)..(462): Homolog of NCBI NO: 18401158 NR Description: glycosyltransferase family [Arabidopsis thaliana]
MGEEAIVLYPAPPIGHLVSMVELGKTILSKNPSLSIHIILVPPPYQPESTATYISSVSSSFPSITFHHLPAVTPYSSSSTSRHHHESLLLEILCFSNPSVHRTLFSLSRNFNVRAMIIDFFCTAVLDITADFTFPVYFFYTSGAACLAFSFYLPTIDETTPGKNLKDIPTVHIPGVPPMKGSDMPKAVLERDDEVYDVFIMFGKQLSKSSGIIINTFDALENRAIKAITEELCFRNIYPIGPLIVNGRIEDRNDNKAVSCLNWLDSQPEKSVVFLCFGSLGLFSKEQVIEIAVGLEKSGQRFLWVVRNPPELEKTELDLKSLLPEGFLSRTEDKGMVVKSWAPQVPVLNHKAVGGFVTHCGWNSILEAVCAGVPMVAWPLYAEQRFNRVMIVDEIKIAISMNESETGFVSSTEVEKRVQEIIGECPVRERTMAMKNAAELALTETGSSHTALTTLLQSWSPK

SEQ ID NO: 37910 - protein, 443 aa, Arabidopsis thaliana
  peptide (1)..(443): Ceres Seq. ID no. 13487914
  misc_feature (1)..(443): Pfam Name: UDP-glucoronosyl and UDP-glucosyl transferase Pfam Description: UDP-glucoronosyl and UDP-glucosyl transferase
  misc_feature (72)..(391): Homolog of NCBI NO: 17484017 NR Description: UDP-glycosyltransfersase [Jatropha curcas]
  misc_feature (1)..(440): Homolog of NCBI NO: 34910208 NR Description: putative flavonol glucosyltransferase
  misc_feature (1)..(438): Homolog of NCBI NO: 34910204 NR Description: putative flavonol glucosyltransferase
  misc_feature (1)..(440): Homolog of NCBI NO: 19911193 NR Description: glucosyltransferase-5 [Vigna angularis]
  misc_feature (1)..(440): Homolog of NCBI NO: 19911189 NR Description: glucosyltransferase-3 [Vigna angularis]
  misc_feature (1)..(440): Homolog of NCBI NO: 22535568 NR Description: putative glucosyltransferase
  misc_feature (1)..(426): Homolog of NCBI NO: 30684106 NR Description: glycosyltransferase family [Arabidopsis thaliana]
  misc_feature (1)..(426): Homolog of NCBI NO: 18401155 NR Description: glycosyltransferase family [Arabidopsis thaliana]
  misc_feature (1)..(443): Homolog of NCBI NO: 21593785 NR Description: putative glucosyltransferase [Arabidopsis
  misc_feature (1)..(443): Homolog of NCBI NO: 18401158 NR Description: glycosyltransferase family [Arabidopsis thaliana]
MVELGKTILSKNPSLSIHIILVPPPYQPESTATYISSVSSSFPSITFHHLPAVTPYSSSSTSRHHHESLLLEILCFSNPSVHRTLFSLSRNFNVRAMIIDFFCTAVLDITADFTFPVYFFYTSGAACLAFSFYLPTIDETTPGKNLKDIPTVHIPGVPPMKGSDMPKAVLERDDEVYDVFIMFGKQLSKSSGIIINTFDALENRAIKAITEELCFRNIYPIGPLIVNGRIEDRNDNKAVSCLNWLDSQPEKSVVFLCFGSLGLFSKEQVIEIAVGLEKSGQRFLWVVRNPPELEKTELDLKSLLPEGFLSRTEDKGMVVKSWAPQVPVLNHKAVGGFVTHCGWNSILEAVCAGVPMVAWPLYAEQRFNRVMIVDEIKIAISMNESETGFVSSTEVEKRVQEIIGECPVRERTMAMKNAAELALTETGSSHTALTTLLQSWSPK

SEQ ID NO: 37911 - DNA, 1856 bp, Arabidopsis thaliana
  misc_feature (1)..(1856): Ceres Seq. ID no. 12324698
  misc_feature: MA Experiment ID: 108434 Result: Up-regulated in Transcription
  misc_feature: MA Experiment 108434 PARAMETER Experiment Name: At_Root_Tips_cDNA_P Parameter: Tissue Value: Root Tips
  misc_feature: MA Experiment ID: 108464 Result: Up-regulated in Transcription
  misc_feature: MA Experiment 108464 PARAMETER Experiment Name: At_Germinating_Seeds_cDNA_P Parameter: Age (day) Value: 4 vs. 0
  misc_feature: MA Experiment 108464 PARAMETER Experiment Name: At_Germinating_Seeds_cDNA_P Parameter: Tissue Value: Germinating Seeds
  misc_feature: MA Experiment ID: 20000069 Result: Down-regulated in Transcription
  misc_feature: MA Experiment 20000069 PARAMETER Experiment Name: At_100uM_ABA_Mutants_cDNA_P Parameter: Plant Line Value: CS23
  misc_feature: MA Experiment 20000069 PARAMETER Experiment Name: At_100uM_ABA_Mutants_cDNA_P Parameter: Timepoint (hr) Value: 6
  misc_feature: MA Experiment 20000069 PARAMETER Experiment Name: At_100uM_ABA_Mutants_cDNA_P Parameter: Tissue Value: Aerial
  misc_feature: MA Experiment 20000069 PARAMETER Experiment Name: At_100uM_ABA_Mutants_cDNA_P Parameter: Treatment Value: 100uM ABA vs. No Treatment
  misc_feature: MA Experiment ID: 20000087 Result: Down-regulated in Transcription
  misc_feature: MA Experiment 20000087 PARAMETER Experiment Name: At_100uM_ABA_Mutants_cDNA_P Parameter: Plant Line Value: WS
  misc_feature: MA Experiment 20000087 PARAMETER Experiment Name: At_100uM_ABA_Mutants_cDNA_P Parameter: Timepoint (hr) Value: 6
  misc_feature: MA Experiment 20000087 PARAMETER Experiment Name: At_100uM_ABA_Mutants_cDNA_P Parameter: Tissue Value: Aerial
  misc_feature: MA Experiment 20000087 PARAMETER Experiment Name: At_100uM_ABA_Mutants_cDNA_P Parameter: Treatment Value: 100uM ABA vs. No Treatment
  misc_feature: MA Experiment ID: 20000089 Result: Down-regulated in Transcription
  misc_feature: MA Experiment ID: 20000111 Result: Down-regulated in Transcription
  misc_feature: MA Experiment 20000111 PARAMETER Experiment Name: At_42deg_Heat_cDNA_P Parameter: Temperature (deg C) Value: 42 vs. 22
  misc_feature: MA Experiment 20000111 PARAMETER Experiment Name: At_42deg_Heat_cDNA_P Parameter: Timepoint (hr) Value: 6
  misc_feature: MA Experiment 20000111 PARAMETER Experiment Name: At_42deg_Heat_cDNA_P Parameter: Tissue Value: Aerial
  misc_feature: MA Experiment ID: 20000112 Result: Down-regulated in Transcription
  misc_feature: MA Experiment 20000112 PARAMETER Experiment Name: At_42deg_Heat_cDNA_P Parameter: Temperature (deg C) Value: 42 vs. 22
  misc_feature: MA Experiment 20000112 PARAMETER Experiment Name: At_42deg_Heat_cDNA_P Parameter: Timepoint (hr) Value: 2
  misc_feature: MA Experiment 20000112 PARAMETER Experiment Name: At_42deg_Heat_cDNA_P Parameter: Tissue Value: Aerial
  misc_feature: MA Experiment ID: 20000113 Result: Down-regulated in Transcription
  misc_feature: MA Experiment 20000113 PARAMETER Experiment Name: At_42deg_Heat_cDNA_P Parameter: Temperature (deg C) Value: 42 vs. 22
  misc_feature: MA Experiment 20000113 PARAMETER Experiment Name: At_42deg_Heat_cDNA_P Parameter: Timepoint (hr) Value: 8
  misc_feature: MA Experiment 20000113 PARAMETER Experiment Name: At_42deg_Heat_cDNA_P Parameter: Tissue Value: Aerial
  misc_feature: MA Experiment ID: 20000117 Result: Down-regulated in Transcription
  misc_feature: MA Experiment 20000117 PARAMETER Experiment Name: At_100uM_ABA_Mutants_cDNA_P Parameter: Plant Line Value: Columbia
  misc_feature: MA Experiment 20000117 PARAMETER Experiment Name: At_100uM_ABA_Mutants_cDNA_P Parameter: Timepoint (hr) Value: 6
  misc_feature: MA Experiment 20000117 PARAMETER Experiment Name: At_100uM_ABA_Mutants_cDNA_P Parameter: Tissue Value: Aerial
  misc_feature: MA Experiment 20000117 PARAMETER Experiment Name: At_100uM_ABA_Mutants_cDNA_P Parameter: Treatment Value: 100uM ABA vs. No Treatment
  misc_feature: MA Experiment ID: 20000144 Result: Down-regulated in Transcription
  misc_feature: MA Experiment 20000144 PARAMETER Experiment Name: At_42deg_Heat_cDNA_P Parameter: Temperature (deg C) Value: 42 vs. 22
  misc_feature: MA Experiment 20000144 PARAMETER Experiment Name: At_42deg_Heat_cDNA_P Parameter: Timepoint (hr) Value: 1
  misc_feature: MA Experiment 20000144 PARAMETER Experiment Name: At_42deg_Heat_cDNA_P Parameter: Tissue Value: Aerial
  misc_feature: MA Experiment ID: 20000173 Result: Down-regulated in Transcription
  misc_feature: MA Experiment 20000173 PARAMETER Experiment Name: At_42deg_Heat_P Parameter: Age (day) Value: 14
  misc_feature: MA Experiment 20000173 PARAMETER Experiment Name: At_42deg_Heat_P Parameter: Organism Value: A. thaliana
  misc_feature: MA Experiment 20000173 PARAMETER Experiment Name: At_42deg_Heat_P Parameter: Plant Line Value: WS
  misc_feature: MA Experiment 20000173 PARAMETER Experiment Name: At_42deg_Heat_P Parameter: Temperature (deg C) Value: 42 vs. 22
  misc_feature: MA Experiment 20000173 PARAMETER Experiment Name: At_42deg_Heat_P Parameter: Timepoint (hr) Value: 6
  misc_feature: MA Experiment 20000173 PARAMETER Experiment Name: At_42deg_Heat_P Parameter: Tissue Value: Aerial
  misc_feature: MA Experiment ID: 20000184 Result: Up-regulated in Transcription
  misc_feature: MA Experiment 20000184 PARAMETER Experiment Name: At_Shoots__P Parameter: Age (day) Value: 7
  misc_feature: MA Experiment 20000184 PARAMETER Experiment Name: At_Shoots__P Parameter: Tissue Value: Shoots vs. Whole Plant
  misc_feature: MA Experiment ID: 20000265 Result: Down-regulated in Transcription
  misc_feature: MA Experiment 20000265 PARAMETER Experiment Name: At_Open_Flower_P Parameter: Age (day) Value: 21
  misc_feature: MA Experiment 20000265 PARAMETER Experiment Name: At_Open_Flower_P Parameter: Plant Line Value: WS
  misc_feature: MA Experiment 20000265 PARAMETER Experiment Name: At_Open_Flower_P Parameter: Tissue Value: Closed Flower vs. Whole Plant
  misc_feature: MA Experiment ID: 20000286 Result: Down-regulated in Transcription
  misc_feature: MA Experiment 20000286 PARAMETER Experiment Name: At_Open_Flower_P Parameter: Age (day) Value: 21
  misc_feature: MA Experiment 20000286 PARAMETER Experiment Name: At_Open_Flower_P Parameter: Plant Line Value: WS
  misc_feature: MA Experiment 20000286 PARAMETER Experiment Name: At_Open_Flower_P Parameter: Tissue Value: Half Open vs. Whole Plant
  misc_feature: MA Experiment ID: 20000439 Result: Down-regulated in Transcription
  misc_feature: MA Experiment 20000439 PARAMETER Experiment Name: At_Roots__P Parameter: Age (day) Value: 14 vs. 21
  misc_feature: MA Experiment 20000439 PARAMETER Experiment Name: At_Roots__P Parameter: Organism Value: A. thaliana
  misc_feature: MA Experiment 20000439 PARAMETER Experiment Name: At_Roots__P Parameter: Tissue Value: Roots vs. Whole Plant
  misc_feature: MA Experiment ID: 20000794 Result: Down-regulated in Transcription
  misc_feature: MA Experiment 20000794 PARAMETER Experiment Name: At_Petals_P Parameter: Age (day) Value: 23-25 days
  misc_feature: MA Experiment 20000794 PARAMETER Experiment Name: At_Petals_P Parameter: Plant Line Value: WS
  misc_feature: MA Experiment 20000794 PARAMETER Experiment Name: At_Petals_P Parameter: Tissue Value: Petals vs. Whole plant
  misc_feature: MA Experiment ID: 20001248 Result: Down-regulated in Transcription
  misc_feature: MA Experiment 20001248 PARAMETER Experiment Name: At_Far-red-induction_P Parameter: Age (day) Value: 7
  misc_feature: MA Experiment 20001248 PARAMETER Experiment Name: At_Far-red-induction_P Parameter: Light Value: Far-red vs. White
  misc_feature: MA Experiment 20001248 PARAMETER Experiment Name: At_Far-red-induction_P Parameter: Organism Value: A. thaliana
  misc_feature: MA Experiment 20001248 PARAMETER Experiment Name: At_Far-red-induction_P Parameter: Plant Line Value: Columbia
  misc_feature: MA Experiment 20001248 PARAMETER Experiment Name: At_Far-red-induction_P Parameter: Timepoint (hr) Value: 4
  misc_feature: MA Experiment 20001248 PARAMETER Experiment Name: At_Far-red-induction_P Parameter: Tissue Value: Whole Plant
  misc_feature: MA Experiment ID: 20001557 Result: Up-regulated in Transcription
  misc_feature: MA Experiment 20001557 PARAMETER Experiment Name: At_Drought_Soil_Dry_P Parameter: Age (day) Value: 27
  misc_feature: MA Experiment 20001557 PARAMETER Experiment Name: At_Drought_Soil_Dry_P Parameter: Organism Value: A. thaliana
  misc_feature: MA Experiment 20001557 PARAMETER Experiment Name: At_Drought_Soil_Dry_P Parameter: Plant Line Value: WS
  misc_feature: MA Experiment 20001557 PARAMETER Experiment Name: At_Drought_Soil_Dry_P Parameter: Post Timepoint (hr) Value: 3
  misc_feature: MA Experiment 20001557 PARAMETER Experiment Name: At_Drought_Soil_Dry_P Parameter: Post-Treatment Value: Re-Water vs. No Drought
  misc_feature: MA Experiment 20001557 PARAMETER Experiment Name: At_Drought_Soil_Dry_P Parameter: Timepoint (day) Value: 13
  misc_feature: MA Experiment 20001557 PARAMETER Experiment Name: At_Drought_Soil_Dry_P Parameter: Treatment Value: Drought vs. No Drought
  misc_feature: MA Experiment ID: 20001558 Result: Up-regulated in Transcription
  misc_feature: MA Experiment 20001558 PARAMETER Experiment Name: At_Drought_Soil_Dry_P Parameter: Age (day) Value: 27
  misc_feature: MA Experiment 20001558 PARAMETER Experiment Name: At_Drought_Soil_Dry_P Parameter: Organism Value: A. thaliana
  misc_feature: MA Experiment 20001558 PARAMETER Experiment Name: At_Drought_Soil_Dry_P Parameter: Plant Line Value: WS
  misc_feature: MA Experiment 20001558 PARAMETER Experiment Name: At_Drought_Soil_Dry_P Parameter: Post Timepoint (hr) Value: 6
  misc_feature: MA Experiment 20001558 PARAMETER Experiment Name: At_Drought_Soil_Dry_P Parameter: Post-Treatment Value: Re-Water vs. No Drought
  misc_feature: MA Experiment 20001558 PARAMETER Experiment Name: At_Drought_Soil_Dry_P Parameter: Timepoint (day) Value: 13
  misc_feature: MA Experiment 20001558 PARAMETER Experiment Name: At_Drought_Soil_Dry_P Parameter: Treatment Value: Drought vs. No Drought
aaatcataaaaacacaagttttcgacagatcaactgttttcttcattacgtgttcttcaatggcgtcacttcactgattctattcctatcaaagccacttacccatttccttttatatgcacaaattctcataaagttttcatttttattccatttttctcggaagccatggaagctgctaatgagcctgttaatggcggatccgtacagatccgaacagagaacaacgaaagacgaaagcttcctaatttcttacaaagcgtcaacatgaaatacgtcaagctaggttatcattacctcattactcatctcttcaagctctgtttggttccattaatggcggttttagtcacagagacctctcgattaacaacagacgatctttaccagatttggcttcatctccaatacaatctcgttgctttcatctttctctctgctttagctatctttggctccaccgtttacatcatgagtcgtcccagatctgtttatctcgttgattactcttgttatcttcctccggagagtcttcaggttaagtatcagaagtttatggatcattctaagttgattgaagatttcaatgagtcatctttagagtttcagaggaagattcttgaacgttctggtttaggagaagagacttatctccctgaagctttacattgtatccctccgaggcctacgatgatggcggctcgtgaggaatctgagcaggtaatgtttggtgctcttgataagcttttcgagaataccaagattaaccctagggatattggtgtgttggttgtgaattgtagcttgtttaatcctacaccttcgttgtcagctatgattgttaacaagtataagcttagagggaatgttaagagttttaaccttggtggaatggggtgtagtgctggtgttatctctatcgatttagctaaagatatgttgcaagttcataggaatacttatgctgttgtggttagtactgagaacattactcagaattggtattttgggaataagaaggctatgttgattccgaattgtttgtttcgtgttggtggttcggcgattttgttgtcgaacaaggggaaagatcgtagacggtctaagtataagcttgttcataccgttaggactcataaaggagctgttgagaaggctttcaactgtgtttaccaagagcaagatgataatgggaagaccggggtttcgttgtcgaaagatcttatggctatagctggggaagctcttaaggcgaatatcactactttaggtcctttggttcttcctataagtgagcagattctgtttttcatgactttggttacgaagaaactgtttaactcgaagctgaagccgtatattccgaatttcaagcttgcgtttgatcatttctgtatccatgctggtggtagagctgtgattgatgagcttgagaagaatctgcagctttcgcagactcatgtcgaggcatcgagaatgacactgcatagatttggaaacacttcttcgagctcgatttggtatgaactggcttacatagaggctaaaggtaggatgaagaaaggaaaccgggtttggcagattgcttttggaagtgggtttaagtgtaacagtgcagtttgggtggctctaaacaatgtcaagccttcggttagtagtccgtgggaacactgcatcgaccgatatccggttaagctcgacttctgatttaatcaaaaaccatttgtttggttagtcctagtctttactagactctgccttgtttatttttcttcttttcttgttaagctcttgtactcttaatgtgacgcttcttgattattactctcgcgttttattctatggcatctttatcc

SEQ ID NO: 37912 - protein, 512 aa, Arabidopsis thaliana
  peptide (1)..(512): Ceres Seq. ID no. 12324699
  misc_feature (346)..(489): Pfam Name: Chalcone and stilbene synthases, C-terminal domain Pfam Description: Chalcone and stilbene synthases, C-terminal
  misc_feature (25)..(508): Homolog of NCBI NO: 21593111 NR Description: very-long-chain fatty acid condensing enzyme CUT1
  misc_feature (25)..(508): Homolog of NCBI NO: 15221431 NR Description: very-long-chain fatty acid condensing enzyme
  misc_feature (25)..(508): Homolog of NCBI NO: 17979464 NR Description: At1g68530/T26J14_10 [Arabidopsis thaliana]
  misc_feature (23)..(510): Homolog of NCBI NO: 15225767 NR Description: putative beta-ketoacyl-CoA synthase; protein id:
  misc_feature (22)..(510): Homolog of NCBI NO: 32172500 NR Description: FAE3 [Marchantia polymorpha]
  misc_feature (1)..(510): Homolog of NCBI NO: 29417540 NR Description: beta-ketoacyl-CoA-synthase [Marchantia polymorpha]
  misc_feature (14)..(510): Homolog of NCBI NO: 32172502 NR Description: FAE1 [Marchantia polymorpha]
  misc_feature (29)..(511): Homolog of NCBI NO: 15236133 NR Description: putative ketoacyl-CoA synthase; protein id:
  misc_feature (10)..(512): Homolog of NCBI NO: 15223556 NR Description: very-long-chain fatty acid condensing enzyme
  misc_feature (1)..(512): Homolog of NCBI NO: 15226724 NR Description: putative beta-ketoacyl-CoA synthase; protein id:
MEAANEPVNGGSVQIRTENNERRKLPNFLQSVNMKYVKLGYHYLITHLFKLCLVPLMAVLVTETSRLTTDDLYQIWLHLQYNLVAFIFLSALAIFGSTVYIMSRPRSVYLVDYSCYLPPESLQVKYQKFMDHSKLIEDFNESSLEFQRKILERSGLGEETYLPEALHCIPPRPTMMAAREESEQVMFGALDKLFENTKINPRDIGVLVVNCSLFNPTPSLSAMIVNKYKLRGNVKSFNLGGMGCSAGVISIDLAKDMLQVHRNTYAVVVSTENITQNWYFGNKKAMLIPNCLFRVGGSAILLSNKGKDRRRSKYKLVHTVRTHKGAVEKAFNCVYQEQDDNGKTGVSLSKDLMAIAGEALKANITTLGPLVLPISEQILFFMTLVTKKLFNSKLKPYIPNFKLAFDHFCIHAGGRAVIDELEKNLQLSQTHVEASRMTLHRFGNTSSSSIWYELAYIEAKGRMKKGNRVWQIAFGSGFKCNSAVWVALNNVKPSVSSPWEHCIDRYPVKLDF

SEQ ID NO: 37913 - protein, 479 aa, Arabidopsis thaliana
  peptide (1)..(479): Ceres Seq. ID no. 12324700
  misc_feature (313)..(456): Pfam Name: Chalcone and stilbene synthases, C-terminal domain Pfam Description: Chalcone and stilbene synthases, C-terminal
  misc_feature (1)..(475): Homolog of NCBI NO: 21593111 NR Description: very-long-chain fatty acid condensing enzyme CUT1
  misc_feature (1)..(475): Homolog of NCBI NO: 15221431 NR Description: very-long-chain fatty acid condensing enzyme
  misc_feature (1)..(475): Homolog of NCBI NO: 17979464 NR Description: At1g68530/T26J14_10 [Arabidopsis thaliana]
  misc_feature (1)..(477): Homolog of NCBI NO: 15225767 NR Description: putative beta-ketoacyl-CoA synthase; protein id:
  misc_feature (1)..(477): Homolog of NCBI NO: 32172500 NR Description: FAE3 [Marchantia polymorpha]
  misc_feature (1)..(477): Homolog of NCBI NO: 29417540 NR Description: beta-ketoacyl-CoA-synthase [Marchantia polymorpha]
  misc_feature (1)..(477): Homolog of NCBI NO: 32172502 NR Description: FAE1 [Marchantia polymorpha]
  misc_feature (1)..(478): Homolog of NCBI NO: 15236133 NR Description: putative ketoacyl-CoA synthase; protein id:
  misc_feature (1)..(479): Homolog of NCBI NO: 15223556 NR Description: very-long-chain fatty acid condensing enzyme
  misc_feature (1)..(479): Homolog of NCBI NO: 15226724 NR Description: putative beta-ketoacyl-CoA synthase; protein id:
MKYVKLGYHYLITHLFKLCLVPLMAVLVTETSRLTTDDLYQIWLHLQYNLVAFIFLSALAIFGSTVYIMSRPRSVYLVDYSCYLPPESLQVKYQKFMDHSKLIEDFNESSLEFQRKILERSGLGEETYLPEALHCIPPRPTMMAAREESEQVMFGALDKLFENTKINPRDIGVLVVNCSLFNPTPSLSAMIVNKYKLRGNVKSFNLGGMGCSAGVISIDLAKDMLQVHRNTYAVVVSTENITQNWYFGNKKAMLIPNCLFRVGGSAILLSNKGKDRRRSKYKLVHTVRTHKGAVEKAFNCVYQEQDDNGKTGVSLSKDLMAIAGEALKANITTLGPLVLPISEQILFFMTLVTKKLFNSKLKPYIPNFKLAFDHFCIHAGGRAVIDELEKNLQLSQTHVEASRMTLHRFGNTSSSSIWYELAYIEAKGRMKKGNRVWQIAFGSGFKCNSAVWVALNNVKPSVSSPWEHCIDRYPVKLDF

SEQ ID NO: 37914 - protein, 456 aa, Arabidopsis thaliana
  peptide (1)..(456): Ceres Seq. ID no. 12324701
  misc_feature (290)..(433): Pfam Name: Chalcone and stilbene synthases, C-terminal domain Pfam Description: Chalcone and stilbene synthases, C-terminal
  misc_feature (1)..(452): Homolog of NCBI NO: 21593111 NR Description: very-long-chain fatty acid condensing enzyme CUT1
  misc_feature (1)..(452): Homolog of NCBI NO: 15221431 NR Description: very-long-chain fatty acid condensing enzyme
  misc_feature (1)..(452): Homolog of NCBI NO: 17979464 NR Description: At1g68530/T26J14_10 [Arabidopsis thaliana]
  misc_feature (1)..(454): Homolog of NCBI NO: 15225767 NR Description: putative beta-ketoacyl-CoA synthase; protein id:
  misc_feature (1)..(454): Homolog of NCBI NO: 32172500 NR Description: FAE3 [Marchantia polymorpha]
  misc_feature (1)..(454): Homolog of NCBI NO: 29417540 NR Description: beta-ketoacyl-CoA-synthase [Marchantia polymorpha]
  misc_feature (1)..(454): Homolog of NCBI NO: 32172502 NR Description: FAE1 [Marchantia polymorpha]
  misc_feature (1)..(455): Homolog of NCBI NO: 15236133 NR Description: putative ketoacyl-CoA synthase; protein id:
  misc_feature (1)..(456): Homolog of NCBI NO: 15223556 NR Description: very-long-chain fatty acid condensing enzyme
  misc_feature (1)..(456): Homolog of NCBI NO: 15226724 NR Description: putative beta-ketoacyl-CoA synthase; protein id:
MAVLVTETSRLTTDDLYQIWLHLQYNLVAFIFLSALAIFGSTVYIMSRPRSVYLVDYSCYLPPESLQVKYQKFMDHSKLIEDFNESSLEFQRKILERSGLGEETYLPEALHCIPPRPTMMAAREESEQVMFGALDKLFENTKINPRDIGVLVVNCSLFNPTPSLSAMIVNKYKLRGNVKSFNLGGMGCSAGVISIDLAKDMLQVHRNTYAVVVSTENITQNWYFGNKKAMLIPNCLFRVGGSAILLSNKGKDRRRSKYKLVHTVRTHKGAVEKAFNCVYQEQDDNGKTGVSLSKDLMAIAGEALKANITTLGPLVLPISEQILFFMTLVTKKLFNSKLKPYIPNFKLAFDHFCIHAGGRAVIDELEKNLQLSQTHVEASRMTLHRFGNTSSSSIWYELAYIEAKGRMKKGNRVWQIAFGSGFKCNSAVWVALNNVKPSVSSPWEHCIDRYPVKLDF

SEQ ID NO: 37915 - DNA, 1553 bp, Arabidopsis thaliana
  misc_feature (1)..(1553): Ceres Seq. ID no. 13648203
  misc_feature: MA Experiment ID: 108462 Result: Down-regulated in Transcription
  misc_feature: MA Experiment 108462 PARAMETER Experiment Name: At_Germinating_Seeds_cDNA_P Parameter: Age (day) Value: 2 vs. 0
  misc_feature: MA Experiment 108462 PARAMETER Experiment Name: At_Germinating_Seeds_cDNA_P Parameter: Tissue Value: Germinating Seeds
  misc_feature: MA Experiment ID: 108464 Result: Down-regulated in Transcription
  misc_feature: MA Experiment 108464 PARAMETER Experiment Name: At_Germinating_Seeds_cDNA_P Parameter: Age (day) Value: 4 vs. 0
  misc_feature: MA Experiment 108464 PARAMETER Experiment Name: At_Germinating_Seeds_cDNA_P Parameter: Tissue Value: Germinating Seeds
  misc_feature: MA Experiment ID: 108501 Result: Up-regulated in Transcription
  misc_feature: MA Experiment 108501 PARAMETER Experiment Name: At_ap2_floral_buds_cDNA_P Parameter: Plant Line Value: ap2 (Ler.)
  misc_feature: MA Experiment 108501 PARAMETER Experiment Name: At_ap2_floral_buds_cDNA_P Parameter: Tissue Value: Closed Flower
  misc_feature: MA Experiment ID: 108573 Result: Down-regulated in Transcription
  misc_feature: MA Experiment 108573 PARAMETER Experiment Name: At_Drought_cDNA_P Parameter: Timepoint (hr) Value: 6
  misc_feature: MA Experiment 108573 PARAMETER Experiment Name: At_Drought_cDNA_P Parameter: Tissue Value: Aerial
  misc_feature: MA Experiment 108573 PARAMETER Experiment Name: At_Drought_cDNA_P Parameter: Treatment Value: Drought vs. No Drought
  misc_feature: MA Experiment ID: 108595 Result: Down-regulated in Transcription
  misc_feature: MA Experiment 108595 PARAMETER Experiment Name: At_Ler-pi_Ovule_cDNA_P Parameter: Plant Line Value: null
  misc_feature: MA Experiment ID: 108607 Result: Down-regulated in Transcription
  misc_feature: MA Experiment 108607 PARAMETER Experiment Name: At_100uM_ABA_cDNA_P Parameter: Timepoint (hr) Value: 4
  misc_feature: MA Experiment 108607 PARAMETER Experiment Name: At_100uM_ABA_cDNA_P Parameter: Tissue Value: Aerial
  misc_feature: MA Experiment 108607 PARAMETER Experiment Name: At_100uM_ABA_cDNA_P Parameter: Treatment Value: 100uM ABA vs. No Treatment
  misc_feature: MA Experiment ID: 20000087 Result: Down-regulated in Transcription
  misc_feature: MA Experiment 20000087 PARAMETER Experiment Name: At_100uM_ABA_Mutants_cDNA_P Parameter: Plant Line Value: WS
  misc_feature: MA Experiment 20000087 PARAMETER Experiment Name: At_100uM_ABA_Mutants_cDNA_P Parameter: Timepoint (hr) Value: 6
  misc_feature: MA Experiment 20000087 PARAMETER Experiment Name: At_100uM_ABA_Mutants_cDNA_P Parameter: Tissue Value: Aerial
  misc_feature: MA Experiment 20000087 PARAMETER Experiment Name: At_100uM_ABA_Mutants_cDNA_P Parameter: Treatment Value: 100uM ABA vs. No Treatment
  misc_feature: MA Experiment ID: 20000224 Result: Up-regulated in Transcription
  misc_feature: MA Experiment ID: 20000306 Result: Up-regulated in Transcription
  misc_feature: MA Experiment 20000306 PARAMETER Experiment Name: At_Germinating_Seeds_Sub_P Parameter: Age (hr) Value: 6 vs. 0
  misc_feature: MA Experiment 20000306 PARAMETER Experiment Name: At_Germinating_Seeds_Sub_P Parameter: Organism Value: A. thaliana
  misc_feature: MA Experiment 20000306 PARAMETER Experiment Name: At_Germinating_Seeds_Sub_P Parameter: Plant Line Value: WS
  misc_feature: MA Experiment 20000306 PARAMETER Experiment Name: At_Germinating_Seeds_Sub_P Parameter: Tissue Value: Germinating Seeds
  misc_feature: MA Experiment ID: 20000315 Result: Down-regulated in Transcription
  misc_feature: MA Experiment 20000315 PARAMETER Experiment Name: At_14day_Shoots-Roots_Sub_P Parameter: Age (day) Value: 14
  misc_feature: MA Experiment 20000315 PARAMETER Experiment Name: At_14day_Shoots-Roots_Sub_P Parameter: Organism Value: A. thaliana
  misc_feature: MA Experiment 20000315 PARAMETER Experiment Name: At_14day_Shoots-Roots_Sub_P Parameter: Plant Line Value: WS
  misc_feature: MA Experiment 20000315 PARAMETER Experiment Name: At_14day_Shoots-Roots_Sub_P Parameter: Tissue Value: Shoots vs. Whole Plant
gccacccagaaaaaaccctcaagtcttcttcttcttcctcaatctctccacctcttttcaaaccttcttcacactctctctcaatcaatcctttttcttctcaaatctttcagttttgatctctaaatttccagaaaatgagcaacgataaggacagtttcaatgtcagcgatctcacttctgctcttaaagatgaggatcgagctggtcttgtcaacgctcttaagaacaagctccagaatctagctggacaacattctgatgtgctcgagaatctgactcctaaaattagaaggcgtgttgaggttttgcgggagattcagggcaaacatgatgaaatagagacaaaattccgcgaggagagagctgctcttgaagccaagtatcaaaagttatatcagcctttgtataacaagcgttatgagattgtgaatggagctactgaagttgaaggggctccagaggatgctaagatggaccaaggagacgagaaaactgcagaagagaaaggagtccctagtttctggctgactgctctgaaaaataatgatgttatatctgaagagatcacagagcgtgatgaaggagcccttatatatcttaaagatatcaagtggtgcaagattgaagaaccaaagggattcaaacttgagtttttcttcgaccagaatccttacttcaaaaacaccctattaacaaaggcgtatcatatgattgatgaagatgagcctctgcttgagaaggctattgggacagagattgattggtatcctggaaaatgcttaactcagaagattcttaagaagaagcctaagaaaggtgcaaagaatgccaagccaattaccaaaactgaagattgtgaaagcttcttcaacttcttcaatcctccccaagttcctgatgatgatgaagacattgacgaagaaagagccgaggaacttcagaatctgatggaacaagattatgacattggttctacaatccgggagaagatcatacctcatgctgtctcatggtttactggtgaggctattgagggagaggagtttgaaatagacaatgacgatgaagatgatatcgatgaggatgaagatgaggatgaagaagatgaagacgaagatgaggaagaagacgacgaagatgaggaggaagaagtaagcaagaccaaaaagaagccatcagtcttacacaagaaaggagggagacctcaggttaccgatgatcaacaaggagagaggcctcctgaatgcaaacaacagtaaacaaaatcgaaaagtctaaacgaaaaccagtaaaagaaaaacaaatgttttgggttttgagtgaagtttcatggcctagttttttgcttccatgtaaggcaaaatgttttgaagactgctcataggaatgttgctgtaggcaaaagagtgagtttctccatgtggagatacttgataaattatttttggtgcatttgttttttttttctttaatcactaagttgaattttggtgtgttcgtcaaaattatatccttttaccacttgaattaaagtctcttttggtttcttt

SEQ ID NO: 37916 - protein, 374 aa, Arabidopsis thaliana
  peptide (1)..(374): Ceres Seq. ID no. 13648204
  misc_feature (52)..(300): Pfam Name: Nucleosome assembly protein (NAP) Pfam Description: Nucleosome assembly protein (NAP)
  misc_feature (44)..(321): Homolog of NCBI NO: 15231361 NR Description: nucleosome assembly protein -related [Arabidopsis
  misc_feature (1)..(357): Homolog of NCBI NO: 21898560 NR Description: nucleosome/chromatin assembly factor group A [Zea
  misc_feature (1)..(374): Homolog of NCBI NO: 29569109 NR Description: nucleosome/chromatin assembly factor group A [Zea
  misc_feature (1)..(374): Homolog of NCBI NO: 2129840 NR Description: nucleosome assembly protein 1 - soybean
  misc_feature (1)..(374): Homolog of NCBI NO: 7488816 NR Description: nucleosome assembly protein 1 - garden pea
  misc_feature (1)..(374): Homolog of NCBI NO: 15224782 NR Description: nucleosome assembly protein -related [Arabidopsis
  misc_feature (1)..(374): Homolog of NCBI NO: 15236115 NR Description: nucleosome assembly protein I-related protein
  misc_feature (1)..(374): Homolog of NCBI NO: 549975 NR Description: nucleosome assembly protein I-like protein
  misc_feature (1)..(374): Homolog of NCBI NO: 8777435 NR Description: nucleosome assembly protein [Arabidopsis thaliana]
  misc_feature (1)..(374): Homolog of NCBI NO: 18423918 NR Description: nucleosome assembly protein [Arabidopsis
MSNDKDSFNVSDLTSALKDEDRAGLVNALKNKLQNLAGQHSDVLENLTPKIRRRVEVLREIQGKHDEIETKFREERAALEAKYQKLYQPLYNKRYEIVNGATEVEGAPEDAKMDQGDEKTAEEKGVPSFWLTALKNNDVISEEITERDEGALIYLKDIKWCKIEEPKGFKLEFFFDQNPYFKNTLLTKAYHMIDEDEPLLEKAIGTEIDWYPGKCLTQKILKKKPKKGAKNAKPITKTEDCESFFNFFNPPQVPDDDEDIDEERAEELQNLMEQDYDIGSTIREKIIPHAVSWFTGEAIEGEEFEIDNDDEDDIDEDEDEDEEDEDEDEEEDDEDEEEEVSKTKKKPSVLHKKGGRPQVTDDQQGERPPECKQQ

SEQ ID NO: 37917 - protein, 262 aa, Arabidopsis thaliana
  peptide (1)..(262): Ceres Seq. ID no. 13648205
  misc_feature (1)..(188): Pfam Name: Nucleosome assembly protein (NAP) Pfam Description: Nucleosome assembly protein (NAP)
  misc_feature (1)..(209): Homolog of NCBI NO: 15231361 NR Description: nucleosome assembly protein -related [Arabidopsis
  misc_feature (1)..(245): Homolog of NCBI NO: 21898560 NR Description: nucleosome/chromatin assembly factor group A [Zea
  misc_feature (1)..(262): Homolog of NCBI NO: 29569109 NR Description: nucleosome/chromatin assembly factor group A [Zea
  misc_feature (1)..(262): Homolog of NCBI NO: 2129840 NR Description: nucleosome assembly protein 1 - soybean
  misc_feature (1)..(262): Homolog of NCBI NO: 7488816 NR Description: nucleosome assembly protein 1 - garden pea
  misc_feature (1)..(262): Homolog of NCBI NO: 15224782 NR Description: nucleosome assembly protein -related [Arabidopsis
  misc_feature (1)..(262): Homolog of NCBI NO: 15236115 NR Description: nucleosome assembly protein I-related protein
  misc_feature (1)..(262): Homolog of NCBI NO: 549975 NR Description: nucleosome assembly protein I-like protein
  misc_feature (1)..(262): Homolog of NCBI NO: 8777435 NR Description: nucleosome assembly protein [Arabidopsis thaliana]
  misc_feature (1)..(262): Homolog of NCBI NO: 18423918 NR Description: nucleosome assembly protein [Arabidopsis
MDQGDEKTAEEKGVPSFWLTALKNNDVISEEITERDEGALIYLKDIKWCKIEEPKGFKLEFFFDQNPYFKNTLLTKAYHMIDEDEPLLEKAIGTEIDWYPGKCLTQKILKKKPKKGAKNAKPITKTEDCESFFNFFNPPQVPDDDEDIDEERAEELQNLMEQDYDIGSTIREKIIPHAVSWFTGEAIEGEEFEIDNDDEDDIDEDEDEDEEDEDEDEEEDDEDEEEEVSKTKKKPSVLHKKGGRPQVTDDQQGERPPECKQQ

SEQ ID NO: 37918 - DNA, 768 bp, Arabidopsis thaliana
  misc_feature (1)..(768): Ceres Seq. ID no. 12394158
  misc_feature: MA Experiment ID: 108434 Result: Up-regulated in Transcription
  misc_feature: MA Experiment 108434 PARAMETER Experiment Name: At_Root_Tips_cDNA_P Parameter: Tissue Value: Root Tips
  misc_feature: MA Experiment ID: 108462 Result: Down-regulated in Transcription
  misc_feature: MA Experiment 108462 PARAMETER Experiment Name: At_Germinating_Seeds_cDNA_P Parameter: Age (day) Value: 2 vs. 0
  misc_feature: MA Experiment 108462 PARAMETER Experiment Name: At_Germinating_Seeds_cDNA_P Parameter: Tissue Value: Germinating Seeds
  misc_feature: MA Experiment ID: 108463 Result: Down-regulated in Transcription
  misc_feature: MA Experiment 108463 PARAMETER Experiment Name: At_Germinating_Seeds_cDNA_P Parameter: Age (day) Value: 3 vs. 0
  misc_feature: MA Experiment 108463 PARAMETER Experiment Name: At_Germinating_Seeds_cDNA_P Parameter: Tissue Value: Germinating Seeds
  misc_feature: MA Experiment ID: 108464 Result: Down-regulated in Transcription
  misc_feature: MA Experiment 108464 PARAMETER Experiment Name: At_Germinating_Seeds_cDNA_P Parameter: Age (day) Value: 4 vs. 0
  misc_feature: MA Experiment 108464 PARAMETER Experiment Name: At_Germinating_Seeds_cDNA_P Parameter: Tissue Value: Germinating Seeds
  misc_feature: MA Experiment ID: 108488 Result: Up-regulated in Transcription
  misc_feature: MA Experiment ID: 108573 Result: Down-regulated in Transcription
  misc_feature: MA Experiment 108573 PARAMETER Experiment Name: At_Drought_cDNA_P Parameter: Timepoint (hr) Value: 6
  misc_feature: MA Experiment 108573 PARAMETER Experiment Name: At_Drought_cDNA_P Parameter: Tissue Value: Aerial
  misc_feature: MA Experiment 108573 PARAMETER Experiment Name: At_Drought_cDNA_P Parameter: Treatment Value: Drought vs. No Drought
  misc_feature: MA Experiment ID: 20000184 Result: Up-regulated in Transcription
  misc_feature: MA Experiment 20000184 PARAMETER Experiment Name: At_Shoots__P Parameter: Age (day) Value: 7
  misc_feature: MA Experiment 20000184 PARAMETER Experiment Name: At_Shoots__P Parameter: Tissue Value: Shoots vs. Whole Plant
  misc_feature: MA Experiment ID: 20000224 Result: Down-regulated in Transcription
  misc_feature: MA Experiment ID: 20000234 Result: Up-regulated in Transcription
  misc_feature: MA Experiment 20000234 PARAMETER Experiment Name: At_Siliques_P Parameter: Age (day) Value: 21
  misc_feature: MA Experiment 20000234 PARAMETER Experiment Name: At_Siliques_P Parameter: Organism Value: A. thaliana
  misc_feature: MA Experiment 20000234 PARAMETER Experiment Name: At_Siliques_P Parameter: Plant Line Value: WS
  misc_feature: MA Experiment 20000234 PARAMETER Experiment Name: At_Siliques_P Parameter: Tissue Value: Less Than 5mm Siliques vs. Whole Plant
  misc_feature: MA Experiment ID: 20000265 Result: Up-regulated in Transcription
  misc_feature: MA Experiment 20000265 PARAMETER Experiment Name: At_Open_Flower_P Parameter: Age (day) Value: 21
  misc_feature: MA Experiment 20000265 PARAMETER Experiment Name: At_Open_Flower_P Parameter: Plant Line Value: WS
  misc_feature: MA Experiment 20000265 PARAMETER Experiment Name: At_Open_Flower_P Parameter: Tissue Value: Closed Flower vs. Whole Plant
  misc_feature: MA Experiment ID: 20000794 Result: Down-regulated in Transcription
  misc_feature: MA Experiment 20000794 PARAMETER Experiment Name: At_Petals_P Parameter: Age (day) Value: 23-25 days
  misc_feature: MA Experiment 20000794 PARAMETER Experiment Name: At_Petals_P Parameter: Plant Line Value: WS
  misc_feature: MA Experiment 20000794 PARAMETER Experiment Name: At_Petals_P Parameter: Tissue Value: Petals vs. Whole plant
  misc_feature: MA Experiment ID: 20001557 Result: Up-regulated in Transcription
  misc_feature: MA Experiment 20001557 PARAMETER Experiment Name: At_Drought_Soil_Dry_P Parameter: Age (day) Value: 27
  misc_feature: MA Experiment 20001557 PARAMETER Experiment Name: At_Drought_Soil_Dry_P Parameter: Organism Value: A. thaliana
  misc_feature: MA Experiment 20001557 PARAMETER Experiment Name: At_Drought_Soil_Dry_P Parameter: Plant Line Value: WS
  misc_feature: MA Experiment 20001557 PARAMETER Experiment Name: At_Drought_Soil_Dry_P Parameter: Post Timepoint (hr) Value: 3
  misc_feature: MA Experiment 20001557 PARAMETER Experiment Name: At_Drought_Soil_Dry_P Parameter: Post-Treatment Value: Re-Water vs. No Drought
  misc_feature: MA Experiment 20001557 PARAMETER Experiment Name: At_Drought_Soil_Dry_P Parameter: Timepoint (day) Value: 13
  misc_feature: MA Experiment 20001557 PARAMETER Experiment Name: At_Drought_Soil_Dry_P Parameter: Treatment Value: Drought vs. No Drought
  misc_feature: MA Experiment ID: 20001558 Result: Up-regulated in Transcription
  misc_feature: MA Experiment 20001558 PARAMETER Experiment Name: At_Drought_Soil_Dry_P Parameter: Age (day) Value: 27
  misc_feature: MA Experiment 20001558 PARAMETER Experiment Name: At_Drought_Soil_Dry_P Parameter: Organism Value: A. thaliana
  misc_feature: MA Experiment 20001558 PARAMETER Experiment Name: At_Drought_Soil_Dry_P Parameter: Plant Line Value: WS
  misc_feature: MA Experiment 20001558 PARAMETER Experiment Name: At_Drought_Soil_Dry_P Parameter: Post Timepoint (hr) Value: 6
  misc_feature: MA Experiment 20001558 PARAMETER Experiment Name: At_Drought_Soil_Dry_P Parameter: Post-Treatment Value: Re-Water vs. No Drought
  misc_feature: MA Experiment 20001558 PARAMETER Experiment Name: At_Drought_Soil_Dry_P Parameter: Timepoint (day) Value: 13
  misc_feature: MA Experiment 20001558 PARAMETER Experiment Name: At_Drought_Soil_Dry_P Parameter: Treatment Value: Drought vs. No Drought
  misc_feature: MA Experiment ID: 20001560 Result: Up-regulated in Transcription
  misc_feature: MA Experiment 20001560 PARAMETER Experiment Name: At_Drought_Soil_Dry_P Parameter: Age (day) Value: 28
  misc_feature: MA Experiment 20001560 PARAMETER Experiment Name: At_Drought_Soil_Dry_P Parameter: Organism Value: A. thaliana
  misc_feature: MA Experiment 20001560 PARAMETER Experiment Name: At_Drought_Soil_Dry_P Parameter: Plant Line Value: WS
  misc_feature: MA Experiment 20001560 PARAMETER Experiment Name: At_Drought_Soil_Dry_P Parameter: Post Timepoint (hr) Value: None
  misc_feature: MA Experiment 20001560 PARAMETER Experiment Name: At_Drought_Soil_Dry_P Parameter: Post-Treatment Value: None
  misc_feature: MA Experiment 20001560 PARAMETER Experiment Name: At_Drought_Soil_Dry_P Parameter: Timepoint (day) Value: 14
  misc_feature: MA Experiment 20001560 PARAMETER Experiment Name: At_Drought_Soil_Dry_P Parameter: Treatment Value: Drought vs. No Drought
  misc_feature: MA Experiment ID: 20001757 Result: Up-regulated in Transcription
  misc_feature: MA Experiment 20001757 PARAMETER Experiment Name: At_50mM_NH4NO3_L-to-H_P Parameter: Timepoint (hr) Value: 6
  misc_feature: MA Experiment 20001757 PARAMETER Experiment Name: At_50mM_NH4NO3_L-to-H_P Parameter: Tissue Value: Leaf
  misc_feature: MA Experiment 20001757 PARAMETER Experiment Name: At_50mM_NH4NO3_L-to-H_P Parameter: Treatment Value: 50mM NH4NO3 vs 100mM Mannitol
aaaaaaaccctagttttttgctctctcgaagttccgtgcgactctctgctcgagcaagatctcctaccgatacaatgattatctcagaggctaaccgcaaagaaatctgcaagtacctcttcaaagaaggagtttgctttgcgaagaaggatttcaatcttgctaagcatccgttgatcgatgtcccgaacctacaagtgattaagcttatgcagagtttcaaatccaaggagtatgttagagagacatttgcctggatgcattactattggtttttgaccaatgaagggatcgagttcttgagaacttatcttaatcttccatctgatgttgttcctgctactttgaagaagtcagctaagcctggtggtcgtccatttggtggcccacctggtgatcgctcaagaggacctcgccatgaaggaggagaccgtcccaggtttggtgaccgtgatgggtaccgtgcaggtcctcgagctggtggtgagtttggaggtgaaaagggtggagctcctgcagattaccagccatctttccaaggaagtgggcgtggttttggccgtggtgctggtggctacagcgcagctgcaccatctggttcaggtttgccttgaaaaagaaatgtctttaggtgacagtaagaccatggaggagttttcagctttaaattttgcttttgtaattcagattccggaatccttcataatctctatctgagtttagttttgttgttgaatcaaacatccgatttaaagttatgttcattcc

SEQ ID NO: 37919 - protein, 203 aa, Arabidopsis thaliana
  peptide (1)..(203): Ceres Seq. ID no. 12394159
  misc_feature (27)..(122): Pfam Name: Plectin/S10 domain Pfam Description: Plectin/S10 domain
  misc_feature (25)..(190): Homolog of NCBI NO: 28200289 NR Description: ribosomal protein S10 [Branchiostoma belcheri
  misc_feature (25)..(190): Homolog of NCBI NO: 24266976 NR Description: ribosomal protein S10 [Branchiostoma belcheri]
  misc_feature (25)..(197): Homolog of NCBI NO: 40642980 NR Description: ribosomal protein S10 [Crassostrea gigas]
  misc_feature (25)..(203): Homolog of NCBI NO: 15238099 NR Description: putative protein
  misc_feature (25)..(202): Homolog of NCBI NO: 20140213 NR Description: 40S ribosomal protein S10
  misc_feature (25)..(198): Homolog of NCBI NO: 34905824 NR Description: putative ribosomal protein S10
  misc_feature (25)..(202): Homolog of NCBI NO: 34897532 NR Description: OSJNBa0042L16.3 [Oryza sativa (japonica
  misc_feature (25)..(203): Homolog of NCBI NO: 15235985 NR Description: putative ribosomal protein S10
  misc_feature (25)..(203): Homolog of NCBI NO: 20139798 NR Description: 40S ribosomal protein S10-3
  misc_feature (25)..(203): Homolog of NCBI NO: 15237217 NR Description: putative protein
KNPSFLLSRSSVRLSARARSPTDTMIISEANRKEICKYLFKEGVCFAKKDFNLAKHPLIDVPNLQVIKLMQSFKSKEYVRETFAWMHYYWFLTNEGIEFLRTYLNLPSDVVPATLKKSAKPGGRPFGGPPGDRSRGPRHEGGDRPRFGDRDGYRAGPRAGGEFGGEKGGAPADYQPSFQGSGRGFGRGAGGYSAAAPSGSGLP

SEQ ID NO: 37920 - protein, 179 aa, Arabidopsis thaliana
  peptide (1)..(179): Ceres Seq. ID no. 12394160
  misc_feature (3)..(98): Pfam Name: Plectin/S10 domain Pfam Description: Plectin/S10 domain
  misc_feature (1)..(166): Homolog of NCBI NO: 28200289 NR Description: ribosomal protein S10 [Branchiostoma belcheri
  misc_feature (1)..(166): Homolog of NCBI NO: 24266976 NR Description: ribosomal protein S10 [Branchiostoma belcheri]
  misc_feature (1)..(173): Homolog of NCBI NO: 40642980 NR Description: ribosomal protein S10 [Crassostrea gigas]
  misc_feature (1)..(179): Homolog of NCBI NO: 15238099 NR Description: putative protein
  misc_feature (1)..(178): Homolog of NCBI NO: 20140213 NR Description: 40S ribosomal protein S10
  misc_feature (1)..(174): Homolog of NCBI NO: 34905824 NR Description: putative ribosomal protein S10
  misc_feature (1)..(178): Homolog of NCBI NO: 34897532 NR Description: OSJNBa0042L16.3 [Oryza sativa (japonica
  misc_feature (1)..(179): Homolog of NCBI NO: 15235985 NR Description: putative ribosomal protein S10
  misc_feature (1)..(179): Homolog of NCBI NO: 20139798 NR Description: 40S ribosomal protein S10-3
  misc_feature (1)..(179): Homolog of NCBI NO: 15237217 NR Description: putative protein
MIISEANRKEICKYLFKEGVCFAKKDFNLAKHPLIDVPNLQVIKLMQSFKSKEYVRETFAWMHYYWFLTNEGIEFLRTYLNLPSDVVPATLKKSAKPGGRPFGGPPGDRSRGPRHEGGDRPRFGDRDGYRAGPRAGGEFGGEKGGAPADYQPSFQGSGRGFGRGAGGYSAAAPSGSGLP

SEQ ID NO: 37921 - protein, 134 aa, Arabidopsis thaliana
  peptide (1)..(134): Ceres Seq. ID no. 12394161
  misc_feature (1)..(53): Pfam Name: Plectin/S10 domain Pfam Description: Plectin/S10 domain
  misc_feature (1)..(121): Homolog of NCBI NO: 28200289 NR Description: ribosomal protein S10 [Branchiostoma belcheri
  misc_feature (1)..(121): Homolog of NCBI NO: 24266976 NR Description: ribosomal protein S10 [Branchiostoma belcheri]
  misc_feature (1)..(128): Homolog of NCBI NO: 40642980 NR Description: ribosomal protein S10 [Crassostrea gigas]
  misc_feature (1)..(134): Homolog of NCBI NO: 15238099 NR Description: putative protein
  misc_feature (1)..(133): Homolog of NCBI NO: 20140213 NR Description: 40S ribosomal protein S10
  misc_feature (1)..(129): Homolog of NCBI NO: 34905824 NR Description: putative ribosomal protein S10
  misc_feature (1)..(133): Homolog of NCBI NO: 34897532 NR Description: OSJNBa0042L16.3 [Oryza sativa (japonica
  misc_feature (1)..(134): Homolog of NCBI NO: 15235985 NR Description: putative ribosomal protein S10
  misc_feature (1)..(134): Homolog of NCBI NO: 20139798 NR Description: 40S ribosomal protein S10-3
  misc_feature (1)..(134): Homolog of NCBI NO: 15237217 NR Description: putative protein
MQSFKSKEYVRETFAWMHYYWFLTNEGIEFLRTYLNLPSDVVPATLKKSAKPGGRPFGGPPGDRSRGPRHEGGDRPRFGDRDGYRAGPRAGGEFGGEKGGAPADYQPSFQGSGRGFGRGAGGYSAAAPSGSGLP

SEQ ID NO: 37922 - DNA, 2393 bp, Arabidopsis thaliana
  misc_feature (1)..(2393): Ceres Seq. ID no. 13497068
  misc_feature: MA Experiment ID: 108434 Result: Down-regulated in Transcription
  misc_feature: MA Experiment 108434 PARAMETER Experiment Name: At_Root_Tips_cDNA_P Parameter: Tissue Value: Root Tips
  misc_feature: MA Experiment ID: 108464 Result: Up-regulated in Transcription
  misc_feature: MA Experiment 108464 PARAMETER Experiment Name: At_Germinating_Seeds_cDNA_P Parameter: Age (day) Value: 4 vs. 0
  misc_feature: MA Experiment 108464 PARAMETER Experiment Name: At_Germinating_Seeds_cDNA_P Parameter: Tissue Value: Germinating Seeds
  misc_feature: MA Experiment ID: 108594 Result: Up-regulated in Transcription
  misc_feature: MA Experiment 108594 PARAMETER Experiment Name: At_Ler-rhl_Root_cDNA_P Parameter: Plant Line Value: null
  misc_feature: MA Experiment ID: 20000117 Result: Up-regulated in Transcription
  misc_feature: MA Experiment 20000117 PARAMETER Experiment Name: At_100uM_ABA_Mutants_cDNA_P Parameter: Plant Line Value: Columbia
  misc_feature: MA Experiment 20000117 PARAMETER Experiment Name: At_100uM_ABA_Mutants_cDNA_P Parameter: Timepoint (hr) Value: 6
  misc_feature: MA Experiment 20000117 PARAMETER Experiment Name: At_100uM_ABA_Mutants_cDNA_P Parameter: Tissue Value: Aerial
  misc_feature: MA Experiment 20000117 PARAMETER Experiment Name: At_100uM_ABA_Mutants_cDNA_P Parameter: Treatment Value: 100uM ABA vs. No Treatment
  misc_feature: MA Experiment ID: 20000182 Result: Up-regulated in Transcription
  misc_feature: MA Experiment 20000182 PARAMETER Experiment Name: At_2mM_SA_P Parameter: Age (day) Value: 14
  misc_feature: MA Experiment 20000182 PARAMETER Experiment Name: At_2mM_SA_P Parameter: Organism Value: A. thaliana
  misc_feature: MA Experiment 20000182 PARAMETER Experiment Name: At_2mM_SA_P Parameter: Plant Line Value: WS
  misc_feature: MA Experiment 20000182 PARAMETER Experiment Name: At_2mM_SA_P Parameter: Timepoint (hr) Value: 6
  misc_feature: MA Experiment 20000182 PARAMETER Experiment Name: At_2mM_SA_P Parameter: Tissue Value: Aerial
  misc_feature: MA Experiment 20000182 PARAMETER Experiment Name: At_2mM_SA_P Parameter: Treatment Value: 2mM SA vs. No Treatment
  misc_feature: MA Experiment ID: 20000184 Result: Down-regulated in Transcription
  misc_feature: MA Experiment 20000184 PARAMETER Experiment Name: At_Shoots__P Parameter: Age (day) Value: 7
  misc_feature: MA Experiment 20000184 PARAMETER Experiment Name: At_Shoots__P Parameter: Tissue Value: Shoots vs. Whole Plant
  misc_feature: MA Experiment ID: 20000185 Result: Down-regulated in Transcription
  misc_feature: MA Experiment 20000185 PARAMETER Experiment Name: At_Roots__P Parameter: Age (day) Value: 7 vs. 21
  misc_feature: MA Experiment 20000185 PARAMETER Experiment Name: At_Roots__P Parameter: Organism Value: A. thaliana
  misc_feature: MA Experiment 20000185 PARAMETER Experiment Name: At_Roots__P Parameter: Tissue Value: Roots vs. Whole Plant
  misc_feature: MA Experiment ID: 20000235 Result: Down-regulated in Transcription
  misc_feature: MA Experiment 20000235 PARAMETER Experiment Name: At_Siliques_P Parameter: Age (day) Value: 21
  misc_feature: MA Experiment 20000235 PARAMETER Experiment Name: At_Siliques_P Parameter: Organism Value: A. thaliana
  misc_feature: MA Experiment 20000235 PARAMETER Experiment Name: At_Siliques_P Parameter: Plant Line Value: WS
  misc_feature: MA Experiment 20000235 PARAMETER Experiment Name: At_Siliques_P Parameter: Tissue Value: 5-10mm Siliques vs. Whole Plant
  misc_feature: MA Experiment ID: 20000264 Result: Down-regulated in Transcription
  misc_feature: MA Experiment 20000264 PARAMETER Experiment Name: At_Open_Flower_P Parameter: Age (day) Value: 21
  misc_feature: MA Experiment 20000264 PARAMETER Experiment Name: At_Open_Flower_P Parameter: Plant Line Value: WS
  misc_feature: MA Experiment 20000264 PARAMETER Experiment Name: At_Open_Flower_P Parameter: Tissue Value: Open Flower vs. Whole Plant
  misc_feature: MA Experiment ID: 20000265 Result: Down-regulated in Transcription
  misc_feature: MA Experiment 20000265 PARAMETER Experiment Name: At_Open_Flower_P Parameter: Age (day) Value: 21
  misc_feature: MA Experiment 20000265 PARAMETER Experiment Name: At_Open_Flower_P Parameter: Plant Line Value: WS
  misc_feature: MA Experiment 20000265 PARAMETER Experiment Name: At_Open_Flower_P Parameter: Tissue Value: Closed Flower vs. Whole Plant
  misc_feature: MA Experiment ID: 20000286 Result: Down-regulated in Transcription
  misc_feature: MA Experiment 20000286 PARAMETER Experiment Name: At_Open_Flower_P Parameter: Age (day) Value: 21
  misc_feature: MA Experiment 20000286 PARAMETER Experiment Name: At_Open_Flower_P Parameter: Plant Line Value: WS
  misc_feature: MA Experiment 20000286 PARAMETER Experiment Name: At_Open_Flower_P Parameter: Tissue Value: Half Open vs. Whole Plant
  misc_feature: MA Experiment ID: 20000438 Result: Down-regulated in Transcription
  misc_feature: MA Experiment 20000438 PARAMETER Experiment Name: At_Shoots__P Parameter: Age (day) Value: 14
  misc_feature: MA Experiment 20000438 PARAMETER Experiment Name: At_Shoots__P Parameter: Tissue Value: Shoots vs. Whole Plant
  misc_feature: MA Experiment ID: 20000441 Result: Up-regulated in Transcription
  misc_feature: MA Experiment 20000441 PARAMETER Experiment Name: At_1uM_BR-BRZ__P Parameter: Tissue Value: Shoot Apices
  misc_feature: MA Experiment 20000441 PARAMETER Experiment Name: At_1uM_BR-BRZ__P Parameter: Treatment Value: 1uM BR vs. No Treatment
  misc_feature: MA Experiment ID: 20000794 Result: Down-regulated in Transcription
  misc_feature: MA Experiment 20000794 PARAMETER Experiment Name: At_Petals_P Parameter: Age (day) Value: 23-25 days
  misc_feature: MA Experiment 20000794 PARAMETER Experiment Name: At_Petals_P Parameter: Plant Line Value: WS
  misc_feature: MA Experiment 20000794 PARAMETER Experiment Name: At_Petals_P Parameter: Tissue Value: Petals vs. Whole plant
  misc_feature: MA Experiment ID: 20001248 Result: Up-regulated in Transcription
  misc_feature: MA Experiment 20001248 PARAMETER Experiment Name: At_Far-red-induction_P Parameter: Age (day) Value: 7
  misc_feature: MA Experiment 20001248 PARAMETER Experiment Name: At_Far-red-induction_P Parameter: Light Value: Far-red vs. White
  misc_feature: MA Experiment 20001248 PARAMETER Experiment Name: At_Far-red-induction_P Parameter: Organism Value: A. thaliana
  misc_feature: MA Experiment 20001248 PARAMETER Experiment Name: At_Far-red-induction_P Parameter: Plant Line Value: Columbia
  misc_feature: MA Experiment 20001248 PARAMETER Experiment Name: At_Far-red-induction_P Parameter: Timepoint (hr) Value: 4
  misc_feature: MA Experiment 20001248 PARAMETER Experiment Name: At_Far-red-induction_P Parameter: Tissue Value: Whole Plant
  misc_feature: MA Experiment ID: 20001558 Result: Down-regulated in Transcription
  misc_feature: MA Experiment 20001558 PARAMETER Experiment Name: At_Drought_Soil_Dry_P Parameter: Age (day) Value: 27
  misc_feature: MA Experiment 20001558 PARAMETER Experiment Name: At_Drought_Soil_Dry_P Parameter: Organism Value: A. thaliana
  misc_feature: MA Experiment 20001558 PARAMETER Experiment Name: At_Drought_Soil_Dry_P Parameter: Plant Line Value: WS
  misc_feature: MA Experiment 20001558 PARAMETER Experiment Name: At_Drought_Soil_Dry_P Parameter: Post Timepoint (hr) Value: 6
  misc_feature: MA Experiment 20001558 PARAMETER Experiment Name: At_Drought_Soil_Dry_P Parameter: Post-Treatment Value: Re-Water vs. No Drought
  misc_feature: MA Experiment 20001558 PARAMETER Experiment Name: At_Drought_Soil_Dry_P Parameter: Timepoint (day) Value: 13
  misc_feature: MA Experiment 20001558 PARAMETER Experiment Name: At_Drought_Soil_Dry_P Parameter: Treatment Value: Drought vs. No Drought
  misc_feature: MA Experiment ID: 20001560 Result: Down-regulated in Transcription
  misc_feature: MA Experiment 20001560 PARAMETER Experiment Name: At_Drought_Soil_Dry_P Parameter: Age (day) Value: 28
  misc_feature: MA Experiment 20001560 PARAMETER Experiment Name: At_Drought_Soil_Dry_P Parameter: Organism Value: A. thaliana
  misc_feature: MA Experiment 20001560 PARAMETER Experiment Name: At_Drought_Soil_Dry_P Parameter: Plant Line Value: WS
  misc_feature: MA Experiment 20001560 PARAMETER Experiment Name: At_Drought_Soil_Dry_P Parameter: Post Timepoint (hr) Value: None
  misc_feature: MA Experiment 20001560 PARAMETER Experiment Name: At_Drought_Soil_Dry_P Parameter: Post-Treatment Value: None
  misc_feature: MA Experiment 20001560 PARAMETER Experiment Name: At_Drought_Soil_Dry_P Parameter: Timepoint (day) Value: 14
  misc_feature: MA Experiment 20001560 PARAMETER Experiment Name: At_Drought_Soil_Dry_P Parameter: Treatment Value: Drought vs. No Drought
  misc_feature: MA Experiment ID: 20001904 Result: Down-regulated in Transcription
  misc_feature: MA Experiment 20001904 PARAMETER Experiment Name: At_Drought_Reproduction_P Parameter: Age (day) Value: 37
  misc_feature: MA Experiment 20001904 PARAMETER Experiment Name: At_Drought_Reproduction_P Parameter: Organism Value: A. thaliana
  misc_feature: MA Experiment 20001904 PARAMETER Experiment Name: At_Drought_Reproduction_P Parameter: Plant Line Value: WS
  misc_feature: MA Experiment 20001904 PARAMETER Experiment Name: At_Drought_Reproduction_P Parameter: Timepoint (day) Value: 7
  misc_feature: MA Experiment 20001904 PARAMETER Experiment Name: At_Drought_Reproduction_P Parameter: Tissue Value: Rosettes
  misc_feature: MA Experiment 20001904 PARAMETER Experiment Name: At_Drought_Reproduction_P Parameter: Treatment Value: Drought vs. No Drought
  misc_feature: MA Experiment ID: 20001905 Result: Down-regulated in Transcription
  misc_feature: MA Experiment 20001905 PARAMETER Experiment Name: At_Drought_Reproduction_P Parameter: Age (day) Value: 40
  misc_feature: MA Experiment 20001905 PARAMETER Experiment Name: At_Drought_Reproduction_P Parameter: Organism Value: A. thaliana
  misc_feature: MA Experiment 20001905 PARAMETER Experiment Name: At_Drought_Reproduction_P Parameter: Plant Line Value: WS
  misc_feature: MA Experiment 20001905 PARAMETER Experiment Name: At_Drought_Reproduction_P Parameter: Timepoint (day) Value: 10
  misc_feature: MA Experiment 20001905 PARAMETER Experiment Name: At_Drought_Reproduction_P Parameter: Tissue Value: Rosettes
  misc_feature: MA Experiment 20001905 PARAMETER Experiment Name: At_Drought_Reproduction_P Parameter: Treatment Value: Drought vs. No Drought
catcgctgtctggaacagcgatgactcgagaaccggcagaagtatgaagaagactaagacttaccaagtcttctgtattgctgcactctctgtcctaactctgcagcttatcaatggttcatcagcagcaacacctccacctccaaatagtaattcttcaacttcttgtaacagagcctgtggaggagtctcaattccgttcccgttcggaatcgggaaggattgttatctcaatggctggtatgaggttatctgcaacacttccacttccgggtcgtctggcacaacggttccgttcctctcacggatcaatagcgaagtggtgaacatctctcttccagatggtaagaaactatatggagtagttcacatcaaaggtccagtgacatcgttgggttgctctagtagtagtagtagcagtcaagtatccgaaatgtcattgccgaatttgaacgtcacaggcaggggaagtccatatttcctcactgatgagaactgcctcgtgatggttggttgtggtacaaaggctttgatgaaggatatagaatcagagatcttgggttgtgaatcgagctgtgaagatagcaagagtagtgaagaagtaacaaactcgaaatgtgacggttacaaatgctgccaggcgagaataccgttggagcgtcctcaggttattggtatcaatatagaaaacactagtgccacaagagggaaagaagggtgtagtgttgcgttcttgactaacaaaaggtatgcgccgatgaatgttaccgagccagaacaattccatgctggtggctacgcagtggttgagctaggttggtactttgatacatcggattcacgctataggaaccccttaggttgtagaaacatgacgcggtacagttcttacagctcctttgataaatgtagttgtgagtatgattacttttctgggatgagttataggatttgctattgcaactatggctacacagggaacccataccttcgacatggctgcatagacatagacgaatgtgaaggacaccacaattgtggagaagggacttgtgtgaacatgcctggaacacatagctgcgagcccaagataacgaaaccggaaaaagcctctgtgcttcaaggtgttcttataagtctaggagtgctgcttttcgtccttggaatcttggggttgtacaaattcattaagaagcgaacgaggatcatccgcaacaaaaactttttcaaacgtaatggtggcttgctgttgaaacaacaactaattacaaagaacggaaatgttgatatgtcaaggatatttagctcaaaagagttgaagaaagctactgataacttcagcatgaacagggtgcttgggcaagggggtcaaggaactgtgtacaagggaatgttggcggaagggagaatcgttgcggttaaaagatcgaaagttgtgggtgaaggcaagatggaagagttcatcaatgaagtcgtacttctctcacaaattaaccataggaacattgtgaaactcttgggatgttgtctagagactgaagttcctgtcttggtttacgaatatattcctaatggagatctgttcaagcgtcttcatgaaaaatctgaatccaatgattacacgatgacttgggaagtacgtcttcgtatagctatagagatagcgggagctctttcatacatgcactcagctgcatcgattccaatataccacagagatatcaagactaccaatatactattagatgaaaaatatagagccaaagtatctgatttcggaacttcaagatccataaccattgctcaaactcatctaacaacgttagttgcaggcacttttgggtatatggatccggagtactttttatcaagccaatatactgacaagagcgatgtttacagtttcggggtggtcttggtggagctcataaccggagaaaaaccactgtcaaggaagaggattggcaactgatttccttgaggccatgaaagagaacagagtgattgacacaattgatattcggatcaaaggagaaagcaagctgtgccaagtgatggcagtcgcaaaactcgctcgaaagtgtcttagcaggaaagggagaaagcggccaaacatgagagaggtttcatttgagctggagaggatccgttcttcatcacctgaagatttagaggtccatgttagaaatgttgatgcagaggaacaaatcatggaaatcaacagagaacgattttgagggtatgtacatgagtgacaagatccattctttatgttaaactagaagttgcccacaaatatgcctttaattgctttcaaaatacgaattaaatacgatgataacttgtagttaaagtctcaacttgatatgtttatagataataaaattttagtg

SEQ ID NO: 37923 - protein, 656 aa, Arabidopsis thaliana
  peptide (1)..(656): Ceres Seq. ID no. 13497069
  misc_feature (60)..(649): Homolog of NCBI NO: 25287654 NR Description: protein F18O14.11 [imported] - Arabidopsis
  misc_feature (19)..(175): Homolog of NCBI NO: 30699443 NR Description: WAK-like kinase (WLK) [Arabidopsis thaliana]
  misc_feature (212)..(653): Homolog of NCBI NO: 30699443 NR Description: WAK-like kinase (WLK) [Arabidopsis thaliana]
  misc_feature (376)..(651): Homolog of NCBI NO: 15219140 NR Description: WAK-like kinase (WLK) [Arabidopsis thaliana]
  misc_feature (15)..(390): Homolog of NCBI NO: 15219140 NR Description: WAK-like kinase (WLK) [Arabidopsis thaliana]
  misc_feature (17)..(653): Homolog of NCBI NO: 15219134 NR Description: WAK-like kinase (WLK) [Arabidopsis thaliana]
  misc_feature (19)..(653): Homolog of NCBI NO: 15219445 NR Description: WAK-like kinase (WLK) [Arabidopsis thaliana]
  misc_feature (103)..(653): Homolog of NCBI NO: 15219137 NR Description: WAK-like kinase (WLK) [Arabidopsis thaliana]
  misc_feature (17)..(653): Homolog of NCBI NO: 15219132 NR Description: WAK-like kinase (WLK) [Arabidopsis thaliana]
  misc_feature (37)..(653): Homolog of NCBI NO: 15219143 NR Description: WAK-like kinase (WLK) [Arabidopsis thaliana]
IAVWNSDDSRTGRSMKKTKTYQVFCIAALSVLTLQLINGSSAATPPPPNSNSSTSCNRACGGVSIPFPFGIGKDCYLNGWYEVICNTSTSGSSGTTVPFLSRINSEVVNISLPDGKKLYGVVHIKGPVTSLGCSSSSSSSQVSEMSLPNLNVTGRGSPYFLTDENCLVMVGCGTKALMKDIESEILGCESSCEDSKSSEEVTNSKCDGYKCCQARIPLERPQVIGINIENTSATRGKEGCSVAFLTNKRYAPMNVTEPEQFHAGGYAVVELGWYFDTSDSRYRNPLGCRNMTRYSSYSSFDKCSCEYDYFSGMSYRICYCNYGYTGNPYLRHGCIDIDECEGHHNCGEGTCVNMPGTHSCEPKITKPEKASVLQGVLISLGVLLFVLGILGLYKFIKKRTRIIRNKNFFKRNGGLLLKQQLITKNGNVDMSRIFSSKELKKATDNFSMNRVLGQGGQGTVYKGMLAEGRIVAVKRSKVVGEGKMEEFINEVVLLSQINHRNIVKLLGCCLETEVPVLVYEYIPNGDLFKRLHEKSESNDYTMTWEVRLRIAIEIAGALSYMHSAASIPIYHRDIKTTNILLDEKYRAKVSDFGTSRSITIAQTHLTTLVAGTFGYMDPEYFLSSQYTDKSDVYSFGVVLVELITGEKPLSRKRIGN

SEQ ID NO: 37924 - protein, 642 aa, Arabidopsis thaliana
  peptide (1)..(642): Ceres Seq. ID no. 13497070
  misc_feature (46)..(635): Homolog of NCBI NO: 25287654 NR Description: protein F18O14.11 [imported] - Arabidopsis
  misc_feature (5)..(161): Homolog of NCBI NO: 30699443 NR Description: WAK-like kinase (WLK) [Arabidopsis thaliana]
  misc_feature (198)..(639): Homolog of NCBI NO: 30699443 NR Description: WAK-like kinase (WLK) [Arabidopsis thaliana]
  misc_feature (362)..(637): Homolog of NCBI NO: 15219140 NR Description: WAK-like kinase (WLK) [Arabidopsis thaliana]
  misc_feature (1)..(376): Homolog of NCBI NO: 15219140 NR Description: WAK-like kinase (WLK) [Arabidopsis thaliana]
  misc_feature (3)..(639): Homolog of NCBI NO: 15219134 NR Description: WAK-like kinase (WLK) [Arabidopsis thaliana]
  misc_feature (5)..(639): Homolog of NCBI NO: 15219445 NR Description: WAK-like kinase (WLK) [Arabidopsis thaliana]
  misc_feature (89)..(639): Homolog of NCBI NO: 15219137 NR Description: WAK-like kinase (WLK) [Arabidopsis thaliana]
  misc_feature (3)..(639): Homolog of NCBI NO: 15219132 NR Description: WAK-like kinase (WLK) [Arabidopsis thaliana]
  misc_feature (23)..(639): Homolog of NCBI NO: 15219143 NR Description: WAK-like kinase (WLK) [Arabidopsis thaliana]
MKKTKTYQVFCIAALSVLTLQLINGSSAATPPPPNSNSSTSCNRACGGVSIPFPFGIGKDCYLNGWYEVICNTSTSGSSGTTVPFLSRINSEVVNISLPDGKKLYGVVHIKGPVTSLGCSSSSSSSQVSEMSLPNLNVTGRGSPYFLTDENCLVMVGCGTKALMKDIESEILGCESSCEDSKSSEEVTNSKCDGYKCCQARIPLERPQVIGINIENTSATRGKEGCSVAFLTNKRYAPMNVTEPEQFHAGGYAVVELGWYFDTSDSRYRNPLGCRNMTRYSSYSSFDKCSCEYDYFSGMSYRICYCNYGYTGNPYLRHGCIDIDECEGHHNCGEGTCVNMPGTHSCEPKITKPEKASVLQGVLISLGVLLFVLGILGLYKFIKKRTRIIRNKNFFKRNGGLLLKQQLITKNGNVDMSRIFSSKELKKATDNFSMNRVLGQGGQGTVYKGMLAEGRIVAVKRSKVVGEGKMEEFINEVVLLSQINHRNIVKLLGCCLETEVPVLVYEYIPNGDLFKRLHEKSESNDYTMTWEVRLRIAIEIAGALSYMHSAASIPIYHRDIKTTNILLDEKYRAKVSDFGTSRSITIAQTHLTTLVAGTFGYMDPEYFLSSQYTDKSDVYSFGVVLVELITGEKPLSRKRIGN

SEQ ID NO: 37925 - protein, 512 aa, Arabidopsis thaliana
  peptide (1)..(512): Ceres Seq. ID no. 13497071
  misc_feature (1)..(505): Homolog of NCBI NO: 25287654 NR Description: protein F18O14.11 [imported] - Arabidopsis
  misc_feature (1)..(31): Homolog of NCBI NO: 30699443 NR Description: WAK-like kinase (WLK) [Arabidopsis thaliana]
  misc_feature (68)..(509): Homolog of NCBI NO: 30699443 NR Description: WAK-like kinase (WLK) [Arabidopsis thaliana]
  misc_feature (232)..(507): Homolog of NCBI NO: 15219140 NR Description: WAK-like kinase (WLK) [Arabidopsis thaliana]
  misc_feature (1)..(246): Homolog of NCBI NO: 15219140 NR Description: WAK-like kinase (WLK) [Arabidopsis thaliana]
  misc_feature (1)..(509): Homolog of NCBI NO: 15219134 NR Description: WAK-like kinase (WLK) [Arabidopsis thaliana]
  misc_feature (1)..(509): Homolog of NCBI NO: 15219445 NR Description: WAK-like kinase (WLK) [Arabidopsis thaliana]
  misc_feature (1)..(509): Homolog of NCBI NO: 15219137 NR Description: WAK-like kinase (WLK) [Arabidopsis thaliana]
  misc_feature (1)..(509): Homolog of NCBI NO: 15219132 NR Description: WAK-like kinase (WLK) [Arabidopsis thaliana]
  misc_feature (1)..(509): Homolog of NCBI NO: 15219143 NR Description: WAK-like kinase (WLK) [Arabidopsis thaliana]
MSLPNLNVTGRGSPYFLTDENCLVMVGCGTKALMKDIESEILGCESSCEDSKSSEEVTNSKCDGYKCCQARIPLERPQVIGINIENTSATRGKEGCSVAFLTNKRYAPMNVTEPEQFHAGGYAVVELGWYFDTSDSRYRNPLGCRNMTRYSSYSSFDKCSCEYDYFSGMSYRICYCNYGYTGNPYLRHGCIDIDECEGHHNCGEGTCVNMPGTHSCEPKITKPEKASVLQGVLISLGVLLFVLGILGLYKFIKKRTRIIRNKNFFKRNGGLLLKQQLITKNGNVDMSRIFSSKELKKATDNFSMNRVLGQGGQGTVYKGMLAEGRIVAVKRSKVVGEGKMEEFINEVVLLSQINHRNIVKLLGCCLETEVPVLVYEYIPNGDLFKRLHEKSESNDYTMTWEVRLRIAIEIAGALSYMHSAASIPIYHRDIKTTNILLDEKYRAKVSDFGTSRSITIAQTHLTTLVAGTFGYMDPEYFLSSQYTDKSDVYSFGVVLVELITGEKPLSRKRIGN

SEQ ID NO: 37926 - DNA, 672 bp, Arabidopsis thaliana
  misc_feature (1)..(672): Ceres Seq. ID no. 12326318
  misc_feature: MA Experiment ID: 20000173 Result: Down-regulated in Transcription
  misc_feature: MA Experiment 20000173 PARAMETER Experiment Name: At_42deg_Heat_P Parameter: Age (day) Value: 14
  misc_feature: MA Experiment 20000173 PARAMETER Experiment Name: At_42deg_Heat_P Parameter: Organism Value: A. thaliana
  misc_feature: MA Experiment 20000173 PARAMETER Experiment Name: At_42deg_Heat_P Parameter: Plant Line Value: WS
  misc_feature: MA Experiment 20000173 PARAMETER Experiment Name: At_42deg_Heat_P Parameter: Temperature (deg C) Value: 42 vs. 22
  misc_feature: MA Experiment 20000173 PARAMETER Experiment Name: At_42deg_Heat_P Parameter: Timepoint (hr) Value: 6
  misc_feature: MA Experiment 20000173 PARAMETER Experiment Name: At_42deg_Heat_P Parameter: Tissue Value: Aerial
  misc_feature: MA Experiment ID: 20000180 Result: Up-regulated in Transcription
  misc_feature: MA Experiment 20000180 PARAMETER Experiment Name: At_Germinating_Seeds_P Parameter: Age (hr) Value: 24 vs. 0
  misc_feature: MA Experiment 20000180 PARAMETER Experiment Name: At_Germinating_Seeds_P Parameter: Tissue Value: Germinating Seeds
  misc_feature: MA Experiment ID: 20000182 Result: Down-regulated in Transcription
  misc_feature: MA Experiment 20000182 PARAMETER Experiment Name: At_2mM_SA_P Parameter: Age (day) Value: 14
  misc_feature: MA Experiment 20000182 PARAMETER Experiment Name: At_2mM_SA_P Parameter: Organism Value: A. thaliana
  misc_feature: MA Experiment 20000182 PARAMETER Experiment Name: At_2mM_SA_P Parameter: Plant Line Value: WS
  misc_feature: MA Experiment 20000182 PARAMETER Experiment Name: At_2mM_SA_P Parameter: Timepoint (hr) Value: 6
  misc_feature: MA Experiment 20000182 PARAMETER Experiment Name: At_2mM_SA_P Parameter: Tissue Value: Aerial
  misc_feature: MA Experiment 20000182 PARAMETER Experiment Name: At_2mM_SA_P Parameter: Treatment Value: 2mM SA vs. No Treatment
  misc_feature: MA Experiment ID: 20000185 Result: Down-regulated in Transcription
  misc_feature: MA Experiment 20000185 PARAMETER Experiment Name: At_Roots__P Parameter: Age (day) Value: 7 vs. 21
  misc_feature: MA Experiment 20000185 PARAMETER Experiment Name: At_Roots__P Parameter: Organism Value: A. thaliana
  misc_feature: MA Experiment 20000185 PARAMETER Experiment Name: At_Roots__P Parameter: Tissue Value: Roots vs. Whole Plant
  misc_feature: MA Experiment ID: 20000227 Result: Down-regulated in Transcription
  misc_feature: MA Experiment 20000227 PARAMETER Experiment Name: At_Root-Tips-vs-Tops_P Parameter: Tissue Value: Root Tips vs. Root Tops
  misc_feature: MA Experiment ID: 20000234 Result: Up-regulated in Transcription
  misc_feature: MA Experiment 20000234 PARAMETER Experiment Name: At_Siliques_P Parameter: Age (day) Value: 21
  misc_feature: MA Experiment 20000234 PARAMETER Experiment Name: At_Siliques_P Parameter: Organism Value: A. thaliana
  misc_feature: MA Experiment 20000234 PARAMETER Experiment Name: At_Siliques_P Parameter: Plant Line Value: WS
  misc_feature: MA Experiment 20000234 PARAMETER Experiment Name: At_Siliques_P Parameter: Tissue Value: Less Than 5mm Siliques vs. Whole Plant
  misc_feature: MA Experiment ID: 20000235 Result: Up-regulated in Transcription
  misc_feature: MA Experiment 20000235 PARAMETER Experiment Name: At_Siliques_P Parameter: Age (day) Value: 21
  misc_feature: MA Experiment 20000235 PARAMETER Experiment Name: At_Siliques_P Parameter: Organism Value: A. thaliana
  misc_feature: MA Experiment 20000235 PARAMETER Experiment Name: At_Siliques_P Parameter: Plant Line Value: WS
  misc_feature: MA Experiment 20000235 PARAMETER Experiment Name: At_Siliques_P Parameter: Tissue Value: 5-10mm Siliques vs. Whole Plant
  misc_feature: MA Experiment ID: 20000265 Result: Up-regulated in Transcription
  misc_feature: MA Experiment 20000265 PARAMETER Experiment Name: At_Open_Flower_P Parameter: Age (day) Value: 21
  misc_feature: MA Experiment 20000265 PARAMETER Experiment Name: At_Open_Flower_P Parameter: Plant Line Value: WS
  misc_feature: MA Experiment 20000265 PARAMETER Experiment Name: At_Open_Flower_P Parameter: Tissue Value: Closed Flower vs. Whole Plant
  misc_feature: MA Experiment ID: 20000436 Result: Down-regulated in Transcription
  misc_feature: MA Experiment 20000436 PARAMETER Experiment Name: At_Drought_P Parameter: Age (day) Value: 7
  misc_feature: MA Experiment 20000436 PARAMETER Experiment Name: At_Drought_P Parameter: Organism Value: A. thaliana
  misc_feature: MA Experiment 20000436 PARAMETER Experiment Name: At_Drought_P Parameter: Plant Line Value: WS
  misc_feature: MA Experiment 20000436 PARAMETER Experiment Name: At_Drought_P Parameter: Timepoint (hr) Value: 12
  misc_feature: MA Experiment 20000436 PARAMETER Experiment Name: At_Drought_P Parameter: Tissue Value: Whole Plant
  misc_feature: MA Experiment 20000436 PARAMETER Experiment Name: At_Drought_P Parameter: Treatment Value: Drought vs. No Drought
  misc_feature: MA Experiment ID: 20000439 Result: Down-regulated in Transcription
  misc_feature: MA Experiment 20000439 PARAMETER Experiment Name: At_Roots__P Parameter: Age (day) Value: 14 vs. 21
  misc_feature: MA Experiment 20000439 PARAMETER Experiment Name: At_Roots__P Parameter: Organism Value: A. thaliana
  misc_feature: MA Experiment 20000439 PARAMETER Experiment Name: At_Roots__P Parameter: Tissue Value: Roots vs. Whole Plant
  misc_feature: MA Experiment ID: 20000451 Result: Down-regulated in Transcription
  misc_feature: MA Experiment 20000451 PARAMETER Experiment Name: At_CS6879_Shoots-Roots_P Parameter: Age (day) Value: 14
  misc_feature: MA Experiment 20000451 PARAMETER Experiment Name: At_CS6879_Shoots-Roots_P Parameter: Organism Value: A. thaliana
  misc_feature: MA Experiment 20000451 PARAMETER Experiment Name: At_CS6879_Shoots-Roots_P Parameter: Plant Line Value: CS6879 vs. WS
  misc_feature: MA Experiment 20000451 PARAMETER Experiment Name: At_CS6879_Shoots-Roots_P Parameter: Tissue Value: Roots
  misc_feature: MA Experiment ID: 20000573 Result: Up-regulated in Transcription
  misc_feature: MA Experiment 20000573 PARAMETER Experiment Name: At_100uM_ABA_Mutants__P Parameter: Organism Value: A. thaliana
  misc_feature: MA Experiment 20000573 PARAMETER Experiment Name: At_100uM_ABA_Mutants__P Parameter: Plant Line Value: CS22 vs. Ler wt
  misc_feature: MA Experiment 20000573 PARAMETER Experiment Name: At_100uM_ABA_Mutants__P Parameter: Timepoint (hr) Value: N/A
  misc_feature: MA Experiment 20000573 PARAMETER Experiment Name: At_100uM_ABA_Mutants__P Parameter: Tissue Value: Whole Plant
  misc_feature: MA Experiment 20000573 PARAMETER Experiment Name: At_100uM_ABA_Mutants__P Parameter: Treatment Value: None
  misc_feature: MA Experiment ID: 20000574 Result: Up-regulated in Transcription
  misc_feature: MA Experiment 20000574 PARAMETER Experiment Name: At_100uM_ABA_Mutants__P Parameter: Organism Value: A. thaliana
  misc_feature: MA Experiment 20000574 PARAMETER Experiment Name: At_100uM_ABA_Mutants__P Parameter: Plant Line Value: CS23 vs. Ler wt
  misc_feature: MA Experiment 20000574 PARAMETER Experiment Name: At_100uM_ABA_Mutants__P Parameter: Timepoint (hr) Value: N/A
  misc_feature: MA Experiment 20000574 PARAMETER Experiment Name: At_100uM_ABA_Mutants__P Parameter: Tissue Value: Whole Plant
  misc_feature: MA Experiment 20000574 PARAMETER Experiment Name: At_100uM_ABA_Mutants__P Parameter: Treatment Value: None
  misc_feature: MA Experiment ID: 20001451 Result: Up-regulated in Transcription
  misc_feature: MA Experiment 20001451 PARAMETER Experiment Name: At_Far-red-induction_P Parameter: Age (day) Value: 7
  misc_feature: MA Experiment 20001451 PARAMETER Experiment Name: At_Far-red-induction_P Parameter: Light Value: Far-red vs. White
  misc_feature: MA Experiment 20001451 PARAMETER Experiment Name: At_Far-red-induction_P Parameter: Organism Value: A. thaliana
  misc_feature: MA Experiment 20001451 PARAMETER Experiment Name: At_Far-red-induction_P Parameter: Plant Line Value: Columbia
  misc_feature: MA Experiment 20001451 PARAMETER Experiment Name: At_Far-red-induction_P Parameter: Timepoint (hr) Value: 24
  misc_feature: MA Experiment 20001451 PARAMETER Experiment Name: At_Far-red-induction_P Parameter: Tissue Value: Whole Plant
  misc_feature: MA Experiment ID: 20001757 Result: Up-regulated in Transcription
  misc_feature: MA Experiment 20001757 PARAMETER Experiment Name: At_50mM_NH4NO3_L-to-H_P Parameter: Timepoint (hr) Value: 6
  misc_feature: MA Experiment 20001757 PARAMETER Experiment Name: At_50mM_NH4NO3_L-to-H_P Parameter: Tissue Value: Leaf
  misc_feature: MA Experiment 20001757 PARAMETER Experiment Name: At_50mM_NH4NO3_L-to-H_P Parameter: Treatment Value: 50mM NH4NO3 vs 100mM Mannitol
  misc_feature: MA Experiment ID: 20001906 Result: Down-regulated in Transcription
  misc_feature: MA Experiment 20001906 PARAMETER Experiment Name: At_Drought_Reproduction_P Parameter: Age (day) Value: 35
  misc_feature: MA Experiment 20001906 PARAMETER Experiment Name: At_Drought_Reproduction_P Parameter: Organism Value: A. thaliana
  misc_feature: MA Experiment 20001906 PARAMETER Experiment Name: At_Drought_Reproduction_P Parameter: Plant Line Value: WS
  misc_feature: MA Experiment 20001906 PARAMETER Experiment Name: At_Drought_Reproduction_P Parameter: Timepoint (day) Value: 5
  misc_feature: MA Experiment 20001906 PARAMETER Experiment Name: At_Drought_Reproduction_P Parameter: Tissue Value: Siliques
  misc_feature: MA Experiment 20001906 PARAMETER Experiment Name: At_Drought_Reproduction_P Parameter: Treatment Value: Drought vs. No Drought
atcaaaataaaaggaaaaaaaaaaaaaatctttgagatgagacttgttctctctggtgcctcttctttcacctccaaccttttttgttcctcccaacaggtcaatggaagaggaaaagaactgaaaaacccaatttctctaaaccacaacaaagatttggactttctgttaaagaagttagctccgccactcacggcggttttacttgctgtttcacccatctgtttccctccagaatctcttgggcagactttggatatacagagaggagctacattgtttaatagagcttgtatcgggtgtcatgatacaggtggaaacattattcaaccgggtgcaacgcttttcacaaaagacctcgaaagaaatggagttgatactgaggaagaaatatatcgtgttacctactttggaaagggaagaatgccgggatttggtgagaaatgcacaccgagaggacaatgtacctttggaccgcggttgcaggacgaagaaatcaagcttctcgctgaatttgtaaagtttcaagctgaccaaggctggccaactgtatctaccgactagcaactaggcgttcgtcttgtgagcgtttttgtaatccaattaatccatagggttgtatctacttacacttataactattccttctgggaggtttcattgcaattgctc

SEQ ID NO: 37927 - protein, 187 aa, Arabidopsis thaliana
  peptide (1)..(187): Ceres Seq. ID no. 12326319
  misc_feature (57)..(181): Homolog of NCBI NO: 23040173 NR Description: hypothetical protein [Trichodesmium erythraeum
  misc_feature (57)..(181): Homolog of NCBI NO: 20141074 NR Description: Cytochrome C6 precursor (Soluble cytochrome f)
  misc_feature (67)..(181): Homolog of NCBI NO: 22652035 NR Description: putative cytochrome c6-2 [Synechococcus sp. PCC
  misc_feature (86)..(181): Homolog of NCBI NO: 117923 NR Description: Cytochrome C6 (Soluble cytochrome f) (Cytochrome
  misc_feature (67)..(181): Homolog of NCBI NO: 37521549 NR Description: cytochrome c6 [Gloeobacter violaceus]
  misc_feature (56)..(145): Homolog of NCBI NO: 33862735 NR Description: Cytochrome c, class IC:Cytochrome c, class I
  misc_feature (118)..(187): Homolog of NCBI NO: 34393286 NR Description: cytochrome C6, chloroplast precursor-like protein
  misc_feature (58)..(187): Homolog of NCBI NO: 34899810 NR Description: putative c6 type cytochrome
  misc_feature (79)..(187): Homolog of NCBI NO: 10177496 NR Description: gene_id:K21C13.23~unknown protein [Arabidopsis
  misc_feature (13)..(187): Homolog of NCBI NO: 18422509 NR Description: expressed protein
  misc_feature (57)..(181): Homolog of NCBI NO: 23040173 NR Description: hypothetical protein [Trichodesmium erythraeum
  misc_feature (57)..(181): Homolog of NCBI NO: 20141074 NR Description: Cytochrome C6 precursor (Soluble cytochrome f)
  misc_feature (67)..(181): Homolog of NCBI NO: 22652035 NR Description: putative cytochrome c6-2 [Synechococcus sp. PCC
  misc_feature (86)..(181): Homolog of NCBI NO: 117923 NR Description: Cytochrome C6 (Soluble cytochrome f) (Cytochrome
  misc_feature (67)..(181): Homolog of NCBI NO: 37521549 NR Description: cytochrome c6 [Gloeobacter violaceus]
  misc_feature (56)..(145): Homolog of NCBI NO: 33862735 NR Description: Cytochrome c, class IC:Cytochrome c, class I
  misc_feature (118)..(187): Homolog of NCBI NO: 34393286 NR Description: cytochrome C6, chloroplast precursor-like protein
  misc_feature (58)..(187): Homolog of NCBI NO: 34899810 NR Description: putative c6 type cytochrome
  misc_feature (79)..(187): Homolog of NCBI NO: 10177496 NR Description: gene_id:K21C13.23~unknown protein [Arabidopsis
  misc_feature (13)..(187): Homolog of NCBI NO: 18422509 NR Description: expressed protein
IKIKGKKKKIFEMRLVLSGASSFTSNLFCSSQQVNGRGKELKNPISLNHNKDLDFLLKKLAPPLTAVLLAVSPICFPPESLGQTLDIQRGATLFNRACIGCHDTGGNIIQPGATLFTKDLERNGVDTEEEIYRVTYFGKGRMPGFGEKCTPRGQCTFGPRLQDEEIKLLAEFVKFQADQGWPTVSTD

SEQ ID NO: 37928 - protein, 175 aa, Arabidopsis thaliana
  peptide (1)..(175): Ceres Seq. ID no. 12326320
  misc_feature (45)..(169): Homolog of NCBI NO: 23040173 NR Description: hypothetical protein [Trichodesmium erythraeum
  misc_feature (45)..(169): Homolog of NCBI NO: 20141074 NR Description: Cytochrome C6 precursor (Soluble cytochrome f)
  misc_feature (55)..(169): Homolog of NCBI NO: 22652035 NR Description: putative cytochrome c6-2 [Synechococcus sp. PCC
  misc_feature (74)..(169): Homolog of NCBI NO: 117923 NR Description: Cytochrome C6 (Soluble cytochrome f) (Cytochrome
  misc_feature (55)..(169): Homolog of NCBI NO: 37521549 NR Description: cytochrome c6 [Gloeobacter violaceus]
  misc_feature (44)..(133): Homolog of NCBI NO: 33862735 NR Description: Cytochrome c, class IC:Cytochrome c, class I
  misc_feature (106)..(175): Homolog of NCBI NO: 34393286 NR Description: cytochrome C6, chloroplast precursor-like protein
  misc_feature (46)..(175): Homolog of NCBI NO: 34899810 NR Description: putative c6 type cytochrome
  misc_feature (67)..(175): Homolog of NCBI NO: 10177496 NR Description: gene_id:K21C13.23~unknown protein [Arabidopsis
  misc_feature (1)..(175): Homolog of NCBI NO: 18422509 NR Description: expressed protein
  misc_feature (45)..(169): Homolog of NCBI NO: 23040173 NR Description: hypothetical protein [Trichodesmium erythraeum
  misc_feature (45)..(169): Homolog of NCBI NO: 20141074 NR Description: Cytochrome C6 precursor (Soluble cytochrome f)
  misc_feature (55)..(169): Homolog of NCBI NO: 22652035 NR Description: putative cytochrome c6-2 [Synechococcus sp. PCC
  misc_feature (74)..(169): Homolog of NCBI NO: 117923 NR Description: Cytochrome C6 (Soluble cytochrome f) (Cytochrome
  misc_feature (55)..(169): Homolog of NCBI NO: 37521549 NR Description: cytochrome c6 [Gloeobacter violaceus]
  misc_feature (44)..(133): Homolog of NCBI NO: 33862735 NR Description: Cytochrome c, class IC:Cytochrome c, class I
  misc_feature (106)..(175): Homolog of NCBI NO: 34393286 NR Description: cytochrome C6, chloroplast precursor-like protein
  misc_feature (46)..(175): Homolog of NCBI NO: 34899810 NR Description: putative c6 type cytochrome
  misc_feature (67)..(175): Homolog of NCBI NO: 10177496 NR Description: gene_id:K21C13.23~unknown protein [Arabidopsis
  misc_feature (1)..(175): Homolog of NCBI NO: 18422509 NR Description: expressed protein
MRLVLSGASSFTSNLFCSSQQVNGRGKELKNPISLNHNKDLDFLLKKLAPPLTAVLLAVSPICFPPESLGQTLDIQRGATLFNRACIGCHDTGGNIIQPGATLFTKDLERNGVDTEEEIYRVTYFGKGRMPGFGEKCTPRGQCTFGPRLQDEEIKLLAEFVKFQADQGWPTVSTD

SEQ ID NO: 37929 - DNA, 1704 bp, Arabidopsis thaliana; identical to SEQ ID NO: 21904
  misc_feature (1)..(1704): Ceres Seq. ID no. 12321264
  misc_feature: MA Experiment ID: 108435 Result: Up-regulated in Transcription
  misc_feature: MA Experiment 108435 PARAMETER Experiment Name: At_stm_Mutants_cDNA_P Parameter: Plant Line Value: wt Landsburg vs stm
  misc_feature: MA Experiment 108435 PARAMETER Experiment Name: At_stm_Mutants_cDNA_P Parameter: Tissue Value: Shoot Apical Meristem Region
  misc_feature: MA Experiment ID: 108461 Result: Down-regulated in Transcription
  misc_feature: MA Experiment 108461 PARAMETER Experiment Name: At_Germinating_Seeds_cDNA_P Parameter: Age (day) Value: 1 vs. 0
  misc_feature: MA Experiment 108461 PARAMETER Experiment Name: At_Germinating_Seeds_cDNA_P Parameter: Tissue Value: Germinating Seeds
  misc_feature: MA Experiment ID: 108462 Result: Down-regulated in Transcription
  misc_feature: MA Experiment 108462 PARAMETER Experiment Name: At_Germinating_Seeds_cDNA_P Parameter: Age (day) Value: 2 vs. 0
  misc_feature: MA Experiment 108462 PARAMETER Experiment Name: At_Germinating_Seeds_cDNA_P Parameter: Tissue Value: Germinating Seeds
  misc_feature: MA Experiment ID: 108463 Result: Down-regulated in Transcription
  misc_feature: MA Experiment 108463 PARAMETER Experiment Name: At_Germinating_Seeds_cDNA_P Parameter: Age (day) Value: 3 vs. 0
  misc_feature: MA Experiment 108463 PARAMETER Experiment Name: At_Germinating_Seeds_cDNA_P Parameter: Tissue Value: Germinating Seeds
  misc_feature: MA Experiment ID: 108464 Result: Down-regulated in Transcription
  misc_feature: MA Experiment 108464 PARAMETER Experiment Name: At_Germinating_Seeds_cDNA_P Parameter: Age (day) Value: 4 vs. 0
  misc_feature: MA Experiment 108464 PARAMETER Experiment Name: At_Germinating_Seeds_cDNA_P Parameter: Tissue Value: Germinating Seeds
  misc_feature: MA Experiment ID: 108489 Result: Up-regulated in Transcription
  misc_feature: MA Experiment ID: 20000185 Result: Up-regulated in Transcription
  misc_feature: MA Experiment 20000185 PARAMETER Experiment Name: At_Roots__P Parameter: Age (day) Value: 7 vs. 21
  misc_feature: MA Experiment 20000185 PARAMETER Experiment Name: At_Roots__P Parameter: Organism Value: A. thaliana
  misc_feature: MA Experiment 20000185 PARAMETER Experiment Name: At_Roots__P Parameter: Tissue Value: Roots vs. Whole Plant
  misc_feature: MA Experiment ID: 20000439 Result: Up-regulated in Transcription
  misc_feature: MA Experiment 20000439 PARAMETER Experiment Name: At_Roots__P Parameter: Age (day) Value: 14 vs. 21
  misc_feature: MA Experiment 20000439 PARAMETER Experiment Name: At_Roots__P Parameter: Organism Value: A. thaliana
  misc_feature: MA Experiment 20000439 PARAMETER Experiment Name: At_Roots__P Parameter: Tissue Value: Roots vs. Whole Plant
  misc_feature: MA Experiment ID: 20001458 Result: Up-regulated in Transcription
  misc_feature: MA Experiment 20001458 PARAMETER Experiment Name: At_50mM_NH4NO3_L-to-H_P Parameter: Age (day) Value: Undefined
  misc_feature: MA Experiment 20001458 PARAMETER Experiment Name: At_50mM_NH4NO3_L-to-H_P Parameter: Organism Value: Undefined
  misc_feature: MA Experiment 20001458 PARAMETER Experiment Name: At_50mM_NH4NO3_L-to-H_P Parameter: Plant Line Value: Undefined
  misc_feature: MA Experiment 20001458 PARAMETER Experiment Name: At_50mM_NH4NO3_L-to-H_P Parameter: Timepoint (hr) Value: 2
  misc_feature: MA Experiment 20001458 PARAMETER Experiment Name: At_50mM_NH4NO3_L-to-H_P Parameter: Tissue Value: Siliques
  misc_feature: MA Experiment 20001458 PARAMETER Experiment Name: At_50mM_NH4NO3_L-to-H_P Parameter: Treatment Value: 50mM NH4NO3 vs. 100mM Manitol
  misc_feature: MA Experiment ID: 20001459 Result: Up-regulated in Transcription
  misc_feature: MA Experiment 20001459 PARAMETER Experiment Name: At_50mM_NH4NO3_L-to-H_P Parameter: Age (day) Value: Undefined
  misc_feature: MA Experiment 20001459 PARAMETER Experiment Name: At_50mM_NH4NO3_L-to-H_P Parameter: Organism Value: Undefined
  misc_feature: MA Experiment 20001459 PARAMETER Experiment Name: At_50mM_NH4NO3_L-to-H_P Parameter: Plant Line Value: Undefined
  misc_feature: MA Experiment 20001459 PARAMETER Experiment Name: At_50mM_NH4NO3_L-to-H_P Parameter: Timepoint (hr) Value: 4
  misc_feature: MA Experiment 20001459 PARAMETER Experiment Name: At_50mM_NH4NO3_L-to-H_P Parameter: Tissue Value: Siliques
  misc_feature: MA Experiment 20001459 PARAMETER Experiment Name: At_50mM_NH4NO3_L-to-H_P Parameter: Treatment Value: 50mM NH4NO3 vs. 100mM Manitol

SEQ ID NO: 37930 - protein, 438 aa, Arabidopsis thaliana; identical to SEQ ID NO: 21905
  peptide (1)..(438): Ceres Seq. ID no. 12321265
  misc_feature (87)..(426): Pfam Name: Transaldolase Pfam Description: Transaldolase
  misc_feature (87)..(426): Pfam Name: Transaldolase Pfam Description: Transaldolase
  misc_feature (77)..(433): Homolog of NCBI NO: 37522946 NR Description: transaldolase [Gloeobacter violaceus]
  misc_feature (84)..(423): Homolog of NCBI NO: 29828309 NR Description: putative transaldolase [Streptomyces avermitilis
  misc_feature (84)..(433): Homolog of NCBI NO: 21220422 NR Description: putative transaldolase [Streptomyces coelicolor
  misc_feature (83)..(433): Homolog of NCBI NO: 29832856 NR Description: putative transaldolase [Streptomyces avermitilis
  misc_feature (59)..(117): Homolog of NCBI NO: 34907042 NR Description: putative transaldolase [Oryza sativa (japonica
  misc_feature (77)..(433): Homolog of NCBI NO: 37522946 NR Description: transaldolase [Gloeobacter violaceus]
  misc_feature (84)..(433): Homolog of NCBI NO: 21220422 NR Description: putative transaldolase [Streptomyces coelicolor
  misc_feature (59)..(117): Homolog of NCBI NO: 34907042 NR Description: putative transaldolase [Oryza sativa (japonica
  misc_feature (1)..(438): Homolog of NCBI NO: 15240625 NR Description: transaldolase - like protein
  misc_feature (1)..(437): Homolog of NCBI NO: 7489279 NR Description: transaldolase (EC 2.2.1.2) - potato
  misc_feature (1)..(437): Homolog of NCBI NO: 10441272 NR Description: transaldolase [Lycopersicon esculentum]
  misc_feature (1)..(437): Homolog of NCBI NO: 32481059 NR Description: transaldolase [Lycopersicon esculentum]
  misc_feature (117)..(434): Homolog of NCBI NO: 34907042 NR Description: putative transaldolase [Oryza sativa (japonica
  misc_feature (83)..(433): Homolog of NCBI NO: 29832856 NR Description: putative transaldolase [Streptomyces avermitilis
  misc_feature (84)..(423): Homolog of NCBI NO: 29828309 NR Description: putative transaldolase [Streptomyces avermitilis
  misc_feature (117)..(434): Homolog of NCBI NO: 34907042 NR Description: putative transaldolase [Oryza sativa (japonica
  misc_feature (1)..(437): Homolog of NCBI NO: 32481059 NR Description: transaldolase [Lycopersicon esculentum]
  misc_feature (1)..(437): Homolog of NCBI NO: 10441272 NR Description: transaldolase [Lycopersicon esculentum]
  misc_feature (1)..(437): Homolog of NCBI NO: 7489279 NR Description: transaldolase (EC 2.2.1.2) - potato
  misc_feature (1)..(438): Homolog of NCBI NO: 15240625 NR Description: transaldolase - like protein

SEQ ID NO: 37931 - DNA, 766 bp, Arabidopsis thaliana
  misc_feature (1)..(766): Ceres Seq. ID no. 12370152
  misc_feature: MA Experiment ID: 108473 Result: Up-regulated in Transcription
  misc_feature: MA Experiment 108473 PARAMETER Experiment Name: At_Drought_Flowers_cDNA_P Parameter: Timepoint (hr) Value: 7 d
  misc_feature: MA Experiment 108473 PARAMETER Experiment Name: At_Drought_Flowers_cDNA_P Parameter: Tissue Value: Flower
  misc_feature: MA Experiment 108473 PARAMETER Experiment Name: At_Drought_Flowers_cDNA_P Parameter: Treatment Value: Drought vs. No Drought
  misc_feature: MA Experiment ID: 108501 Result: Down-regulated in Transcription
  misc_feature: MA Experiment 108501 PARAMETER Experiment Name: At_ap2_floral_buds_cDNA_P Parameter: Plant Line Value: ap2 (Ler.)
  misc_feature: MA Experiment 108501 PARAMETER Experiment Name: At_ap2_floral_buds_cDNA_P Parameter: Tissue Value: Closed Flower
  misc_feature: MA Experiment ID: 108561 Result: Up-regulated in Transcription
  misc_feature: MA Experiment 108561 PARAMETER Experiment Name: At_100uM_ABA_cDNA_P Parameter: Timepoint (hr) Value: 6
  misc_feature: MA Experiment 108561 PARAMETER Experiment Name: At_100uM_ABA_cDNA_P Parameter: Tissue Value: Aerial
  misc_feature: MA Experiment 108561 PARAMETER Experiment Name: At_100uM_ABA_cDNA_P Parameter: Treatment Value: 100uM ABA vs. No Treatment
  misc_feature: MA Experiment ID: 108573 Result: Up-regulated in Transcription
  misc_feature: MA Experiment 108573 PARAMETER Experiment Name: At_Drought_cDNA_P Parameter: Timepoint (hr) Value: 6
  misc_feature: MA Experiment 108573 PARAMETER Experiment Name: At_Drought_cDNA_P Parameter: Tissue Value: Aerial
  misc_feature: MA Experiment 108573 PARAMETER Experiment Name: At_Drought_cDNA_P Parameter: Treatment Value: Drought vs. No Drought
  misc_feature: MA Experiment ID: 108579 Result: Up-regulated in Transcription
  misc_feature: MA Experiment 108579 PARAMETER Experiment Name: At_4deg_Cold_cDNA_P Parameter: Temperature (deg C) Value: 4 vs. 22
  misc_feature: MA Experiment 108579 PARAMETER Experiment Name: At_4deg_Cold_cDNA_P Parameter: Timepoint (hr) Value: 6
  misc_feature: MA Experiment 108579 PARAMETER Experiment Name: At_4deg_Cold_cDNA_P Parameter: Tissue Value: Aerial
  misc_feature: MA Experiment ID: 108595 Result: Up-regulated in Transcription
  misc_feature: MA Experiment 108595 PARAMETER Experiment Name: At_Ler-pi_Ovule_cDNA_P Parameter: Plant Line Value: null
  misc_feature: MA Experiment ID: 20000072 Result: Up-regulated in Transcription
  misc_feature: MA Experiment 20000072 PARAMETER Experiment Name: At_100uM_ABA_Mutants_cDNA_P Parameter: Plant Line Value: CS8105
  misc_feature: MA Experiment 20000072 PARAMETER Experiment Name: At_100uM_ABA_Mutants_cDNA_P Parameter: Timepoint (hr) Value: 6
  misc_feature: MA Experiment 20000072 PARAMETER Experiment Name: At_100uM_ABA_Mutants_cDNA_P Parameter: Tissue Value: Aerial
  misc_feature: MA Experiment 20000072 PARAMETER Experiment Name: At_100uM_ABA_Mutants_cDNA_P Parameter: Treatment Value: 100uM ABA vs. No Treatment
  misc_feature: MA Experiment ID: 20000087 Result: Up-regulated in Transcription
  misc_feature: MA Experiment 20000087 PARAMETER Experiment Name: At_100uM_ABA_Mutants_cDNA_P Parameter: Plant Line Value: WS
  misc_feature: MA Experiment 20000087 PARAMETER Experiment Name: At_100uM_ABA_Mutants_cDNA_P Parameter: Timepoint (hr) Value: 6
  misc_feature: MA Experiment 20000087 PARAMETER Experiment Name: At_100uM_ABA_Mutants_cDNA_P Parameter: Tissue Value: Aerial
  misc_feature: MA Experiment 20000087 PARAMETER Experiment Name: At_100uM_ABA_Mutants_cDNA_P Parameter: Treatment Value: 100uM ABA vs. No Treatment
  misc_feature: MA Experiment ID: 20001911 Result: Up-regulated in Transcription
  misc_feature: MA Experiment 20001911 PARAMETER Experiment Name: At_Drought_Reproduction_P Parameter: Age (day) Value: 40
  misc_feature: MA Experiment 20001911 PARAMETER Experiment Name: At_Drought_Reproduction_P Parameter: Organism Value: A. thaliana
  misc_feature: MA Experiment 20001911 PARAMETER Experiment Name: At_Drought_Reproduction_P Parameter: Plant Line Value: WS
  misc_feature: MA Experiment 20001911 PARAMETER Experiment Name: At_Drought_Reproduction_P Parameter: Timepoint (day) Value: 10
  misc_feature: MA Experiment 20001911 PARAMETER Experiment Name: At_Drought_Reproduction_P Parameter: Tissue Value: Flowers
  misc_feature: MA Experiment 20001911 PARAMETER Experiment Name: At_Drought_Reproduction_P Parameter: Treatment Value: Drought vs. No Drought
atggccggtgaacaaaaaaaaaaaaaaaaaagccaaaggagcattggtatctcaaacaatatttgccctttctctatctctctctcatcactatttgccatctctttctctctccctctctttcaaatgtcaataaaccaatactcaagcgatttccactaccattctctcatgtggcaacaacagcagcaacaacaacaacaccaaaacgacgtcgtggaagaaaaagaagctcttttcgagaaacccttaaccccaagtgacgtcggaaaactcaaccgcctcgtcatcccaaaacagcacgccgagagatacttcccactagcggccgccgccgcagacgccgtggagaaaggacttctcctctgctttgaggacgaggaaggtaaaccatggagattcagatactcgtactggaacagtagccagagttatgtcttgaccaaaggctggagcagatacgtcaaggagaagcaccttgacgccggagacgtcgttctcttccatcgacaccgttcagacggcggaagattcttcattggctggagaagacgcggtgactcttcttcctcctccgactcttatcgccatgttcaatccaatgcctcgctccaatattatcctcatgcaggtaccctttttatttaattaaacttttttttgtgtcataaccaaaaaaatttgaacctaaattcagattaatcttgaacaaaaaatgtcgaatatctttgacatttaaaggtgtagtgaaacacaatagtttttc

SEQ ID NO: 37932 - protein, 215 aa, Arabidopsis thaliana
  peptide (1)..(215): Ceres Seq. ID no. 12370153
  misc_feature (79)..(188): Pfam Name: B3 DNA binding domain Pfam Description: B3 DNA binding domain
  misc_feature (58)..(185): Homolog of NCBI NO: 26450371 NR Description: putative RAV [Arabidopsis thaliana]
  misc_feature (58)..(185): Homolog of NCBI NO: 15228649 NR Description: RAV-like protein
  misc_feature (71)..(187): Homolog of NCBI NO: 32492293 NR Description: OSJNBa0088A01.1 [Oryza sativa (japonica
  misc_feature (75)..(187): Homolog of NCBI NO: 34902226 NR Description: Putative RAV-like B3 domain DNA binding protein
  misc_feature (53)..(191): Homolog of NCBI NO: 30681791 NR Description: DNA-binding protein, putative [Arabidopsis
  misc_feature (53)..(191): Homolog of NCBI NO: 30681787 NR Description: DNA-binding protein, putative [Arabidopsis
  misc_feature (43)..(210): Homolog of NCBI NO: 15239984 NR Description: putative protein; protein id: At5g06250.1
  misc_feature (58)..(215): Homolog of NCBI NO: 25408446 NR Description: probable RAV2-like DNA binding protein
  misc_feature (43)..(211): Homolog of NCBI NO: 30686669 NR Description: DNA-binding protein, putative [Arabidopsis
  misc_feature (43)..(215): Homolog of NCBI NO: 30686674 NR Description: DNA-binding protein, putative [Arabidopsis
MAGEQKKKKKSQRSIGISNNICPFSISLSSLFAISFSLPLFQMSINQYSSDFHYHSLMWQQQQQQQQHQNDVVEEKEALFEKPLTPSDVGKLNRLVIPKQHAERYFPLAAAAADAVEKGLLLCFEDEEGKPWRFRYSYWNSSQSYVLTKGWSRYVKEKHLDAGDVVLFHRHRSDGGRFFIGWRRRGDSSSSSDSYRHVQSNASLQYYPHAGTLFI

SEQ ID NO: 37933 - protein, 173 aa, Arabidopsis thaliana
  peptide (1)..(173): Ceres Seq. ID no. 12370154
  misc_feature (37)..(146): Pfam Name: B3 DNA binding domain Pfam Description: B3 DNA binding domain
  misc_feature (16)..(143): Homolog of NCBI NO: 26450371 NR Description: putative RAV [Arabidopsis thaliana]
  misc_feature (16)..(143): Homolog of NCBI NO: 15228649 NR Description: RAV-like protein
  misc_feature (29)..(145): Homolog of NCBI NO: 32492293 NR Description: OSJNBa0088A01.1 [Oryza sativa (japonica
  misc_feature (33)..(145): Homolog of NCBI NO: 34902226 NR Description: Putative RAV-like B3 domain DNA binding protein
  misc_feature (11)..(149): Homolog of NCBI NO: 30681791 NR Description: DNA-binding protein, putative [Arabidopsis
  misc_feature (11)..(149): Homolog of NCBI NO: 30681787 NR Description: DNA-binding protein, putative [Arabidopsis
  misc_feature (1)..(168): Homolog of NCBI NO: 15239984 NR Description: putative protein; protein id: At5g06250.1
  misc_feature (16)..(173): Homolog of NCBI NO: 25408446 NR Description: probable RAV2-like DNA binding protein
  misc_feature (1)..(169): Homolog of NCBI NO: 30686669 NR Description: DNA-binding protein, putative [Arabidopsis
  misc_feature (1)..(173): Homolog of NCBI NO: 30686674 NR Description: DNA-binding protein, putative [Arabidopsis
MSINQYSSDFHYHSLMWQQQQQQQQHQNDVVEEKEALFEKPLTPSDVGKLNRLVIPKQHAERYFPLAAAAADAVEKGLLLCFEDEEGKPWRFRYSYWNSSQSYVLTKGWSRYVKEKHLDAGDVVLFHRHRSDGGRFFIGWRRRGDSSSSSDSYRHVQSNASLQYYPHAGTLFI

SEQ ID NO: 37934 - protein, 158 aa, Arabidopsis thaliana
  peptide (1)..(158): Ceres Seq. ID no. 12370155
  misc_feature (22)..(131): Pfam Name: B3 DNA binding domain Pfam Description: B3 DNA binding domain
  misc_feature (1)..(128): Homolog of NCBI NO: 26450371 NR Description: putative RAV [Arabidopsis thaliana]
  misc_feature (1)..(128): Homolog of NCBI NO: 15228649 NR Description: RAV-like protein
  misc_feature (14)..(130): Homolog of NCBI NO: 32492293 NR Description: OSJNBa0088A01.1 [Oryza sativa (japonica
  misc_feature (18)..(130): Homolog of NCBI NO: 34902226 NR Description: Putative RAV-like B3 domain DNA binding protein
  misc_feature (1)..(134): Homolog of NCBI NO: 30681791 NR Description: DNA-binding protein, putative [Arabidopsis
  misc_feature (1)..(134): Homolog of NCBI NO: 30681787 NR Description: DNA-binding protein, putative [Arabidopsis
  misc_feature (1)..(153): Homolog of NCBI NO: 15239984 NR Description: putative protein; protein id: At5g06250.1
  misc_feature (1)..(158): Homolog of NCBI NO: 25408446 NR Description: probable RAV2-like DNA binding protein
  misc_feature (1)..(154): Homolog of NCBI NO: 30686669 NR Description: DNA-binding protein, putative [Arabidopsis
  misc_feature (1)..(158): Homolog of NCBI NO: 30686674 NR Description: DNA-binding protein, putative [Arabidopsis
MWQQQQQQQQHQNDVVEEKEALFEKPLTPSDVGKLNRLVIPKQHAERYFPLAAAAADAVEKGLLLCFEDEEGKPWRFRYSYWNSSQSYVLTKGWSRYVKEKHLDAGDVVLFHRHRSDGGRFFIGWRRRGDSSSSSDSYRHVQSNASLQYYPHAGTLFI

SEQ ID NO: 37935 - DNA, 618 bp, Arabidopsis thaliana
  misc_feature (1)..(618): Ceres Seq. ID no. 13592989
  misc_feature: MA Experiment ID: 20001807 Result: Up-regulated in Transcription
  misc_feature: MA Experiment 20001807 PARAMETER Experiment Name: At_50mM_NH4NO3_L-to-H_Sub_P Parameter: Timepoint (hr) Value: 6
  misc_feature: MA Experiment 20001807 PARAMETER Experiment Name: At_50mM_NH4NO3_L-to-H_Sub_P Parameter: Tissue Value: Leaf
  misc_feature: MA Experiment 20001807 PARAMETER Experiment Name: At_50mM_NH4NO3_L-to-H_Sub_P Parameter: Treatment Value: 50mM NH4NO3 vs 100mM Mannitol
cccactctgtgcattaggtttcattttagcggcagacgagagagctaaagcaaggagcaaccctaaccatggcgactcaaccagctactgaatctgtgcaatgcttcggaaggaagaagaccgcagtggccgtcactcactgcaagcgtggatctggtttgatcaagctcaacggttgcccaatcgagcttttccagcctgagatcctccgattcaagatcttcgagccggttcttctcctcggaaagcaccgtttcgctggtgtgaacatgaggatccgtgtcaacggtggtggtcacacatcccaggtttacgccatccgtcagagtatcgcgaaggctcttgttgcgtactaccagaagtatgtggatgagcagtcgaagaaggagattaaggatatcttggtgaggtatgataggactctgcttgtggcggatccgaggaggtgtgagactctttagattttataatttctgctttattatgcttgttggattatggtgattctccaagaaacttatgttttgttatgtctactattttcttatttttatttcattgtcttgttggtatttactctcaaaaaaaaaaaaaaaaaagcttatcgataccgtcgac

SEQ ID NO: 37936 - protein, 130 aa, Arabidopsis thaliana
  peptide (1)..(130): Ceres Seq. ID no. 13592990
  misc_feature (14)..(128): Pfam Name: Ribosomal protein S9/S16 Pfam Description: Ribosomal protein S9/S16
  misc_feature (1)..(129): Homolog of NCBI NO: 15294045 NR Description: 40S ribosomal protein S16 [Ictalurus punctatus]
  misc_feature (1)..(129): Homolog of NCBI NO: 4506691 NR Description: ribosomal protein S16; 40S ribosomal protein S16
  misc_feature (1)..(129): Homolog of NCBI NO: 39850096 NR Description: Unknown (protein for IMAGE:6887619) [Rattus
  misc_feature (6)..(128): Homolog of NCBI NO: 17369864 NR Description: 40S ribosomal protein S16
  misc_feature (4)..(128): Homolog of NCBI NO: 1173209 NR Description: 40S RIBOSOMAL PROTEIN S16
  misc_feature (1)..(128): Homolog of NCBI NO: 3122800 NR Description: 40S RIBOSOMAL PROTEIN S16
  misc_feature (2)..(128): Homolog of NCBI NO: 6984222 NR Description: 40S ribosomal protein S16 [Euphorbia esula]
  misc_feature (1)..(129): Homolog of NCBI NO: 15229252 NR Description: 40S ribosomal protein S16 (RPS16B) [Arabidopsis
  misc_feature (1)..(128): Homolog of NCBI NO: 15226676 NR Description: 40S ribosomal protein S16 (RPS16A) [Arabidopsis
  misc_feature (1)..(128): Homolog of NCBI NO: 15238809 NR Description: 40S ribosomal protein S16 (RPS16C) [Arabidopsis
MATQPATESVQCFGRKKTAVAVTHCKRGSGLIKLNGCPIELFQPEILRFKIFEPVLLLGKHRFAGVNMRIRVNGGGHTSQVYAIRQSIAKALVAYYQKYVDEQSKKEIKDILVRYDRTLLVADPRRCETL

SEQ ID NO: 37937 - DNA, 798 bp, Arabidopsis thaliana
  misc_feature (1)..(798): Ceres Seq. ID no. 12341925
  misc_feature: MA Experiment ID: 108595 Result: Down-regulated in Transcription
  misc_feature: MA Experiment 108595 PARAMETER Experiment Name: At_Ler-pi_Ovule_cDNA_P Parameter: Plant Line Value: null
  misc_feature: MA Experiment ID: 20000224 Result: Down-regulated in Transcription
  misc_feature: MA Experiment ID: 20000495 Result: Down-regulated in Transcription
  misc_feature: MA Experiment 20000495 PARAMETER Experiment Name: At_Guard_Cells_P Parameter: Harvest Date Value: 8/2/2002
  misc_feature: MA Experiment 20000495 PARAMETER Experiment Name: At_Guard_Cells_P Parameter: Organism Value: A. thaliana
  misc_feature: MA Experiment 20000495 PARAMETER Experiment Name: At_Guard_Cells_P Parameter: Tissue Value: Guard Cells vs. Leaves
  misc_feature: MA Experiment ID: 20000794 Result: Up-regulated in Transcription
  misc_feature: MA Experiment 20000794 PARAMETER Experiment Name: At_Petals_P Parameter: Age (day) Value: 23-25 days
  misc_feature: MA Experiment 20000794 PARAMETER Experiment Name: At_Petals_P Parameter: Plant Line Value: WS
  misc_feature: MA Experiment 20000794 PARAMETER Experiment Name: At_Petals_P Parameter: Tissue Value: Petals vs. Whole plant
attgcaaccatttctctgctgtttcttcgtcgtttagcttcagaggacgacaatacgctgtgtgtgtgggtgtgagtttcttaagagaagtcagaaacaatgattgggttgtttaaagtaaaggaaaagcaaagagaacaagctcaaaatgctactagaggaggagcttctgttaagaagcaatctgctggcgaacttcgtcttcacaaagatatatcagagttgaaccttcctagctcttgttcaatatcttttccaaatggcaaagatgatttgatgaactttgaagtatccattaaacctgatgatggatattaccacaatggtacgtttgttttcacattccaagtctctcctgtgtatccacatgaagctccaaaagttaaatgcaaaaccaaggtttatcatcccaatatcgatttggaaggaaacgtttgcctgaacatcttgcgtgaagattggaaacctgttcttaacattaacacagttatctacggactcttccatctgttcacggaacccaattctgaagatcccttgaaccatgatgctgcagcagttttgagggataacccaaagctctttgagaccaatgttcgcagggccatgaccggtggatatgtcggtcagacctttttcccgcgttgtatctaacaaagctctggtttgtcttcttcaaggaaaaagataagaaccaaaccctttgtccgccattgtatttcttctctttctcaaggaccctcgtttgtttgtttgatcttgtaaaattacattccgcgttaaagtaaccctttcctt

SEQ ID NO: 37938 - protein, 184 aa, Arabidopsis thaliana; identical to SEQ ID NO: 21522
  peptide (1)..(184): Ceres Seq. ID no. 12341926
  misc_feature (1)..(184): Homolog of NCBI NO: 30585323 NR Description: Homo sapiens ubiquitin-conjugating enzyme E2M
  misc_feature (1)..(184): Homolog of NCBI NO: 4507791 NR Description: ubiquitin-conjugating enzyme E2M (UBC12 homolog,
  misc_feature (1)..(174): Homolog of NCBI NO: 32400752 NR Description: RUB1-conjugating enzyme [Triticum aestivum]
  misc_feature (1)..(184): Homolog of NCBI NO: 40253382 NR Description: putative RUB1 conjugating enzyme
  misc_feature (31)..(184): Homolog of NCBI NO: 10946511 NR Description: RUB1 conjugating enzyme [Lycopersicon esculentum]
  misc_feature (1)..(183): Homolog of NCBI NO: 37531910 NR Description: putative ubiquitin-conjugating enzyme
  misc_feature (1)..(184): Homolog of NCBI NO: 26000688 NR Description: RUB1 conjugating enzyme [Olea europaea]
  misc_feature (1)..(184): Homolog of NCBI NO: 18398792 NR Description: RUB1-conjugating enzyme, putative; protein id:
  misc_feature (1)..(184): Homolog of NCBI NO: 25407764 NR Description: ubiquitin-protein ligase-like protein
  misc_feature (1)..(184): Homolog of NCBI NO: 6635457 NR Description: RUB1 conjugating enzyme [Arabidopsis thaliana]

SEQ ID NO: 37939 - protein, 125 aa, Arabidopsis thaliana; identical to SEQ ID NO: 21523
  peptide (1)..(125): Ceres Seq. ID no. 12341927
  misc_feature (1)..(125): Homolog of NCBI NO: 30585323 NR Description: Homo sapiens ubiquitin-conjugating enzyme E2M
  misc_feature (1)..(125): Homolog of NCBI NO: 4507791 NR Description: ubiquitin-conjugating enzyme E2M (UBC12 homolog,
  misc_feature (1)..(115): Homolog of NCBI NO: 32400752 NR Description: RUB1-conjugating enzyme [Triticum aestivum]
  misc_feature (1)..(125): Homolog of NCBI NO: 40253382 NR Description: putative RUB1 conjugating enzyme
  misc_feature (1)..(125): Homolog of NCBI NO: 10946511 NR Description: RUB1 conjugating enzyme [Lycopersicon esculentum]
  misc_feature (1)..(124): Homolog of NCBI NO: 37531910 NR Description: putative ubiquitin-conjugating enzyme
  misc_feature (1)..(125): Homolog of NCBI NO: 26000688 NR Description: RUB1 conjugating enzyme [Olea europaea]
  misc_feature (1)..(125): Homolog of NCBI NO: 18398792 NR Description: RUB1-conjugating enzyme, putative; protein id:
  misc_feature (1)..(125): Homolog of NCBI NO: 25407764 NR Description: ubiquitin-protein ligase-like protein
  misc_feature (1)..(125): Homolog of NCBI NO: 6635457 NR Description: RUB1 conjugating enzyme [Arabidopsis thaliana]

SEQ ID NO: 37940 - DNA, 734 bp, Arabidopsis thaliana
  misc_feature (1)..(734): Ceres Seq. ID no. 12326850
  misc_feature: MA Experiment ID: 108595 Result: Up-regulated in Transcription
  misc_feature: MA Experiment 108595 PARAMETER Experiment Name: At_Ler-pi_Ovule_cDNA_P Parameter: Plant Line Value: null
  misc_feature: MA Experiment ID: 20000113 Result: Up-regulated in Transcription
  misc_feature: MA Experiment 20000113 PARAMETER Experiment Name: At_42deg_Heat_cDNA_P Parameter: Temperature (deg C) Value: 42 vs. 22
  misc_feature: MA Experiment 20000113 PARAMETER Experiment Name: At_42deg_Heat_cDNA_P Parameter: Timepoint (hr) Value: 8
  misc_feature: MA Experiment 20000113 PARAMETER Experiment Name: At_42deg_Heat_cDNA_P Parameter: Tissue Value: Aerial
  misc_feature: MA Experiment ID: 20000264 Result: Up-regulated in Transcription
  misc_feature: MA Experiment 20000264 PARAMETER Experiment Name: At_Open_Flower_P Parameter: Age (day) Value: 21
  misc_feature: MA Experiment 20000264 PARAMETER Experiment Name: At_Open_Flower_P Parameter: Plant Line Value: WS
  misc_feature: MA Experiment 20000264 PARAMETER Experiment Name: At_Open_Flower_P Parameter: Tissue Value: Open Flower vs. Whole Plant
  misc_feature: MA Experiment ID: 20000265 Result: Up-regulated in Transcription
  misc_feature: MA Experiment 20000265 PARAMETER Experiment Name: At_Open_Flower_P Parameter: Age (day) Value: 21
  misc_feature: MA Experiment 20000265 PARAMETER Experiment Name: At_Open_Flower_P Parameter: Plant Line Value: WS
  misc_feature: MA Experiment 20000265 PARAMETER Experiment Name: At_Open_Flower_P Parameter: Tissue Value: Closed Flower vs. Whole Plant
  misc_feature: MA Experiment ID: 20000794 Result: Up-regulated in Transcription
  misc_feature: MA Experiment 20000794 PARAMETER Experiment Name: At_Petals_P Parameter: Age (day) Value: 23-25 days
  misc_feature: MA Experiment 20000794 PARAMETER Experiment Name: At_Petals_P Parameter: Plant Line Value: WS
  misc_feature: MA Experiment 20000794 PARAMETER Experiment Name: At_Petals_P Parameter: Tissue Value: Petals vs. Whole plant
  misc_feature: MA Experiment ID: 20001910 Result: Up-regulated in Transcription
  misc_feature: MA Experiment 20001910 PARAMETER Experiment Name: At_Drought_Reproduction_P Parameter: Age (day) Value: 37
  misc_feature: MA Experiment 20001910 PARAMETER Experiment Name: At_Drought_Reproduction_P Parameter: Organism Value: A. thaliana
  misc_feature: MA Experiment 20001910 PARAMETER Experiment Name: At_Drought_Reproduction_P Parameter: Plant Line Value: WS
  misc_feature: MA Experiment 20001910 PARAMETER Experiment Name: At_Drought_Reproduction_P Parameter: Timepoint (day) Value: 7
  misc_feature: MA Experiment 20001910 PARAMETER Experiment Name: At_Drought_Reproduction_P Parameter: Tissue Value: Flowers
  misc_feature: MA Experiment 20001910 PARAMETER Experiment Name: At_Drought_Reproduction_P Parameter: Treatment Value: Drought vs. No Drought
aggttggttcctcgtgagagaaagtctttccctctaatttctctagagagacagagagagagagatagctagagatgggtgcttctgcttcggttcccgagagatccgtccatcaattcactgtaaaggatagctccggcaaggacctgaatatgagcatttaccaagggaaagtcctcctcatcgtcaatgttgcttccaaatgcggtttcaccgaaacaaactatacacagctcaccgaactttaccggaaatacaaggaccaagattttgagatcttggcattcccttgcaaccagtttctataccaggagcccggcacaagtcaagaggctcatgaatttgcctgcgaacgctttaaggccgaataccctgttttccaaaaggtacgcgtaaacggtcaaaacgcagcaccaatctataaattccttaaggcaagtaaacccacctttctgggttccagaattaagtggaacttcaccaagttcttggtcggcaaagatggcttagtgattgatcgttatggcacgatggttacaccgctatcaatcgagaaagacatcaagaaagctcttgaagacgcttgaaaacaacagacgagattgccaattaacaatcacggttaattttgtaatgtaaattgcagcttttatgtcgaaatttctttttggacatgtttctctgtttagtgtataaaaaaagaattccttttggaagagtaggttgctgttttc

SEQ ID NO: 37941 - protein, 170 aa, Arabidopsis thaliana
  peptide (1)..(170): Ceres Seq. ID no. 12326851
  misc_feature (11)..(120): Pfam Name: Glutathione peroxidase Pfam Description: Glutathione peroxidase
  misc_feature (5)..(167): Homolog of NCBI NO: 21360380 NR Description: glutathione peroxidase 1 [Oryza sativa]
  misc_feature (1)..(167): Homolog of NCBI NO: 34334012 NR Description: cytosolic glutathione peroxidase [Triticum
  misc_feature (1)..(167): Homolog of NCBI NO: 6179604 NR Description: glutathione peroxidase-like protein GPX54Hv
  misc_feature (1)..(167): Homolog of NCBI NO: 22268405 NR Description: putative glutathione peroxidase [Zea mays]
  misc_feature (1)..(167): Homolog of NCBI NO: 6179600 NR Description: GPX12Hv, glutathione peroxidase-like protein
  misc_feature (1)..(167): Homolog of NCBI NO: 27544804 NR Description: phospholipid hydroperoxide glutathione
  misc_feature (1)..(169): Homolog of NCBI NO: 11544696 NR Description: putative phospholipid hydroperoxide glutathione
  misc_feature (1)..(167): Homolog of NCBI NO: 15229378 NR Description: glutathione peroxidase, putative
  misc_feature (1)..(163): Homolog of NCBI NO: 25285637 NR Description: probable glutathione peroxidase [imported] -
  misc_feature (1)..(170): Homolog of NCBI NO: 18407538 NR Description: glutathione peroxidase, putative
MGASASVPERSVHQFTVKDSSGKDLNMSIYQGKVLLIVNVASKCGFTETNYTQLTELYRKYKDQDFEILAFPCNQFLYQEPGTSQEAHEFACERFKAEYPVFQKVRVNGQNAAPIYKFLKASKPTFLGSRIKWNFTKFLVGKDGLVIDRYGTMVTPLSIEKDIKKALEDA

SEQ ID NO: 37942 - protein, 144 aa, Arabidopsis thaliana
  peptide (1)..(144): Ceres Seq. ID no. 12326852
  misc_feature (1)..(94): Pfam Name: Glutathione peroxidase Pfam Description: Glutathione peroxidase
  misc_feature (1)..(141): Homolog of NCBI NO: 21360380 NR Description: glutathione peroxidase 1 [Oryza sativa]
  misc_feature (1)..(141): Homolog of NCBI NO: 34334012 NR Description: cytosolic glutathione peroxidase [Triticum
  misc_feature (1)..(141): Homolog of NCBI NO: 6179604 NR Description: glutathione peroxidase-like protein GPX54Hv
  misc_feature (1)..(141): Homolog of NCBI NO: 22268405 NR Description: putative glutathione peroxidase [Zea mays]
  misc_feature (1)..(141): Homolog of NCBI NO: 6179600 NR Description: GPX12Hv, glutathione peroxidase-like protein
  misc_feature (1)..(141): Homolog of NCBI NO: 27544804 NR Description: phospholipid hydroperoxide glutathione
  misc_feature (1)..(143): Homolog of NCBI NO: 11544696 NR Description: putative phospholipid hydroperoxide glutathione
  misc_feature (1)..(141): Homolog of NCBI NO: 15229378 NR Description: glutathione peroxidase, putative
  misc_feature (1)..(137): Homolog of NCBI NO: 25285637 NR Description: probable glutathione peroxidase [imported] -
  misc_feature (1)..(144): Homolog of NCBI NO: 18407538 NR Description: glutathione peroxidase, putative
MSIYQGKVLLIVNVASKCGFTETNYTQLTELYRKYKDQDFEILAFPCNQFLYQEPGTSQEAHEFACERFKAEYPVFQKVRVNGQNAAPIYKFLKASKPTFLGSRIKWNFTKFLVGKDGLVIDRYGTMVTPLSIEKDIKKALEDA

SEQ ID NO: 37943 - DNA, 885 bp, Arabidopsis thaliana; identical to SEQ ID NO: 35877
  misc_feature (1)..(885): Ceres Seq. ID no. 13492248
  misc_feature: MA Experiment ID: 108433 Result: Down-regulated in Transcription
  misc_feature: MA Experiment 108433 PARAMETER Experiment Name: At_rhl_Mutant2_cDNA_P Parameter: Age (day) Value: 7
  misc_feature: MA Experiment 108433 PARAMETER Experiment Name: At_rhl_Mutant2_cDNA_P Parameter: Organism Value: A. thaliana
  misc_feature: MA Experiment 108433 PARAMETER Experiment Name: At_rhl_Mutant2_cDNA_P Parameter: Plant Line Value: rhl Mutant vs. wt landsburg
  misc_feature: MA Experiment 108433 PARAMETER Experiment Name: At_rhl_Mutant2_cDNA_P Parameter: Tissue Value: Roots
  misc_feature: MA Experiment ID: 108462 Result: Down-regulated in Transcription
  misc_feature: MA Experiment 108462 PARAMETER Experiment Name: At_Germinating_Seeds_cDNA_P Parameter: Age (day) Value: 2 vs. 0
  misc_feature: MA Experiment 108462 PARAMETER Experiment Name: At_Germinating_Seeds_cDNA_P Parameter: Tissue Value: Germinating Seeds
  misc_feature: MA Experiment ID: 108463 Result: Down-regulated in Transcription
  misc_feature: MA Experiment 108463 PARAMETER Experiment Name: At_Germinating_Seeds_cDNA_P Parameter: Age (day) Value: 3 vs. 0
  misc_feature: MA Experiment 108463 PARAMETER Experiment Name: At_Germinating_Seeds_cDNA_P Parameter: Tissue Value: Germinating Seeds
  misc_feature: MA Experiment ID: 108464 Result: Down-regulated in Transcription
  misc_feature: MA Experiment 108464 PARAMETER Experiment Name: At_Germinating_Seeds_cDNA_P Parameter: Age (day) Value: 4 vs. 0
  misc_feature: MA Experiment 108464 PARAMETER Experiment Name: At_Germinating_Seeds_cDNA_P Parameter: Tissue Value: Germinating Seeds
  misc_feature: MA Experiment ID: 108585 Result: Up-regulated in Transcription
  misc_feature: MA Experiment 108585 PARAMETER Experiment Name: At_5mM_NaNP_cDNA_P Parameter: Timepoint (hr) Value: 6
  misc_feature: MA Experiment 108585 PARAMETER Experiment Name: At_5mM_NaNP_cDNA_P Parameter: Tissue Value: Aerial
  misc_feature: MA Experiment 108585 PARAMETER Experiment Name: At_5mM_NaNP_cDNA_P Parameter: Treatment Value: null
  misc_feature: MA Experiment ID: 20000113 Result: Up-regulated in Transcription
  misc_feature: MA Experiment 20000113 PARAMETER Experiment Name: At_42deg_Heat_cDNA_P Parameter: Temperature (deg C) Value: 42 vs. 22
  misc_feature: MA Experiment 20000113 PARAMETER Experiment Name: At_42deg_Heat_cDNA_P Parameter: Timepoint (hr) Value: 8
  misc_feature: MA Experiment 20000113 PARAMETER Experiment Name: At_42deg_Heat_cDNA_P Parameter: Tissue Value: Aerial
  misc_feature: MA Experiment ID: 20000224 Result: Down-regulated in Transcription
  misc_feature: MA Experiment ID: 20001557 Result: Up-regulated in Transcription
  misc_feature: MA Experiment 20001557 PARAMETER Experiment Name: At_Drought_Soil_Dry_P Parameter: Age (day) Value: 27
  misc_feature: MA Experiment 20001557 PARAMETER Experiment Name: At_Drought_Soil_Dry_P Parameter: Organism Value: A. thaliana
  misc_feature: MA Experiment 20001557 PARAMETER Experiment Name: At_Drought_Soil_Dry_P Parameter: Plant Line Value: WS
  misc_feature: MA Experiment 20001557 PARAMETER Experiment Name: At_Drought_Soil_Dry_P Parameter: Post Timepoint (hr) Value: 3
  misc_feature: MA Experiment 20001557 PARAMETER Experiment Name: At_Drought_Soil_Dry_P Parameter: Post-Treatment Value: Re-Water vs. No Drought
  misc_feature: MA Experiment 20001557 PARAMETER Experiment Name: At_Drought_Soil_Dry_P Parameter: Timepoint (day) Value: 13
  misc_feature: MA Experiment 20001557 PARAMETER Experiment Name: At_Drought_Soil_Dry_P Parameter: Treatment Value: Drought vs. No Drought

SEQ ID NO: 37944 - protein, 167 aa, Arabidopsis thaliana; identical to SEQ ID NO: 35878
  peptide (1)..(167): Ceres Seq. ID no. 13492249
  misc_feature (21)..(167): Homolog of NCBI NO: 136647 NR Description: Ubiquitin-conjugating enzyme E2 7
  misc_feature (34)..(166): Homolog of NCBI NO: 18424219 NR Description: ubiquitin-conjugating enzyme 7 (UBC7)
  misc_feature (5)..(166): Homolog of NCBI NO: 7437988 NR Description: ubiquitin-conjugating enzyme - maize
  misc_feature (4)..(167): Homolog of NCBI NO: 7437989 NR Description: ubiquitin-conjugating enzyme E2 - maize
  misc_feature (4)..(167): Homolog of NCBI NO: 34908132 NR Description: putative Ubiquitin carrier protein UBC7
  misc_feature (3)..(166): Homolog of NCBI NO: 18408206 NR Description: ubiquitin-conjugating enzyme 13 (UBC13)
  misc_feature (4)..(166): Homolog of NCBI NO: 31088843 NR Description: Ubiquitin-conjugating enzyme E2 7
  misc_feature (1)..(166): Homolog of NCBI NO: 28973769 NR Description: putative E2, ubiquitin-conjugating enzyme UBC7
  misc_feature (1)..(166): Homolog of NCBI NO: 19347846 NR Description: putative E2, ubiquitin-conjugating enzyme UBC7
  misc_feature (1)..(167): Homolog of NCBI NO: 18410268 NR Description: ubiquitin-conjugating enzyme 14 (UBC14)
  misc_feature (21)..(167): Homolog of NCBI NO: 136647 NR Description: Ubiquitin-conjugating enzyme E2 7
  misc_feature (34)..(166): Homolog of NCBI NO: 18424219 NR Description: ubiquitin-conjugating enzyme 7 (UBC7)
  misc_feature (5)..(166): Homolog of NCBI NO: 7437988 NR Description: ubiquitin-conjugating enzyme - maize
  misc_feature (4)..(167): Homolog of NCBI NO: 7437989 NR Description: ubiquitin-conjugating enzyme E2 - maize
  misc_feature (4)..(167): Homolog of NCBI NO: 34908132 NR Description: putative Ubiquitin carrier protein UBC7
  misc_feature (3)..(166): Homolog of NCBI NO: 18408206 NR Description: ubiquitin-conjugating enzyme 13 (UBC13)
  misc_feature (4)..(166): Homolog of NCBI NO: 31088843 NR Description: Ubiquitin-conjugating enzyme E2 7
  misc_feature (1)..(166): Homolog of NCBI NO: 28973769 NR Description: putative E2, ubiquitin-conjugating enzyme UBC7
  misc_feature (1)..(166): Homolog of NCBI NO: 19347846 NR Description: putative E2, ubiquitin-conjugating enzyme UBC7
  misc_feature (1)..(167): Homolog of NCBI NO: 18410268 NR Description: ubiquitin-conjugating enzyme 14 (UBC14)

SEQ ID NO: 37945 - protein, 125 aa, Arabidopsis thaliana; identical to SEQ ID NO: 35879
  peptide (1)..(125): Ceres Seq. ID no. 13492250
  misc_feature (1)..(125): Homolog of NCBI NO: 136647 NR Description: Ubiquitin-conjugating enzyme E2 7
  misc_feature (1)..(124): Homolog of NCBI NO: 18424219 NR Description: ubiquitin-conjugating enzyme 7 (UBC7)
  misc_feature (1)..(124): Homolog of NCBI NO: 7437988 NR Description: ubiquitin-conjugating enzyme - maize
  misc_feature (1)..(125): Homolog of NCBI NO: 7437989 NR Description: ubiquitin-conjugating enzyme E2 - maize
  misc_feature (1)..(125): Homolog of NCBI NO: 34908132 NR Description: putative Ubiquitin carrier protein UBC7
  misc_feature (1)..(124): Homolog of NCBI NO: 18408206 NR Description: ubiquitin-conjugating enzyme 13 (UBC13)
  misc_feature (1)..(124): Homolog of NCBI NO: 31088843 NR Description: Ubiquitin-conjugating enzyme E2 7
  misc_feature (1)..(124): Homolog of NCBI NO: 28973769 NR Description: putative E2, ubiquitin-conjugating enzyme UBC7
  misc_feature (1)..(124): Homolog of NCBI NO: 19347846 NR Description: putative E2, ubiquitin-conjugating enzyme UBC7
  misc_feature (1)..(125): Homolog of NCBI NO: 18410268 NR Description: ubiquitin-conjugating enzyme 14 (UBC14)
  misc_feature (1)..(125): Homolog of NCBI NO: 136647 NR Description: Ubiquitin-conjugating enzyme E2 7
  misc_feature (1)..(124): Homolog of NCBI NO: 18424219 NR Description: ubiquitin-conjugating enzyme 7 (UBC7)
  misc_feature (1)..(124): Homolog of NCBI NO: 7437988 NR Description: ubiquitin-conjugating enzyme - maize
  misc_feature (1)..(125): Homolog of NCBI NO: 7437989 NR Description: ubiquitin-conjugating enzyme E2 - maize
  misc_feature (1)..(125): Homolog of NCBI NO: 34908132 NR Description: putative Ubiquitin carrier protein UBC7
  misc_feature (1)..(124): Homolog of NCBI NO: 18408206 NR Description: ubiquitin-conjugating enzyme 13 (UBC13)
  misc_feature (1)..(124): Homolog of NCBI NO: 31088843 NR Description: Ubiquitin-conjugating enzyme E2 7
  misc_feature (1)..(124): Homolog of NCBI NO: 28973769 NR Description: putative E2, ubiquitin-conjugating enzyme UBC7
  misc_feature (1)..(124): Homolog of NCBI NO: 19347846 NR Description: putative E2, ubiquitin-conjugating enzyme UBC7
  misc_feature (1)..(125): Homolog of NCBI NO: 18410268 NR Description: ubiquitin-conjugating enzyme 14 (UBC14)

SEQ ID NO: 37946 - protein, 109 aa, Arabidopsis thaliana; identical to SEQ ID NO: 35880
  peptide (1)..(109): Ceres Seq. ID no. 13492251
  misc_feature (1)..(109): Homolog of NCBI NO: 136647 NR Description: Ubiquitin-conjugating enzyme E2 7
  misc_feature (1)..(108): Homolog of NCBI NO: 18424219 NR Description: ubiquitin-conjugating enzyme 7 (UBC7)
  misc_feature (1)..(108): Homolog of NCBI NO: 7437988 NR Description: ubiquitin-conjugating enzyme - maize
  misc_feature (1)..(109): Homolog of NCBI NO: 7437989 NR Description: ubiquitin-conjugating enzyme E2 - maize
  misc_feature (1)..(109): Homolog of NCBI NO: 34908132 NR Description: putative Ubiquitin carrier protein UBC7
  misc_feature (1)..(108): Homolog of NCBI NO: 18408206 NR Description: ubiquitin-conjugating enzyme 13 (UBC13)
  misc_feature (1)..(108): Homolog of NCBI NO: 31088843 NR Description: Ubiquitin-conjugating enzyme E2 7
  misc_feature (1)..(108): Homolog of NCBI NO: 28973769 NR Description: putative E2, ubiquitin-conjugating enzyme UBC7
  misc_feature (1)..(108): Homolog of NCBI NO: 19347846 NR Description: putative E2, ubiquitin-conjugating enzyme UBC7
  misc_feature (1)..(109): Homolog of NCBI NO: 18410268 NR Description: ubiquitin-conjugating enzyme 14 (UBC14)
  misc_feature (1)..(109): Homolog of NCBI NO: 136647 NR Description: Ubiquitin-conjugating enzyme E2 7
  misc_feature (1)..(108): Homolog of NCBI NO: 18424219 NR Description: ubiquitin-conjugating enzyme 7 (UBC7)
  misc_feature (1)..(108): Homolog of NCBI NO: 7437988 NR Description: ubiquitin-conjugating enzyme - maize
  misc_feature (1)..(109): Homolog of NCBI NO: 7437989 NR Description: ubiquitin-conjugating enzyme E2 - maize
  misc_feature (1)..(109): Homolog of NCBI NO: 34908132 NR Description: putative Ubiquitin carrier protein UBC7
  misc_feature (1)..(108): Homolog of NCBI NO: 18408206 NR Description: ubiquitin-conjugating enzyme 13 (UBC13)
  misc_feature (1)..(108): Homolog of NCBI NO: 31088843 NR Description: Ubiquitin-conjugating enzyme E2 7
  misc_feature (1)..(108): Homolog of NCBI NO: 28973769 NR Description: putative E2, ubiquitin-conjugating enzyme UBC7
  misc_feature (1)..(108): Homolog of NCBI NO: 19347846 NR Description: putative E2, ubiquitin-conjugating enzyme UBC7
  misc_feature (1)..(109): Homolog of NCBI NO: 18410268 NR Description: ubiquitin-conjugating enzyme 14 (UBC14)

SEQ ID NO: 37947 - DNA, 1572 bp, Arabidopsis thaliana
  misc_feature (1)..(1572): Ceres Seq. ID no. 12339826
  misc_feature: MA Experiment ID: 108433 Result: Down-regulated in Transcription
  misc_feature: MA Experiment 108433 PARAMETER Experiment Name: At_rhl_Mutant2_cDNA_P Parameter: Age (day) Value: 7
  misc_feature: MA Experiment 108433 PARAMETER Experiment Name: At_rhl_Mutant2_cDNA_P Parameter: Organism Value: A. thaliana
  misc_feature: MA Experiment 108433 PARAMETER Experiment Name: At_rhl_Mutant2_cDNA_P Parameter: Plant Line Value: rhl Mutant vs. wt landsburg
  misc_feature: MA Experiment 108433 PARAMETER Experiment Name: At_rhl_Mutant2_cDNA_P Parameter: Tissue Value: Roots
  misc_feature: MA Experiment ID: 108434 Result: Up-regulated in Transcription
  misc_feature: MA Experiment 108434 PARAMETER Experiment Name: At_Root_Tips_cDNA_P Parameter: Tissue Value: Root Tips
  misc_feature: MA Experiment ID: 108462 Result: Down-regulated in Transcription
  misc_feature: MA Experiment 108462 PARAMETER Experiment Name: At_Germinating_Seeds_cDNA_P Parameter: Age (day) Value: 2 vs. 0
  misc_feature: MA Experiment 108462 PARAMETER Experiment Name: At_Germinating_Seeds_cDNA_P Parameter: Tissue Value: Germinating Seeds
  misc_feature: MA Experiment ID: 108463 Result: Down-regulated in Transcription
  misc_feature: MA Experiment 108463 PARAMETER Experiment Name: At_Germinating_Seeds_cDNA_P Parameter: Age (day) Value: 3 vs. 0
  misc_feature: MA Experiment 108463 PARAMETER Experiment Name: At_Germinating_Seeds_cDNA_P Parameter: Tissue Value: Germinating Seeds
  misc_feature: MA Experiment ID: 108464 Result: Down-regulated in Transcription
  misc_feature: MA Experiment 108464 PARAMETER Experiment Name: At_Germinating_Seeds_cDNA_P Parameter: Age (day) Value: 4 vs. 0
  misc_feature: MA Experiment 108464 PARAMETER Experiment Name: At_Germinating_Seeds_cDNA_P Parameter: Tissue Value: Germinating Seeds
  misc_feature: MA Experiment ID: 108595 Result: Down-regulated in Transcription
  misc_feature: MA Experiment 108595 PARAMETER Experiment Name: At_Ler-pi_Ovule_cDNA_P Parameter: Plant Line Value: null
  misc_feature: MA Experiment ID: 20000224 Result: Down-regulated in Transcription
  misc_feature: MA Experiment ID: 20001451 Result: Down-regulated in Transcription
  misc_feature: MA Experiment 20001451 PARAMETER Experiment Name: At_Far-red-induction_P Parameter: Age (day) Value: 7
  misc_feature: MA Experiment 20001451 PARAMETER Experiment Name: At_Far-red-induction_P Parameter: Light Value: Far-red vs. White
  misc_feature: MA Experiment 20001451 PARAMETER Experiment Name: At_Far-red-induction_P Parameter: Organism Value: A. thaliana
  misc_feature: MA Experiment 20001451 PARAMETER Experiment Name: At_Far-red-induction_P Parameter: Plant Line Value: Columbia
  misc_feature: MA Experiment 20001451 PARAMETER Experiment Name: At_Far-red-induction_P Parameter: Timepoint (hr) Value: 24
  misc_feature: MA Experiment 20001451 PARAMETER Experiment Name: At_Far-red-induction_P Parameter: Tissue Value: Whole Plant
acaagagtacaagagagaaagaaaggaacctcgaactcagagaaattgagagaagagagaagaatcatgggacaaggaccatcgggaggattgaatcggcaaggagatcggaaacctgatggtggagataagaaagagaagaagtttgagccggcggcaccaccggctcgtgtagggaggaagcaaaggaagcagaaagggccagaggcggcggcgagacttccgacggtgactccgtctactaagtgtaagctccggttactgaaattggaacggatcaaggattatttgttgatggaggaagagtttgtggcgaatcaagagaggttgaaacctcaggaagagaaagctgaggaagatagatctaaggttgatgatcttcgtggtacacctatgagtgttgggaatttggaagagttgattgatgagaatcacgctattgtttcttcttctgttggacctgagtactacgttgggattttgtccttcgttgataaagatcagcttgaacctggatgttcgattttgatgcataataaggttctctctgttgttgggattctacaagatgaagtggatccaatggtgtctgtgatgaaagttgagaaagctcctttggagtcatatgctgatattggaggtttagaagctcagattcaggagattaaggaagctgttgagcttcctttgactcatcctgagttgtatgaagatattggtattaaaccaccaaagggtgtaattttgtatggtgagcctggaactgggaagacattgcttgctaaggcggttgcgaattcaacatcagctactttcttgagagttgttggtagtgagctgattcagaagtatttgggagatggtcctaagcttgtgagagaacttttcagagttgctgatgacctttcaccatcaatcgtcttcatagatgagattgatgctgttggtaccaagcggtatgacgctcactcaggaggtgaacgtgagatccaaagaactatgttggaacttctgaaccagcttgatggatttgattcaagaggagatgttaaggtcatccttgcaacaaacagaatcgagagtcttgacccagcactgcttcgacctggacggattgataggaaaatcgagttccctctcccagatatcaaaacaagaagacgtatcttccagatacacacatcgaagatgactctctcggaagatgtaaacctcgaagagtttgtgatgacgaaagacgagttctcaggagctgatataaaggctatatgcactgaggctggtctactagctctcagggagcgtcgtatgaaggtgacacatcctgatttcaagaaagcaaaggagaaggttatgttcaagaagaaagaaggcgtccctgaaggcctctacatgtaaaattataatcatatcgtcatcatcggctttcctcctccacactttgttataatacttttgcttctgcttaggatctttctggtcatataaattgatcatgttttctgatctcctccggtaaaacaattcctcatttccatttaggatgtctatttcgcattaaacttaaccaac

SEQ ID NO: 37948 - protein, 465 aa, Arabidopsis thaliana
  peptide (1)..(465): Ceres Seq. ID no. 12339827
  misc_feature (246)..(433): Pfam Name: ATPase family associated with various cellular Pfam Description: ATPase family associated with various cellular
  misc_feature (23)..(465): Homolog of NCBI NO: 1066065 NR Description: P26s4 [Drosophila melanogaster]
  misc_feature (23)..(465): Homolog of NCBI NO: 18479040 NR Description: 26S proteasome regulatory subunit IV [Tortula
  misc_feature (23)..(465): Homolog of NCBI NO: 17297987 NR Description: 26S proteasome regulatory particle triple-A
  misc_feature (23)..(465): Homolog of NCBI NO: 1172635 NR Description: 26S PROTEASE REGULATORY SUBUNIT 4 HOMOLOG
  misc_feature (23)..(465): Homolog of NCBI NO: 21593177 NR Description: 26S proteasome subunit 4 [Arabidopsis thaliana]
  misc_feature (23)..(465): Homolog of NCBI NO: 11045086 NR Description: 26S proteasome subunit 4-like protein [Brassica
  misc_feature (23)..(465): Homolog of NCBI NO: 13937244 NR Description: At2g20140/T2G17.6 [Arabidopsis thaliana]
  misc_feature (23)..(465): Homolog of NCBI NO: 15225307 NR Description: 26S proteasome subunit 4
  misc_feature (23)..(465): Homolog of NCBI NO: 6652880 NR Description: 26S proteasome AAA-ATPase subunit RPT2a
  misc_feature (23)..(465): Homolog of NCBI NO: 15235544 NR Description: 26S proteasome AAA-ATPase subunit RPT2a
TRVQERKKGTSNSEKLREERRIMGQGPSGGLNRQGDRKPDGGDKKEKKFEPAAPPARVGRKQRKQKGPEAAARLPTVTPSTKCKLRLLKLERIKDYLLMEEEFVANQERLKPQEEKAEEDRSKVDDLRGTPMSVGNLEELIDENHAIVSSSVGPEYYVGILSFVDKDQLEPGCSILMHNKVLSVVGILQDEVDPMVSVMKVEKAPLESYADIGGLEAQIQEIKEAVELPLTHPELYEDIGIKPPKGVILYGEPGTGKTLLAKAVANSTSATFLRVVGSELIQKYLGDGPKLVRELFRVADDLSPSIVFIDEIDAVGTKRYDAHSGGEREIQRTMLELLNQLDGFDSRGDVKVILATNRIESLDPALLRPGRIDRKIEFPLPDIKTRRRIFQIHTSKMTLSEDVNLEEFVMTKDEFSGADIKAICTEAGLLALRERRMKVTHPDFKKAKEKVMFKKKEGVPEGLYM

SEQ ID NO: 37949 - protein, 443 aa, Arabidopsis thaliana
  peptide (1)..(443): Ceres Seq. ID no. 12339828
  misc_feature (224)..(411): Pfam Name: ATPase family associated with various cellular Pfam Description: ATPase family associated with various cellular
  misc_feature (1)..(443): Homolog of NCBI NO: 1066065 NR Description: P26s4 [Drosophila melanogaster]
  misc_feature (1)..(443): Homolog of NCBI NO: 18479040 NR Description: 26S proteasome regulatory subunit IV [Tortula
  misc_feature (1)..(443): Homolog of NCBI NO: 17297987 NR Description: 26S proteasome regulatory particle triple-A
  misc_feature (1)..(443): Homolog of NCBI NO: 1172635 NR Description: 26S PROTEASE REGULATORY SUBUNIT 4 HOMOLOG
  misc_feature (1)..(443): Homolog of NCBI NO: 21593177 NR Description: 26S proteasome subunit 4 [Arabidopsis thaliana]
  misc_feature (1)..(443): Homolog of NCBI NO: 11045086 NR Description: 26S proteasome subunit 4-like protein [Brassica
  misc_feature (1)..(443): Homolog of NCBI NO: 13937244 NR Description: At2g20140/T2G17.6 [Arabidopsis thaliana]
  misc_feature (1)..(443): Homolog of NCBI NO: 15225307 NR Description: 26S proteasome subunit 4
  misc_feature (1)..(443): Homolog of NCBI NO: 6652880 NR Description: 26S proteasome AAA-ATPase subunit RPT2a
  misc_feature (1)..(443): Homolog of NCBI NO: 15235544 NR Description: 26S proteasome AAA-ATPase subunit RPT2a
MGQGPSGGLNRQGDRKPDGGDKKEKKFEPAAPPARVGRKQRKQKGPEAAARLPTVTPSTKCKLRLLKLERIKDYLLMEEEFVANQERLKPQEEKAEEDRSKVDDLRGTPMSVGNLEELIDENHAIVSSSVGPEYYVGILSFVDKDQLEPGCSILMHNKVLSVVGILQDEVDPMVSVMKVEKAPLESYADIGGLEAQIQEIKEAVELPLTHPELYEDIGIKPPKGVILYGEPGTGKTLLAKAVANSTSATFLRVVGSELIQKYLGDGPKLVRELFRVADDLSPSIVFIDEIDAVGTKRYDAHSGGEREIQRTMLELLNQLDGFDSRGDVKVILATNRIESLDPALLRPGRIDRKIEFPLPDIKTRRRIFQIHTSKMTLSEDVNLEEFVMTKDEFSGADIKAICTEAGLLALRERRMKVTHPDFKKAKEKVMFKKKEGVPEGLYM

SEQ ID NO: 37950 - protein, 367 aa, Arabidopsis thaliana
  peptide (1)..(367): Ceres Seq. ID no. 12339829
  misc_feature (148)..(335): Pfam Name: ATPase family associated with various cellular Pfam Description: ATPase family associated with various cellular
  misc_feature (1)..(367): Homolog of NCBI NO: 1066065 NR Description: P26s4 [Drosophila melanogaster]
  misc_feature (1)..(367): Homolog of NCBI NO: 18479040 NR Description: 26S proteasome regulatory subunit IV [Tortula
  misc_feature (1)..(367): Homolog of NCBI NO: 17297987 NR Description: 26S proteasome regulatory particle triple-A
  misc_feature (1)..(367): Homolog of NCBI NO: 1172635 NR Description: 26S PROTEASE REGULATORY SUBUNIT 4 HOMOLOG
  misc_feature (1)..(367): Homolog of NCBI NO: 21593177 NR Description: 26S proteasome subunit 4 [Arabidopsis thaliana]
  misc_feature (1)..(367): Homolog of NCBI NO: 11045086 NR Description: 26S proteasome subunit 4-like protein [Brassica
  misc_feature (1)..(367): Homolog of NCBI NO: 13937244 NR Description: At2g20140/T2G17.6 [Arabidopsis thaliana]
  misc_feature (1)..(367): Homolog of NCBI NO: 15225307 NR Description: 26S proteasome subunit 4
  misc_feature (1)..(367): Homolog of NCBI NO: 6652880 NR Description: 26S proteasome AAA-ATPase subunit RPT2a
  misc_feature (1)..(367): Homolog of NCBI NO: 15235544 NR Description: 26S proteasome AAA-ATPase subunit RPT2a
MEEEFVANQERLKPQEEKAEEDRSKVDDLRGTPMSVGNLEELIDENHAIVSSSVGPEYYVGILSFVDKDQLEPGCSILMHNKVLSVVGILQDEVDPMVSVMKVEKAPLESYADIGGLEAQIQEIKEAVELPLTHPELYEDIGIKPPKGVILYGEPGTGKTLLAKAVANSTSATFLRVVGSELIQKYLGDGPKLVRELFRVADDLSPSIVFIDEIDAVGTKRYDAHSGGEREIQRTMLELLNQLDGFDSRGDVKVILATNRIESLDPALLRPGRIDRKIEFPLPDIKTRRRIFQIHTSKMTLSEDVNLEEFVMTKDEFSGADIKAICTEAGLLALRERRMKVTHPDFKKAKEKVMFKKKEGVPEGLYM

SEQ ID NO: 37951 - DNA, 961 bp, Arabidopsis thaliana
  misc_feature (1)..(961): Ceres Seq. ID no. 13496987
  misc_feature: MA Experiment ID: 108434 Result: Down-regulated in Transcription
  misc_feature: MA Experiment 108434 PARAMETER Experiment Name: At_Root_Tips_cDNA_P Parameter: Tissue Value: Root Tips
  misc_feature: MA Experiment ID: 108461 Result: Up-regulated in Transcription
  misc_feature: MA Experiment 108461 PARAMETER Experiment Name: At_Germinating_Seeds_cDNA_P Parameter: Age (day) Value: 1 vs. 0
  misc_feature: MA Experiment 108461 PARAMETER Experiment Name: At_Germinating_Seeds_cDNA_P Parameter: Tissue Value: Germinating Seeds
  misc_feature: MA Experiment ID: 108469 Result: Up-regulated in Transcription
  misc_feature: MA Experiment ID: 108572 Result: Down-regulated in Transcription
  misc_feature: MA Experiment 108572 PARAMETER Experiment Name: At_Drought_cDNA_P Parameter: Timepoint (hr) Value: 1
  misc_feature: MA Experiment 108572 PARAMETER Experiment Name: At_Drought_cDNA_P Parameter: Tissue Value: Aerial
  misc_feature: MA Experiment 108572 PARAMETER Experiment Name: At_Drought_cDNA_P Parameter: Treatment Value: Drought vs. No Drought
  misc_feature: MA Experiment ID: 108574 Result: Up-regulated in Transcription
  misc_feature: MA Experiment 108574 PARAMETER Experiment Name: At_Wounding__cDNA_P Parameter: Timepoint (hr) Value: 1
  misc_feature: MA Experiment 108574 PARAMETER Experiment Name: At_Wounding__cDNA_P Parameter: Tissue Value: Aerial
  misc_feature: MA Experiment 108574 PARAMETER Experiment Name: At_Wounding__cDNA_P Parameter: Treatment Value: Wounding vs. No Wounding
  misc_feature: MA Experiment ID: 108579 Result: Up-regulated in Transcription
  misc_feature: MA Experiment 108579 PARAMETER Experiment Name: At_4deg_Cold_cDNA_P Parameter: Temperature (deg C) Value: 4 vs. 22
  misc_feature: MA Experiment 108579 PARAMETER Experiment Name: At_4deg_Cold_cDNA_P Parameter: Timepoint (hr) Value: 6
  misc_feature: MA Experiment 108579 PARAMETER Experiment Name: At_4deg_Cold_cDNA_P Parameter: Tissue Value: Aerial
  misc_feature: MA Experiment ID: 108585 Result: Up-regulated in Transcription
  misc_feature: MA Experiment 108585 PARAMETER Experiment Name: At_5mM_NaNP_cDNA_P Parameter: Timepoint (hr) Value: 6
  misc_feature: MA Experiment 108585 PARAMETER Experiment Name: At_5mM_NaNP_cDNA_P Parameter: Tissue Value: Aerial
  misc_feature: MA Experiment 108585 PARAMETER Experiment Name: At_5mM_NaNP_cDNA_P Parameter: Treatment Value: null
  misc_feature: MA Experiment ID: 108595 Result: Up-regulated in Transcription
  misc_feature: MA Experiment 108595 PARAMETER Experiment Name: At_Ler-pi_Ovule_cDNA_P Parameter: Plant Line Value: null
  misc_feature: MA Experiment ID: 20000180 Result: Up-regulated in Transcription
  misc_feature: MA Experiment 20000180 PARAMETER Experiment Name: At_Germinating_Seeds_P Parameter: Age (hr) Value: 24 vs. 0
  misc_feature: MA Experiment 20000180 PARAMETER Experiment Name: At_Germinating_Seeds_P Parameter: Tissue Value: Germinating Seeds
  misc_feature: MA Experiment ID: 20000182 Result: Up-regulated in Transcription
  misc_feature: MA Experiment 20000182 PARAMETER Experiment Name: At_2mM_SA_P Parameter: Age (day) Value: 14
  misc_feature: MA Experiment 20000182 PARAMETER Experiment Name: At_2mM_SA_P Parameter: Organism Value: A. thaliana
  misc_feature: MA Experiment 20000182 PARAMETER Experiment Name: At_2mM_SA_P Parameter: Plant Line Value: WS
  misc_feature: MA Experiment 20000182 PARAMETER Experiment Name: At_2mM_SA_P Parameter: Timepoint (hr) Value: 6
  misc_feature: MA Experiment 20000182 PARAMETER Experiment Name: At_2mM_SA_P Parameter: Tissue Value: Aerial
  misc_feature: MA Experiment 20000182 PARAMETER Experiment Name: At_2mM_SA_P Parameter: Treatment Value: 2mM SA vs. No Treatment
  misc_feature: MA Experiment ID: 20000185 Result: Up-regulated in Transcription
  misc_feature: MA Experiment 20000185 PARAMETER Experiment Name: At_Roots__P Parameter: Age (day) Value: 7 vs. 21
  misc_feature: MA Experiment 20000185 PARAMETER Experiment Name: At_Roots__P Parameter: Organism Value: A. thaliana
  misc_feature: MA Experiment 20000185 PARAMETER Experiment Name: At_Roots__P Parameter: Tissue Value: Roots vs. Whole Plant
  misc_feature: MA Experiment ID: 20000224 Result: Up-regulated in Transcription
  misc_feature: MA Experiment ID: 20000286 Result: Up-regulated in Transcription
  misc_feature: MA Experiment 20000286 PARAMETER Experiment Name: At_Open_Flower_P Parameter: Age (day) Value: 21
  misc_feature: MA Experiment 20000286 PARAMETER Experiment Name: At_Open_Flower_P Parameter: Plant Line Value: WS
  misc_feature: MA Experiment 20000286 PARAMETER Experiment Name: At_Open_Flower_P Parameter: Tissue Value: Half Open vs. Whole Plant
  misc_feature: MA Experiment ID: 20000439 Result: Up-regulated in Transcription
  misc_feature: MA Experiment 20000439 PARAMETER Experiment Name: At_Roots__P Parameter: Age (day) Value: 14 vs. 21
  misc_feature: MA Experiment 20000439 PARAMETER Experiment Name: At_Roots__P Parameter: Organism Value: A. thaliana
  misc_feature: MA Experiment 20000439 PARAMETER Experiment Name: At_Roots__P Parameter: Tissue Value: Roots vs. Whole Plant
  misc_feature: MA Experiment ID: 20001248 Result: Down-regulated in Transcription
  misc_feature: MA Experiment 20001248 PARAMETER Experiment Name: At_Far-red-induction_P Parameter: Age (day) Value: 7
  misc_feature: MA Experiment 20001248 PARAMETER Experiment Name: At_Far-red-induction_P Parameter: Light Value: Far-red vs. White
  misc_feature: MA Experiment 20001248 PARAMETER Experiment Name: At_Far-red-induction_P Parameter: Organism Value: A. thaliana
  misc_feature: MA Experiment 20001248 PARAMETER Experiment Name: At_Far-red-induction_P Parameter: Plant Line Value: Columbia
  misc_feature: MA Experiment 20001248 PARAMETER Experiment Name: At_Far-red-induction_P Parameter: Timepoint (hr) Value: 4
  misc_feature: MA Experiment 20001248 PARAMETER Experiment Name: At_Far-red-induction_P Parameter: Tissue Value: Whole Plant
  misc_feature: MA Experiment ID: 20001450 Result: Down-regulated in Transcription
  misc_feature: MA Experiment 20001450 PARAMETER Experiment Name: At_Far-red-induction_P Parameter: Age (day) Value: 7
  misc_feature: MA Experiment 20001450 PARAMETER Experiment Name: At_Far-red-induction_P Parameter: Light Value: Far-red vs. White
  misc_feature: MA Experiment 20001450 PARAMETER Experiment Name: At_Far-red-induction_P Parameter: Organism Value: A. thaliana
  misc_feature: MA Experiment 20001450 PARAMETER Experiment Name: At_Far-red-induction_P Parameter: Plant Line Value: Columbia
  misc_feature: MA Experiment 20001450 PARAMETER Experiment Name: At_Far-red-induction_P Parameter: Timepoint (hr) Value: 8
  misc_feature: MA Experiment 20001450 PARAMETER Experiment Name: At_Far-red-induction_P Parameter: Tissue Value: Whole Plant
  misc_feature: MA Experiment ID: 20001906 Result: Down-regulated in Transcription
  misc_feature: MA Experiment 20001906 PARAMETER Experiment Name: At_Drought_Reproduction_P Parameter: Age (day) Value: 35
  misc_feature: MA Experiment 20001906 PARAMETER Experiment Name: At_Drought_Reproduction_P Parameter: Organism Value: A. thaliana
  misc_feature: MA Experiment 20001906 PARAMETER Experiment Name: At_Drought_Reproduction_P Parameter: Plant Line Value: WS
  misc_feature: MA Experiment 20001906 PARAMETER Experiment Name: At_Drought_Reproduction_P Parameter: Timepoint (day) Value: 5
  misc_feature: MA Experiment 20001906 PARAMETER Experiment Name: At_Drought_Reproduction_P Parameter: Tissue Value: Siliques
  misc_feature: MA Experiment 20001906 PARAMETER Experiment Name: At_Drought_Reproduction_P Parameter: Treatment Value: Drought vs. No Drought
atatttcttcccatcgtcactagtcacgaccacacaaacaaaaaaaatataacatttagagagagagaaaggtacagcagtggcaaactcgtaaataaagaatgtcaaaagattgcggtaaccacggtggtggcaaagaagtagtcgtccggaaactctgcgccgccataatcgccttcatcgtaatagttctaatcaccatcttcctagtttgggtcatactcaggcccactaaaccaagattcgtcctccaagacgccaccgtctacgccttcaacctctcgcaaccaaacctccttacttcaaacttccaagtcacaatcgcatctcgtaaccctaactccaagatcggaatctactacgaccgtctccacgtctacgctacatacatgaaccagcagatcactctacgtacggcgattcctccgacgtatcaaggccacaaagaagtcaacgtttggtctcctttcgtctacgggactgcggttcccatcgcaccttacaactccgtcgctttgggagaggagaaagatcgtggatttgtagggttgatgatacgcgccgatgggaccgtgaggtggaaagtgaggactttgatcaccggaaaatatcatatccatgttcggtgtcaggcgttcatcaatcttggaaacaaagctgctggtgttcttgtcggtgataacgccgttaagtacacgttggctaataaatgcagtgtgaacgtttagaaagtttgacggcgttaagttgctttttttcttgaaattcaccaaacttctttccaccaacaggatactatttctgtttctacatatctttaagatttcactactttttggttgttattaagcttattgttgattatagaattattacaatcacgaaggtcagtggttggatttaactgtaaatccactttataaagttgaaataaaatggaggattgggttttggttctttt

SEQ ID NO: 37952 - protein, 208 aa, Arabidopsis thaliana
  peptide (1)..(208): Ceres Seq. ID no. 13496988
  misc_feature (1)..(208): Homolog of NCBI NO: 38344036 NR Description: OJ991214_12.17 [Oryza sativa (japonica
  misc_feature (5)..(208): Homolog of NCBI NO: 22326984 NR Description: harpin-induced protein 1 family (HIN1)
  misc_feature (3)..(208): Homolog of NCBI NO: 15229906 NR Description: harpin-induced protein 1 family (HIN1)
  misc_feature (2)..(208): Homolog of NCBI NO: 15240001 NR Description: harpin-induced protein, putative (HIN1)
  misc_feature (2)..(207): Homolog of NCBI NO: 15227540 NR Description: harpin-induced protein 1 family (HIN1)
  misc_feature (2)..(207): Homolog of NCBI NO: 15233951 NR Description: harpin-induced protein 1 family (HIN1)
  misc_feature (3)..(208): Homolog of NCBI NO: 28392929 NR Description: putative VAMP protein SEC22 [Arabidopsis thaliana]
  misc_feature (3)..(208): Homolog of NCBI NO: 18399308 NR Description: harpin-induced protein 1 family (HIN1)
  misc_feature (2)..(208): Homolog of NCBI NO: 15227538 NR Description: harpin-induced protein 1 family (HIN1)
  misc_feature (1)..(208): Homolog of NCBI NO: 15231227 NR Description: harpin-induced protein 1 family (HIN1)
MSKDCGNHGGGKEVVVRKLCAAIIAFIVIVLITIFLVWVILRPTKPRFVLQDATVYAFNLSQPNLLTSNFQVTIASRNPNSKIGIYYDRLHVYATYMNQQITLRTAIPPTYQGHKEVNVWSPFVYGTAVPIAPYNSVALGEEKDRGFVGLMIRADGTVRWKVRTLITGKYHIHVRCQAFINLGNKAAGVLVGDNAVKYTLANKCSVNV

SEQ ID NO: 37953 - protein, 112 aa, Arabidopsis thaliana
  peptide (1)..(112): Ceres Seq. ID no. 13496989
  misc_feature (1)..(112): Homolog of NCBI NO: 38344036 NR Description: OJ991214_12.17 [Oryza sativa (japonica
  misc_feature (1)..(112): Homolog of NCBI NO: 22326984 NR Description: harpin-induced protein 1 family (HIN1)
  misc_feature (1)..(112): Homolog of NCBI NO: 15229906 NR Description: harpin-induced protein 1 family (HIN1)
  misc_feature (1)..(112): Homolog of NCBI NO: 15240001 NR Description: harpin-induced protein, putative (HIN1)
  misc_feature (1)..(111): Homolog of NCBI NO: 15227540 NR Description: harpin-induced protein 1 family (HIN1)
  misc_feature (1)..(111): Homolog of NCBI NO: 15233951 NR Description: harpin-induced protein 1 family (HIN1)
  misc_feature (1)..(112): Homolog of NCBI NO: 28392929 NR Description: putative VAMP protein SEC22 [Arabidopsis thaliana]
  misc_feature (1)..(112): Homolog of NCBI NO: 18399308 NR Description: harpin-induced protein 1 family (HIN1)
  misc_feature (1)..(112): Homolog of NCBI NO: 15227538 NR Description: harpin-induced protein 1 family (HIN1)
  misc_feature (1)..(112): Homolog of NCBI NO: 15231227 NR Description: harpin-induced protein 1 family (HIN1)
MNQQITLRTAIPPTYQGHKEVNVWSPFVYGTAVPIAPYNSVALGEEKDRGFVGLMIRADGTVRWKVRTLITGKYHIHVRCQAFINLGNKAAGVLVGDNAVKYTLANKCSVNV

SEQ ID NO: 37954 - DNA, 834 bp, Arabidopsis thaliana; identical to SEQ ID NO: 24929
  misc_feature (1)..(834): Ceres Seq. ID no. 12488276
  misc_feature: MA Experiment ID: 108434 Result: Up-regulated in Transcription
  misc_feature: MA Experiment 108434 PARAMETER Experiment Name: At_Root_Tips_cDNA_P Parameter: Tissue Value: Root Tips
  misc_feature: MA Experiment ID: 108462 Result: Down-regulated in Transcription
  misc_feature: MA Experiment 108462 PARAMETER Experiment Name: At_Germinating_Seeds_cDNA_P Parameter: Age (day) Value: 2 vs. 0
  misc_feature: MA Experiment 108462 PARAMETER Experiment Name: At_Germinating_Seeds_cDNA_P Parameter: Tissue Value: Germinating Seeds
  misc_feature: MA Experiment ID: 108463 Result: Down-regulated in Transcription
  misc_feature: MA Experiment 108463 PARAMETER Experiment Name: At_Germinating_Seeds_cDNA_P Parameter: Age (day) Value: 3 vs. 0
  misc_feature: MA Experiment 108463 PARAMETER Experiment Name: At_Germinating_Seeds_cDNA_P Parameter: Tissue Value: Germinating Seeds
  misc_feature: MA Experiment ID: 108464 Result: Down-regulated in Transcription
  misc_feature: MA Experiment 108464 PARAMETER Experiment Name: At_Germinating_Seeds_cDNA_P Parameter: Age (day) Value: 4 vs. 0
  misc_feature: MA Experiment 108464 PARAMETER Experiment Name: At_Germinating_Seeds_cDNA_P Parameter: Tissue Value: Germinating Seeds
  misc_feature: MA Experiment ID: 20000111 Result: Up-regulated in Transcription
  misc_feature: MA Experiment 20000111 PARAMETER Experiment Name: At_42deg_Heat_cDNA_P Parameter: Temperature (deg C) Value: 42 vs. 22
  misc_feature: MA Experiment 20000111 PARAMETER Experiment Name: At_42deg_Heat_cDNA_P Parameter: Timepoint (hr) Value: 6
  misc_feature: MA Experiment 20000111 PARAMETER Experiment Name: At_42deg_Heat_cDNA_P Parameter: Tissue Value: Aerial
  misc_feature: MA Experiment ID: 20000117 Result: Down-regulated in Transcription
  misc_feature: MA Experiment 20000117 PARAMETER Experiment Name: At_100uM_ABA_Mutants_cDNA_P Parameter: Plant Line Value: Columbia
  misc_feature: MA Experiment 20000117 PARAMETER Experiment Name: At_100uM_ABA_Mutants_cDNA_P Parameter: Timepoint (hr) Value: 6
  misc_feature: MA Experiment 20000117 PARAMETER Experiment Name: At_100uM_ABA_Mutants_cDNA_P Parameter: Tissue Value: Aerial
  misc_feature: MA Experiment 20000117 PARAMETER Experiment Name: At_100uM_ABA_Mutants_cDNA_P Parameter: Treatment Value: 100uM ABA vs. No Treatment
  misc_feature: MA Experiment ID: 20000224 Result: Down-regulated in Transcription
  misc_feature: MA Experiment ID: 20000234 Result: Up-regulated in Transcription
  misc_feature: MA Experiment 20000234 PARAMETER Experiment Name: At_Siliques_P Parameter: Age (day) Value: 21
  misc_feature: MA Experiment 20000234 PARAMETER Experiment Name: At_Siliques_P Parameter: Organism Value: A. thaliana
  misc_feature: MA Experiment 20000234 PARAMETER Experiment Name: At_Siliques_P Parameter: Plant Line Value: WS
  misc_feature: MA Experiment 20000234 PARAMETER Experiment Name: At_Siliques_P Parameter: Tissue Value: Less Than 5mm Siliques vs. Whole Plant
  misc_feature: MA Experiment ID: 20000437 Result: Down-regulated in Transcription
  misc_feature: MA Experiment 20000437 PARAMETER Experiment Name: At_Drought_P Parameter: Age (day) Value: 8
  misc_feature: MA Experiment 20000437 PARAMETER Experiment Name: At_Drought_P Parameter: Organism Value: A. thaliana
  misc_feature: MA Experiment 20000437 PARAMETER Experiment Name: At_Drought_P Parameter: Plant Line Value: WS
  misc_feature: MA Experiment 20000437 PARAMETER Experiment Name: At_Drought_P Parameter: Timepoint (hr) Value: 24
  misc_feature: MA Experiment 20000437 PARAMETER Experiment Name: At_Drought_P Parameter: Tissue Value: Whole Plant
  misc_feature: MA Experiment 20000437 PARAMETER Experiment Name: At_Drought_P Parameter: Treatment Value: Drought vs. No Drought
  misc_feature: MA Experiment ID: 20000794 Result: Down-regulated in Transcription
  misc_feature: MA Experiment 20000794 PARAMETER Experiment Name: At_Petals_P Parameter: Age (day) Value: 23-25 days
  misc_feature: MA Experiment 20000794 PARAMETER Experiment Name: At_Petals_P Parameter: Plant Line Value: WS
  misc_feature: MA Experiment 20000794 PARAMETER Experiment Name: At_Petals_P Parameter: Tissue Value: Petals vs. Whole plant
  misc_feature: MA Experiment ID: 20001558 Result: Up-regulated in Transcription
  misc_feature: MA Experiment 20001558 PARAMETER Experiment Name: At_Drought_Soil_Dry_P Parameter: Age (day) Value: 27
  misc_feature: MA Experiment 20001558 PARAMETER Experiment Name: At_Drought_Soil_Dry_P Parameter: Organism Value: A. thaliana
  misc_feature: MA Experiment 20001558 PARAMETER Experiment Name: At_Drought_Soil_Dry_P Parameter: Plant Line Value: WS
  misc_feature: MA Experiment 20001558 PARAMETER Experiment Name: At_Drought_Soil_Dry_P Parameter: Post Timepoint (hr) Value: 6
  misc_feature: MA Experiment 20001558 PARAMETER Experiment Name: At_Drought_Soil_Dry_P Parameter: Post-Treatment Value: Re-Water vs. No Drought
  misc_feature: MA Experiment 20001558 PARAMETER Experiment Name: At_Drought_Soil_Dry_P Parameter: Timepoint (day) Value: 13
  misc_feature: MA Experiment 20001558 PARAMETER Experiment Name: At_Drought_Soil_Dry_P Parameter: Treatment Value: Drought vs. No Drought
  misc_feature: MA Experiment ID: 20001560 Result: Up-regulated in Transcription
  misc_feature: MA Experiment 20001560 PARAMETER Experiment Name: At_Drought_Soil_Dry_P Parameter: Age (day) Value: 28
  misc_feature: MA Experiment 20001560 PARAMETER Experiment Name: At_Drought_Soil_Dry_P Parameter: Organism Value: A. thaliana
  misc_feature: MA Experiment 20001560 PARAMETER Experiment Name: At_Drought_Soil_Dry_P Parameter: Plant Line Value: WS
  misc_feature: MA Experiment 20001560 PARAMETER Experiment Name: At_Drought_Soil_Dry_P Parameter: Post Timepoint (hr) Value: None
  misc_feature: MA Experiment 20001560 PARAMETER Experiment Name: At_Drought_Soil_Dry_P Parameter: Post-Treatment Value: None
  misc_feature: MA Experiment 20001560 PARAMETER Experiment Name: At_Drought_Soil_Dry_P Parameter: Timepoint (day) Value: 14
  misc_feature: MA Experiment 20001560 PARAMETER Experiment Name: At_Drought_Soil_Dry_P Parameter: Treatment Value: Drought vs. No Drought
  misc_feature: MA Experiment ID: 20001757 Result: Up-regulated in Transcription
  misc_feature: MA Experiment 20001757 PARAMETER Experiment Name: At_50mM_NH4NO3_L-to-H_P Parameter: Timepoint (hr) Value: 6
  misc_feature: MA Experiment 20001757 PARAMETER Experiment Name: At_50mM_NH4NO3_L-to-H_P Parameter: Tissue Value: Leaf
  misc_feature: MA Experiment 20001757 PARAMETER Experiment Name: At_50mM_NH4NO3_L-to-H_P Parameter: Treatment Value: 50mM NH4NO3 vs 100mM Mannitol

SEQ ID NO: 37955 - protein, 198 aa, Arabidopsis thaliana; identical to SEQ ID NO: 24930
  peptide (1)..(198): Ceres Seq. ID no. 12488277
  misc_feature (6)..(108): Pfam Name: Ribosomal protein S4/S9 N-terminal domain Pfam Description: Ribosomal protein S4/S9 N-terminal domain
  misc_feature (6)..(108): Pfam Name: Ribosomal protein S4/S9 N-terminal domain Pfam Description: Ribosomal protein S4/S9 N-terminal domain
  misc_feature (6)..(108): Pfam Name: Ribosomal protein S4/S9 N-terminal domain Pfam Description: Ribosomal protein S4/S9 N-terminal domain
  misc_feature (12)..(196): Homolog of NCBI NO: 15294029 NR Description: 40S ribosomal protein S9 [Ictalurus punctatus]
  misc_feature (10)..(198): Homolog of NCBI NO: 24661707 NR Description: Ribosomal protein S9 CG3395-PA
  misc_feature (12)..(198): Homolog of NCBI NO: 27735416 NR Description: Similar to ribosomal protein S9 [Xenopus laevis]
  misc_feature (12)..(198): Homolog of NCBI NO: 13592067 NR Description: ribosomal protein S9 [Rattus norvegicus]
  misc_feature (12)..(198): Homolog of NCBI NO: 14141193 NR Description: ribosomal protein S9; 40S ribosomal protein S9
  misc_feature (12)..(196): Homolog of NCBI NO: 15294029 NR Description: 40S ribosomal protein S9 [Ictalurus punctatus]
  misc_feature (12)..(198): Homolog of NCBI NO: 27735416 NR Description: Similar to ribosomal protein S9 [Xenopus laevis]
  misc_feature (12)..(198): Homolog of NCBI NO: 14141193 NR Description: ribosomal protein S9; 40S ribosomal protein S9
  misc_feature (12)..(198): Homolog of NCBI NO: 13592067 NR Description: ribosomal protein S9 [Rattus norvegicus]
  misc_feature (12)..(198): Homolog of NCBI NO: 27735416 NR Description: Similar to ribosomal protein S9 [Xenopus laevis]
  misc_feature (10)..(198): Homolog of NCBI NO: 24661707 NR Description: Ribosomal protein S9 CG3395-PA
  misc_feature (12)..(196): Homolog of NCBI NO: 15294029 NR Description: 40S ribosomal protein S9 [Ictalurus punctatus]
  misc_feature (1)..(198): Homolog of NCBI NO: 15242241 NR Description: 40S ribosomal protein - like; protein id:
  misc_feature (1)..(198): Homolog of NCBI NO: 15242498 NR Description: 40S ribosomal protein S9-like
  misc_feature (1)..(198): Homolog of NCBI NO: 6440857 NR Description: 40S ribosomal protein S9 [Chlamydomonas sp. HS-5]
  misc_feature (8)..(198): Homolog of NCBI NO: 40741183 NR Description: RS9_PODAN 40S ribosomal protein S9 (S7)
  misc_feature (8)..(197): Homolog of NCBI NO: 1710780 NR Description: 40S ribosomal protein S9 (S7)
  misc_feature (1)..(198): Homolog of NCBI NO: 15242241 NR Description: 40S ribosomal protein - like; protein id:
  misc_feature (1)..(198): Homolog of NCBI NO: 15242498 NR Description: 40S ribosomal protein S9-like
  misc_feature (1)..(198): Homolog of NCBI NO: 6440857 NR Description: 40S ribosomal protein S9 [Chlamydomonas sp. HS-5]
  misc_feature (8)..(198): Homolog of NCBI NO: 40741183 NR Description: RS9_PODAN 40S ribosomal protein S9 (S7)
  misc_feature (8)..(197): Homolog of NCBI NO: 1710780 NR Description: 40S ribosomal protein S9 (S7)
  misc_feature (12)..(198): Homolog of NCBI NO: 14141193 NR Description: ribosomal protein S9; 40S ribosomal protein S9
  misc_feature (12)..(198): Homolog of NCBI NO: 13592067 NR Description: ribosomal protein S9 [Rattus norvegicus]
  misc_feature (10)..(198): Homolog of NCBI NO: 24661707 NR Description: Ribosomal protein S9 CG3395-PA
  misc_feature (8)..(197): Homolog of NCBI NO: 1710780 NR Description: 40S ribosomal protein S9 (S7)
  misc_feature (8)..(198): Homolog of NCBI NO: 40741183 NR Description: RS9_PODAN 40S ribosomal protein S9 (S7)
  misc_feature (1)..(198): Homolog of NCBI NO: 6440857 NR Description: 40S ribosomal protein S9 [Chlamydomonas sp. HS-5]
  misc_feature (1)..(198): Homolog of NCBI NO: 15242498 NR Description: 40S ribosomal protein S9-like
  misc_feature (1)..(198): Homolog of NCBI NO: 15242241 NR Description: 40S ribosomal protein - like; protein id:

SEQ ID NO: 37956 - protein, 117 aa, Arabidopsis thaliana; identical to SEQ ID NO: 24931
  peptide (1)..(117): Ceres Seq. ID no. 12488278
  misc_feature (28)..(75): Pfam Name: S4 domain Pfam Description: S4 domain
  misc_feature (28)..(75): Pfam Name: S4 domain Pfam Description: S4 domain
  misc_feature (28)..(75): Pfam Name: S4 domain Pfam Description: S4 domain
  misc_feature (1)..(115): Homolog of NCBI NO: 15294029 NR Description: 40S ribosomal protein S9 [Ictalurus punctatus]
  misc_feature (1)..(117): Homolog of NCBI NO: 24661707 NR Description: Ribosomal protein S9 CG3395-PA
  misc_feature (1)..(117): Homolog of NCBI NO: 27735416 NR Description: Similar to ribosomal protein S9 [Xenopus laevis]
  misc_feature (1)..(117): Homolog of NCBI NO: 13592067 NR Description: ribosomal protein S9 [Rattus norvegicus]
  misc_feature (1)..(117): Homolog of NCBI NO: 14141193 NR Description: ribosomal protein S9; 40S ribosomal protein S9
  misc_feature (1)..(115): Homolog of NCBI NO: 15294029 NR Description: 40S ribosomal protein S9 [Ictalurus punctatus]
  misc_feature (1)..(117): Homolog of NCBI NO: 27735416 NR Description: Similar to ribosomal protein S9 [Xenopus laevis]
  misc_feature (1)..(117): Homolog of NCBI NO: 14141193 NR Description: ribosomal protein S9; 40S ribosomal protein S9
  misc_feature (1)..(117): Homolog of NCBI NO: 13592067 NR Description: ribosomal protein S9 [Rattus norvegicus]
  misc_feature (1)..(117): Homolog of NCBI NO: 27735416 NR Description: Similar to ribosomal protein S9 [Xenopus laevis]
  misc_feature (1)..(117): Homolog of NCBI NO: 24661707 NR Description: Ribosomal protein S9 CG3395-PA
  misc_feature (1)..(115): Homolog of NCBI NO: 15294029 NR Description: 40S ribosomal protein S9 [Ictalurus punctatus]
  misc_feature (1)..(117): Homolog of NCBI NO: 15242241 NR Description: 40S ribosomal protein - like; protein id:
  misc_feature (1)..(117): Homolog of NCBI NO: 15242498 NR Description: 40S ribosomal protein S9-like
  misc_feature (1)..(117): Homolog of NCBI NO: 6440857 NR Description: 40S ribosomal protein S9 [Chlamydomonas sp. HS-5]
  misc_feature (1)..(117): Homolog of NCBI NO: 40741183 NR Description: RS9_PODAN 40S ribosomal protein S9 (S7)
  misc_feature (1)..(116): Homolog of NCBI NO: 1710780 NR Description: 40S ribosomal protein S9 (S7)
  misc_feature (1)..(117): Homolog of NCBI NO: 15242241 NR Description: 40S ribosomal protein - like; protein id:
  misc_feature (1)..(117): Homolog of NCBI NO: 15242498 NR Description: 40S ribosomal protein S9-like
  misc_feature (1)..(117): Homolog of NCBI NO: 6440857 NR Description: 40S ribosomal protein S9 [Chlamydomonas sp. HS-5]
  misc_feature (1)..(117): Homolog of NCBI NO: 40741183 NR Description: RS9_PODAN 40S ribosomal protein S9 (S7)
  misc_feature (1)..(116): Homolog of NCBI NO: 1710780 NR Description: 40S ribosomal protein S9 (S7)
  misc_feature (1)..(117): Homolog of NCBI NO: 14141193 NR Description: ribosomal protein S9; 40S ribosomal protein S9
  misc_feature (1)..(117): Homolog of NCBI NO: 13592067 NR Description: ribosomal protein S9 [Rattus norvegicus]
  misc_feature (1)..(117): Homolog of NCBI NO: 24661707 NR Description: Ribosomal protein S9 CG3395-PA
  misc_feature (1)..(116): Homolog of NCBI NO: 1710780 NR Description: 40S ribosomal protein S9 (S7)
  misc_feature (1)..(117): Homolog of NCBI NO: 40741183 NR Description: RS9_PODAN 40S ribosomal protein S9 (S7)
  misc_feature (1)..(117): Homolog of NCBI NO: 6440857 NR Description: 40S ribosomal protein S9 [Chlamydomonas sp. HS-5]
  misc_feature (1)..(117): Homolog of NCBI NO: 15242498 NR Description: 40S ribosomal protein S9-like
  misc_feature (1)..(117): Homolog of NCBI NO: 15242241 NR Description: 40S ribosomal protein - like; protein id:

SEQ ID NO: 37957 - DNA, 629 bp, Arabidopsis thaliana
  misc_feature (1)..(629): Ceres Seq. ID no. 12384479
  misc_feature: MA Experiment ID: 108434 Result: Up-regulated in Transcription
  misc_feature: MA Experiment 108434 PARAMETER Experiment Name: At_Root_Tips_cDNA_P Parameter: Tissue Value: Root Tips
  misc_feature: MA Experiment ID: 108435 Result: Up-regulated in Transcription
  misc_feature: MA Experiment 108435 PARAMETER Experiment Name: At_stm_Mutants_cDNA_P Parameter: Plant Line Value: wt Landsburg vs stm
  misc_feature: MA Experiment 108435 PARAMETER Experiment Name: At_stm_Mutants_cDNA_P Parameter: Tissue Value: Shoot Apical Meristem Region
  misc_feature: MA Experiment ID: 108462 Result: Down-regulated in Transcription
  misc_feature: MA Experiment 108462 PARAMETER Experiment Name: At_Germinating_Seeds_cDNA_P Parameter: Age (day) Value: 2 vs. 0
  misc_feature: MA Experiment 108462 PARAMETER Experiment Name: At_Germinating_Seeds_cDNA_P Parameter: Tissue Value: Germinating Seeds
  misc_feature: MA Experiment ID: 108463 Result: Down-regulated in Transcription
  misc_feature: MA Experiment 108463 PARAMETER Experiment Name: At_Germinating_Seeds_cDNA_P Parameter: Age (day) Value: 3 vs. 0
  misc_feature: MA Experiment 108463 PARAMETER Experiment Name: At_Germinating_Seeds_cDNA_P Parameter: Tissue Value: Germinating Seeds
  misc_feature: MA Experiment ID: 108464 Result: Down-regulated in Transcription
  misc_feature: MA Experiment 108464 PARAMETER Experiment Name: At_Germinating_Seeds_cDNA_P Parameter: Age (day) Value: 4 vs. 0
  misc_feature: MA Experiment 108464 PARAMETER Experiment Name: At_Germinating_Seeds_cDNA_P Parameter: Tissue Value: Germinating Seeds
  misc_feature: MA Experiment ID: 108573 Result: Down-regulated in Transcription
  misc_feature: MA Experiment 108573 PARAMETER Experiment Name: At_Drought_cDNA_P Parameter: Timepoint (hr) Value: 6
  misc_feature: MA Experiment 108573 PARAMETER Experiment Name: At_Drought_cDNA_P Parameter: Tissue Value: Aerial
  misc_feature: MA Experiment 108573 PARAMETER Experiment Name: At_Drought_cDNA_P Parameter: Treatment Value: Drought vs. No Drought
  misc_feature: MA Experiment ID: 108577 Result: Down-regulated in Transcription
  misc_feature: MA Experiment 108577 PARAMETER Experiment Name: At_42deg_Heat_cDNA_P Parameter: Temperature (deg C) Value: 42 vs. 22
  misc_feature: MA Experiment 108577 PARAMETER Experiment Name: At_42deg_Heat_cDNA_P Parameter: Timepoint (hr) Value: 6
  misc_feature: MA Experiment 108577 PARAMETER Experiment Name: At_42deg_Heat_cDNA_P Parameter: Tissue Value: Aerial
  misc_feature: MA Experiment ID: 20000184 Result: Up-regulated in Transcription
  misc_feature: MA Experiment 20000184 PARAMETER Experiment Name: At_Shoots__P Parameter: Age (day) Value: 7
  misc_feature: MA Experiment 20000184 PARAMETER Experiment Name: At_Shoots__P Parameter: Tissue Value: Shoots vs. Whole Plant
  misc_feature: MA Experiment ID: 20000227 Result: Up-regulated in Transcription
  misc_feature: MA Experiment 20000227 PARAMETER Experiment Name: At_Root-Tips-vs-Tops_P Parameter: Tissue Value: Root Tips vs. Root Tops
  misc_feature: MA Experiment ID: 20000437 Result: Down-regulated in Transcription
  misc_feature: MA Experiment 20000437 PARAMETER Experiment Name: At_Drought_P Parameter: Age (day) Value: 8
  misc_feature: MA Experiment 20000437 PARAMETER Experiment Name: At_Drought_P Parameter: Organism Value: A. thaliana
  misc_feature: MA Experiment 20000437 PARAMETER Experiment Name: At_Drought_P Parameter: Plant Line Value: WS
  misc_feature: MA Experiment 20000437 PARAMETER Experiment Name: At_Drought_P Parameter: Timepoint (hr) Value: 24
  misc_feature: MA Experiment 20000437 PARAMETER Experiment Name: At_Drought_P Parameter: Tissue Value: Whole Plant
  misc_feature: MA Experiment 20000437 PARAMETER Experiment Name: At_Drought_P Parameter: Treatment Value: Drought vs. No Drought
  misc_feature: MA Experiment ID: 20001558 Result: Up-regulated in Transcription
  misc_feature: MA Experiment 20001558 PARAMETER Experiment Name: At_Drought_Soil_Dry_P Parameter: Age (day) Value: 27
  misc_feature: MA Experiment 20001558 PARAMETER Experiment Name: At_Drought_Soil_Dry_P Parameter: Organism Value: A. thaliana
  misc_feature: MA Experiment 20001558 PARAMETER Experiment Name: At_Drought_Soil_Dry_P Parameter: Plant Line Value: WS
  misc_feature: MA Experiment 20001558 PARAMETER Experiment Name: At_Drought_Soil_Dry_P Parameter: Post Timepoint (hr) Value: 6
  misc_feature: MA Experiment 20001558 PARAMETER Experiment Name: At_Drought_Soil_Dry_P Parameter: Post-Treatment Value: Re-Water vs. No Drought
  misc_feature: MA Experiment 20001558 PARAMETER Experiment Name: At_Drought_Soil_Dry_P Parameter: Timepoint (day) Value: 13
  misc_feature: MA Experiment 20001558 PARAMETER Experiment Name: At_Drought_Soil_Dry_P Parameter: Treatment Value: Drought vs. No Drought
  misc_feature: MA Experiment ID: 20001560 Result: Up-regulated in Transcription
  misc_feature: MA Experiment 20001560 PARAMETER Experiment Name: At_Drought_Soil_Dry_P Parameter: Age (day) Value: 28
  misc_feature: MA Experiment 20001560 PARAMETER Experiment Name: At_Drought_Soil_Dry_P Parameter: Organism Value: A. thaliana
  misc_feature: MA Experiment 20001560 PARAMETER Experiment Name: At_Drought_Soil_Dry_P Parameter: Plant Line Value: WS
  misc_feature: MA Experiment 20001560 PARAMETER Experiment Name: At_Drought_Soil_Dry_P Parameter: Post Timepoint (hr) Value: None
  misc_feature: MA Experiment 20001560 PARAMETER Experiment Name: At_Drought_Soil_Dry_P Parameter: Post-Treatment Value: None
  misc_feature: MA Experiment 20001560 PARAMETER Experiment Name: At_Drought_Soil_Dry_P Parameter: Timepoint (day) Value: 14
  misc_feature: MA Experiment 20001560 PARAMETER Experiment Name: At_Drought_Soil_Dry_P Parameter: Treatment Value: Drought vs. No Drought
  misc_feature: MA Experiment ID: 20001911 Result: Down-regulated in Transcription
  misc_feature: MA Experiment 20001911 PARAMETER Experiment Name: At_Drought_Reproduction_P Parameter: Age (day) Value: 40
  misc_feature: MA Experiment 20001911 PARAMETER Experiment Name: At_Drought_Reproduction_P Parameter: Organism Value: A. thaliana
  misc_feature: MA Experiment 20001911 PARAMETER Experiment Name: At_Drought_Reproduction_P Parameter: Plant Line Value: WS
  misc_feature: MA Experiment 20001911 PARAMETER Experiment Name: At_Drought_Reproduction_P Parameter: Timepoint (day) Value: 10
  misc_feature: MA Experiment 20001911 PARAMETER Experiment Name: At_Drought_Reproduction_P Parameter: Tissue Value: Flowers
  misc_feature: MA Experiment 20001911 PARAMETER Experiment Name: At_Drought_Reproduction_P Parameter: Treatment Value: Drought vs. No Drought
acacatcggttagggttttagtttctcttaccgagattcaaatggcgcttagaggagtttggcagctcaagaaactcgttgtgagctactgtaattggggtggtagcagtagaggcatcagagcctttatggaatcagaattgcctgctctaaaggagaaaaacccgcagctcgaagtaattaccgagctttcacggggacaacatccttatttgaagggcatttacaggaatagaaatgaaagggtagtgtgtgtgaagaacatggatcctgaagaagtgcttttgaatgcaacgaggctgaggaactcgcttggacggaaagtggttaaactgaggacccgacatgtcaccaaacaccccagtgttcaaggcacctggacaactgctgtcaaattctgagactttcctgctaaattgtttgcaggttttcatcttctagctgttaaatcgaatgttgcaagtatcaggattggtcgtttatctgtattgcaaccccaagttgtttgtaccgtctgtgacttgggacaaagatgtagtcttcaaatgttttgcagtttttgcaatgtttgaattttgtcttgtccttctggttgagtctataataagattacacaagggtttaaggtt

SEQ ID NO: 37958 - protein, 132 aa, Arabidopsis thaliana
  peptide (1)..(132): Ceres Seq. ID no. 12384480
  misc_feature (15)..(105): Pfam Name: Mitochondrial ribosomal protein L51 / S25 / Pfam Description: Mitochondrial ribosomal protein L51 / S25 /
  misc_feature (1)..(127): Homolog of NCBI NO: 13559406 NR Description: mitochondrial ribosomal protein bMRP36a [Mus
  misc_feature (17)..(127): Homolog of NCBI NO: 17647665 NR Description: mitochondrial ribosomal protein L-CI-B8 CG5479-PA
  misc_feature (19)..(127): Homolog of NCBI NO: 6325356 NR Description: Mitochondrial Ribosome Protein, Large Subunit;
  misc_feature (21)..(132): Homolog of NCBI NO: 39589613 NR Description: Hypothetical protein CBG12220 [Caenorhabditis
  misc_feature (21)..(132): Homolog of NCBI NO: 17505717 NR Description: NADH-ubiquinone oxidoreductase B8 [Caenorhabditis
  misc_feature (23)..(127): Homolog of NCBI NO: 19112489 NR Description: hypothetical protein [Schizosaccharomyces pombe]
  misc_feature (19)..(127): Homolog of NCBI NO: 40739113 NR Description: hypothetical protein AN6904.2 [Aspergillus
  misc_feature (14)..(131): Homolog of NCBI NO: 26006491 NR Description: Unknown protein [Oryza sativa (japonica
  misc_feature (14)..(132): Homolog of NCBI NO: 15231727 NR Description: putative protein
TSVRVLVSLTEIQMALRGVWQLKKLVVSYCNWGGSSRGIRAFMESELPALKEKNPQLEVITELSRGQHPYLKGIYRNRNERVVCVKNMDPEEVLLNATRLRNSLGRKVVKLRTRHVTKHPSVQGTWTTAVKF

SEQ ID NO: 37959 - protein, 119 aa, Arabidopsis thaliana
  peptide (1)..(119): Ceres Seq. ID no. 12384481
  misc_feature (2)..(92): Pfam Name: Mitochondrial ribosomal protein L51 / S25 / Pfam Description: Mitochondrial ribosomal protein L51 / S25 /
  misc_feature (1)..(114): Homolog of NCBI NO: 13559406 NR Description: mitochondrial ribosomal protein bMRP36a [Mus
  misc_feature (4)..(114): Homolog of NCBI NO: 17647665 NR Description: mitochondrial ribosomal protein L-CI-B8 CG5479-PA
  misc_feature (6)..(114): Homolog of NCBI NO: 6325356 NR Description: Mitochondrial Ribosome Protein, Large Subunit;
  misc_feature (8)..(119): Homolog of NCBI NO: 39589613 NR Description: Hypothetical protein CBG12220 [Caenorhabditis
  misc_feature (8)..(119): Homolog of NCBI NO: 17505717 NR Description: NADH-ubiquinone oxidoreductase B8 [Caenorhabditis
  misc_feature (10)..(114): Homolog of NCBI NO: 19112489 NR Description: hypothetical protein [Schizosaccharomyces pombe]
  misc_feature (6)..(114): Homolog of NCBI NO: 40739113 NR Description: hypothetical protein AN6904.2 [Aspergillus
  misc_feature (1)..(118): Homolog of NCBI NO: 26006491 NR Description: Unknown protein [Oryza sativa (japonica
  misc_feature (1)..(119): Homolog of NCBI NO: 15231727 NR Description: putative protein
MALRGVWQLKKLVVSYCNWGGSSRGIRAFMESELPALKEKNPQLEVITELSRGQHPYLKGIYRNRNERVVCVKNMDPEEVLLNATRLRNSLGRKVVKLRTRHVTKHPSVQGTWTTAVKF

SEQ ID NO: 37960 - protein, 90 aa, Arabidopsis thaliana
  peptide (1)..(90): Ceres Seq. ID no. 12384482
  misc_feature (1)..(63): Pfam Name: Mitochondrial ribosomal protein L51 / S25 / Pfam Description: Mitochondrial ribosomal protein L51 / S25 /
  misc_feature (1)..(85): Homolog of NCBI NO: 13559406 NR Description: mitochondrial ribosomal protein bMRP36a [Mus
  misc_feature (1)..(85): Homolog of NCBI NO: 17647665 NR Description: mitochondrial ribosomal protein L-CI-B8 CG5479-PA
  misc_feature (1)..(85): Homolog of NCBI NO: 6325356 NR Description: Mitochondrial Ribosome Protein, Large Subunit;
  misc_feature (1)..(90): Homolog of NCBI NO: 39589613 NR Description: Hypothetical protein CBG12220 [Caenorhabditis
  misc_feature (1)..(90): Homolog of NCBI NO: 17505717 NR Description: NADH-ubiquinone oxidoreductase B8 [Caenorhabditis
  misc_feature (1)..(85): Homolog of NCBI NO: 19112489 NR Description: hypothetical protein [Schizosaccharomyces pombe]
  misc_feature (1)..(85): Homolog of NCBI NO: 40739113 NR Description: hypothetical protein AN6904.2 [Aspergillus
  misc_feature (1)..(89): Homolog of NCBI NO: 26006491 NR Description: Unknown protein [Oryza sativa (japonica
  misc_feature (1)..(90): Homolog of NCBI NO: 15231727 NR Description: putative protein
MESELPALKEKNPQLEVITELSRGQHPYLKGIYRNRNERVVCVKNMDPEEVLLNATRLRNSLGRKVVKLRTRHVTKHPSVQGTWTTAVKF

SEQ ID NO: 37961 - DNA, 1035 bp, Arabidopsis thaliana
  misc_feature (1)..(1035): Ceres Seq. ID no. 13488831
  misc_feature: MA Experiment ID: 108579 Result: Down-regulated in Transcription
  misc_feature: MA Experiment 108579 PARAMETER Experiment Name: At_4deg_Cold_cDNA_P Parameter: Temperature (deg C) Value: 4 vs. 22
  misc_feature: MA Experiment 108579 PARAMETER Experiment Name: At_4deg_Cold_cDNA_P Parameter: Timepoint (hr) Value: 6
  misc_feature: MA Experiment 108579 PARAMETER Experiment Name: At_4deg_Cold_cDNA_P Parameter: Tissue Value: Aerial
  misc_feature: MA Experiment ID: 20000179 Result: Up-regulated in Transcription
  misc_feature: MA Experiment 20000179 PARAMETER Experiment Name: At_Germinating_Seeds_P Parameter: Age (hr) Value: 6 vs. 0
  misc_feature: MA Experiment 20000179 PARAMETER Experiment Name: At_Germinating_Seeds_P Parameter: Tissue Value: Germinating Seeds
  misc_feature: MA Experiment ID: 20000184 Result: Down-regulated in Transcription
  misc_feature: MA Experiment 20000184 PARAMETER Experiment Name: At_Shoots__P Parameter: Age (day) Value: 7
  misc_feature: MA Experiment 20000184 PARAMETER Experiment Name: At_Shoots__P Parameter: Tissue Value: Shoots vs. Whole Plant
  misc_feature: MA Experiment ID: 20000438 Result: Down-regulated in Transcription
  misc_feature: MA Experiment 20000438 PARAMETER Experiment Name: At_Shoots__P Parameter: Age (day) Value: 14
  misc_feature: MA Experiment 20000438 PARAMETER Experiment Name: At_Shoots__P Parameter: Tissue Value: Shoots vs. Whole Plant
  misc_feature: MA Experiment ID: 20001911 Result: Up-regulated in Transcription
  misc_feature: MA Experiment 20001911 PARAMETER Experiment Name: At_Drought_Reproduction_P Parameter: Age (day) Value: 40
  misc_feature: MA Experiment 20001911 PARAMETER Experiment Name: At_Drought_Reproduction_P Parameter: Organism Value: A. thaliana
  misc_feature: MA Experiment 20001911 PARAMETER Experiment Name: At_Drought_Reproduction_P Parameter: Plant Line Value: WS
  misc_feature: MA Experiment 20001911 PARAMETER Experiment Name: At_Drought_Reproduction_P Parameter: Timepoint (day) Value: 10
  misc_feature: MA Experiment 20001911 PARAMETER Experiment Name: At_Drought_Reproduction_P Parameter: Tissue Value: Flowers
  misc_feature: MA Experiment 20001911 PARAMETER Experiment Name: At_Drought_Reproduction_P Parameter: Treatment Value: Drought vs. No Drought
gcttgaaaatgaaatctggtttaaatagtttctctgtttggtttttctgttttaattaatttacgggcaatggaagcattgagagcgtcctacggcgactcttcatcggattccgataccgatgatctttctccggcgagtcccgttactgcaaattctggagagaaagattcgatttccttgcctcctccaccgcttgcgcttctcgattccattgtatccacaggttcactggatttcttctcaacagagcctggagttcgtgtaagaaactttcctcatgtcgatggaaattacgctttgcacgtttacgtacctgtttgtatacctccactgccaaagaaggagattgtatgttttttaaagaaggttgcatcagttgttcctcatcttcatttggtagaggctgatgtgccactcagcattctatgcaaggatgatcagaagtttgagcgtgccttggggagagagttccacataagcttaggaagaaacgttccactacgtgttcatcagattaactcggtgatttctatgcttcggcaaaagcttcagttgcagaagagatacttgatagatttcaataagtgggaagtctttgtgaatgatgaccatactcgctctttcctttctttggaaatcactacttcaggactatccgagataagtaagcaaattgatgctgttaatgaagtttacaagctccacaatctgccggagttctacaaggatccgcggccgcatatatccttggtctgggcgttgggtgatattagaacttccctaaagggagctgttgacgtggaacttaggaagcttagagcaggtggttgtgtgcagaatcgtatcttcacctctaagttttgtgggatcgagtgtaagataggaaacaaaacacacaaaatatgtaaactcccagatgaataagaaaatctcaaatttctgtgtttgcagaccaatcaggtatgcatttgtaacgacatagaaggatgagttgatctgtgttcttgggtattccataatatatgtctcttc

SEQ ID NO: 37962 - protein, 285 aa, Arabidopsis thaliana
  peptide (1)..(285): Ceres Seq. ID no. 13488832
  misc_feature (134)..(276): Homolog of NCBI NO: 27694652 NR Description: Similar to expressed sequence AA960436 [Xenopus
  misc_feature (40)..(83): Homolog of NCBI NO: 34851290 NR Description: similar to expressed sequence AA960436 [Rattus
  misc_feature (117)..(248): Homolog of NCBI NO: 34851290 NR Description: similar to expressed sequence AA960436 [Rattus
  misc_feature (8)..(112): Homolog of NCBI NO: 19527176 NR Description: expressed sequence AA960436 [Mus musculus]
  misc_feature (131)..(275): Homolog of NCBI NO: 19527176 NR Description: expressed sequence AA960436 [Mus musculus]
  misc_feature (8)..(83): Homolog of NCBI NO: 13375797 NR Description: hypothetical protein FLJ13154 [Homo sapiens]
  misc_feature (117)..(275): Homolog of NCBI NO: 13375797 NR Description: hypothetical protein FLJ13154 [Homo sapiens]
  misc_feature (8)..(83): Homolog of NCBI NO: 13325194 NR Description: hypothetical protein FLJ13154 [Homo sapiens]
  misc_feature (117)..(275): Homolog of NCBI NO: 13325194 NR Description: hypothetical protein FLJ13154 [Homo sapiens]
  misc_feature (1)..(285): Homolog of NCBI NO: 18423246 NR Description: expressed protein [Arabidopsis thaliana]
MEALRASYGDSSSDSDTDDLSPASPVTANSGEKDSISLPPPPLALLDSIVSTGSLDFFSTEPGVRVRNFPHVDGNYALHVYVPVCIPPLPKKEIVCFLKKVASVVPHLHLVEADVPLSILCKDDQKFERALGREFHISLGRNVPLRVHQINSVISMLRQKLQLQKRYLIDFNKWEVFVNDDHTRSFLSLEITTSGLSEISKQIDAVNEVYKLHNLPEFYKDPRPHISLVWALGDIRTSLKGAVDVELRKLRAGGCVQNRIFTSKFCGIECKIGNKTHKICKLPDE

SEQ ID NO: 37963 - DNA, 1889 bp, Arabidopsis thaliana
  misc_feature (1)..(1889): Ceres Seq. ID no. 13491619
  misc_feature: MA Experiment ID: 108464 Result: Up-regulated in Transcription
  misc_feature: MA Experiment 108464 PARAMETER Experiment Name: At_Germinating_Seeds_cDNA_P Parameter: Age (day) Value: 4 vs. 0
  misc_feature: MA Experiment 108464 PARAMETER Experiment Name: At_Germinating_Seeds_cDNA_P Parameter: Tissue Value: Germinating Seeds
  misc_feature: MA Experiment ID: 108488 Result: Down-regulated in Transcription
  misc_feature: MA Experiment ID: 20000071 Result: Up-regulated in Transcription
  misc_feature: MA Experiment 20000071 PARAMETER Experiment Name: At_100uM_ABA_Mutants_cDNA_P Parameter: Plant Line Value: CS8104
  misc_feature: MA Experiment 20000071 PARAMETER Experiment Name: At_100uM_ABA_Mutants_cDNA_P Parameter: Timepoint (hr) Value: 6
  misc_feature: MA Experiment 20000071 PARAMETER Experiment Name: At_100uM_ABA_Mutants_cDNA_P Parameter: Tissue Value: Aerial
  misc_feature: MA Experiment 20000071 PARAMETER Experiment Name: At_100uM_ABA_Mutants_cDNA_P Parameter: Treatment Value: 100uM ABA vs. No Treatment
  misc_feature: MA Experiment ID: 20000087 Result: Up-regulated in Transcription
  misc_feature: MA Experiment 20000087 PARAMETER Experiment Name: At_100uM_ABA_Mutants_cDNA_P Parameter: Plant Line Value: WS
  misc_feature: MA Experiment 20000087 PARAMETER Experiment Name: At_100uM_ABA_Mutants_cDNA_P Parameter: Timepoint (hr) Value: 6
  misc_feature: MA Experiment 20000087 PARAMETER Experiment Name: At_100uM_ABA_Mutants_cDNA_P Parameter: Tissue Value: Aerial
  misc_feature: MA Experiment 20000087 PARAMETER Experiment Name: At_100uM_ABA_Mutants_cDNA_P Parameter: Treatment Value: 100uM ABA vs. No Treatment
  misc_feature: MA Experiment ID: 20000117 Result: Up-regulated in Transcription
  misc_feature: MA Experiment 20000117 PARAMETER Experiment Name: At_100uM_ABA_Mutants_cDNA_P Parameter: Plant Line Value: Columbia
  misc_feature: MA Experiment 20000117 PARAMETER Experiment Name: At_100uM_ABA_Mutants_cDNA_P Parameter: Timepoint (hr) Value: 6
  misc_feature: MA Experiment 20000117 PARAMETER Experiment Name: At_100uM_ABA_Mutants_cDNA_P Parameter: Tissue Value: Aerial
  misc_feature: MA Experiment 20000117 PARAMETER Experiment Name: At_100uM_ABA_Mutants_cDNA_P Parameter: Treatment Value: 100uM ABA vs. No Treatment
gatatgtgtgatatctctttgtcccccatctattaatctcctcctccgcatcgtcgccgtgcacttccccacctcttccggcggatatgatgagcattgtatcaagtcatcatcactgtcaacaatctgttatacacgaacgtagcggtataggaacaatatctaaggtttcttgttcgagatattgcggtccgtgtttctctggacgactggctttctctcatagcctctgcttgaagactacttatgggaaaactgataggagaaagttttcaagaatttgcagtattgtggatgatgaggggaatctagataattcggatgacgaggaaaaggaatcactcgatgataaaactaaaagggtatgtatgagaaatctataagctttgtaaactccggccattttttgctgtcctctaaggtgaagtcatgacttgacctttaagaactgagacttggtttccctgtgctttatacactagaattatattaaacagtcaatgtggttttaatccttgttgtacatgaaagcctcaaactctctagttcgtgagattacttagaatgttgatctactcctgcttgatcctggaaaaagtgcgtaactaatttgatttcttgagtccttttgatgtctaaatgtttgtccatctctgtcatggcttagtgacacagcaagtaaacaagcgttttgtttaaatttattggttgcttgatatcatctaatcatttagaattactttttttttctttttctttagcaagcgaatgatatgaatcgggctaatcttgaaagaatggttgggtcagatgattctgcatttaacggcttagatcttgcaaccctcatcagacagaagtatggaaaatcttatgatgttcaactcatcaagaaggtatgcccttctgtattcaagtgtgtttgtgattctgtatcgtagaaagaagttaagacctccaatcatcttcatttcattgcatgaatacagaatcagcttttacgaaattcagttgatcattttccttttcattttgagatttttggtgtgagctttattttatcaatgtggaaagatttgtcgctttagaagctaaaaatataaatcatagttcttagatgtgattaatgtaggagttcatggggaagaatcttcttgcaatgaatgtcatgtggaagtacagagaacaggtaagagaatcctttgctgtatacttgatcacagaagcctaatgatatgatagttcaattgattttagtgtacttgtttggactttagataattatgatcttcgttttccatatcattcagatttggtatgagaatctttgccacatagaaagatgaagtgtatatccatattttgttggtatagttcttgcttttgcaagtcaatccttgtaagctaattcacctttatatatttcttgcttcttcttcaacgcctagaggtcttttcctctaaccgaagaagaatatatacttagacttgacgatgtagccaacatgttgaaatgctggggagcagtctcacatatccgtagcagcctagcaaagtcgaaggagcgacctcggatagggaaggctgtcagcattttcatagacatggattcgacagggggaagagcaaatgaatggatttacaagtaaaaatcgaccggtttgcagctgctaaaccaagaaatcaaaaggttttgtctctacgtttatcgtcatcaattcattttgaaggctcttcagtgatggttgcctgcagaaaccgaggtttttgctatatttgatgtccaaatcaggtagtatatatgtacatgtgtgtattaagtagacacaaatctttacttgaactctctgtgtaaaatatctccatgtgttgaaattcaatcatctttg

SEQ ID NO: 37964 - protein, 98 aa, Arabidopsis thaliana
  peptide (1)..(98): Ceres Seq. ID no. 13491620
  misc_feature (1)..(92): Homolog of NCBI NO: 18402409 NR Description: expressed protein [Arabidopsis thaliana]
  misc_feature (1)..(92): Homolog of NCBI NO: 11994202 NR Description: dbj|BAA18864.1~gene_id:MPN9.15~similar to unknown
MMSIVSSHHHCQQSVIHERSGIGTISKVSCSRYCGPCFSGRLAFSHSLCLKTTYGKTDRRKFSRICSIVDDEGNLDNSDDEEKESLDDKTKRVCMRNL

SEQ ID NO: 37965 - protein, 97 aa, Arabidopsis thaliana
  peptide (1)..(97): Ceres Seq. ID no. 13491621
  misc_feature (1)..(91): Homolog of NCBI NO: 18402409 NR Description: expressed protein [Arabidopsis thaliana]
  misc_feature (1)..(91): Homolog of NCBI NO: 11994202 NR Description: dbj|BAA18864.1~gene_id:MPN9.15~similar to unknown
MSIVSSHHHCQQSVIHERSGIGTISKVSCSRYCGPCFSGRLAFSHSLCLKTTYGKTDRRKFSRICSIVDDEGNLDNSDDEEKESLDDKTKRVCMRNL

SEQ ID NO: 37966 - protein, 62 aa, Arabidopsis thaliana
  peptide (1)..(62): Ceres Seq. ID no. 13491622
MENLMMFNSSRRYALLYSSVFVILYRRKKLRPPIIFISLHEYRISFYEIQLIIFLFILRFLV

SEQ ID NO: 37967 - DNA, 2238 bp, Arabidopsis thaliana
  misc_feature (1)..(2238): Ceres Seq. ID no. 12326863
  misc_feature: MA Experiment ID: 108595 Result: Up-regulated in Transcription
  misc_feature: MA Experiment 108595 PARAMETER Experiment Name: At_Ler-pi_Ovule_cDNA_P Parameter: Plant Line Value: null
  misc_feature: MA Experiment ID: 20000112 Result: Up-regulated in Transcription
  misc_feature: MA Experiment 20000112 PARAMETER Experiment Name: At_42deg_Heat_cDNA_P Parameter: Temperature (deg C) Value: 42 vs. 22
  misc_feature: MA Experiment 20000112 PARAMETER Experiment Name: At_42deg_Heat_cDNA_P Parameter: Timepoint (hr) Value: 2
  misc_feature: MA Experiment 20000112 PARAMETER Experiment Name: At_42deg_Heat_cDNA_P Parameter: Tissue Value: Aerial
  misc_feature: MA Experiment ID: 20000315 Result: Down-regulated in Transcription
  misc_feature: MA Experiment 20000315 PARAMETER Experiment Name: At_14day_Shoots-Roots_Sub_P Parameter: Age (day) Value: 14
  misc_feature: MA Experiment 20000315 PARAMETER Experiment Name: At_14day_Shoots-Roots_Sub_P Parameter: Organism Value: A. thaliana
  misc_feature: MA Experiment 20000315 PARAMETER Experiment Name: At_14day_Shoots-Roots_Sub_P Parameter: Plant Line Value: WS
  misc_feature: MA Experiment 20000315 PARAMETER Experiment Name: At_14day_Shoots-Roots_Sub_P Parameter: Tissue Value: Shoots vs. Whole Plant
  misc_feature: MA Experiment ID: 20000355 Result: Down-regulated in Transcription
  misc_feature: MA Experiment 20000355 PARAMETER Experiment Name: At_Siliques_Sub_P Parameter: Age (day) Value: 21
  misc_feature: MA Experiment 20000355 PARAMETER Experiment Name: At_Siliques_Sub_P Parameter: Organism Value: A. thaliana
  misc_feature: MA Experiment 20000355 PARAMETER Experiment Name: At_Siliques_Sub_P Parameter: Plant Line Value: WS
  misc_feature: MA Experiment 20000355 PARAMETER Experiment Name: At_Siliques_Sub_P Parameter: Tissue Value: Less Than 5mm Siliques vs. Whole Plant
atccactttttgtggctgcttactgttttcctcgaaagttccatttttttcttttgctctgcaaacgaaaaagaaccataaatttttctcatatttaaagctctctctttctctcacaactgtgttcacatgaactttctcaccgctttcttctcttcattgaacaaaaaaaaaagctcttaacttttttttcttctttaggtaaaatttgacaaaagctctcaactttcaaactctgtttcttcatcatcatcatcatcaccatggacgccctgcttcaagtttcagttgatgggtttagatttgagaacggatctggatcttgctgcaaacccagaaacaatctcgaatctgggaacaatctcttccctgatttccacgagtctcagaatcagtcttcaccaaacgattcacctccaacggtgtgtttggataactctcctgttctgaagtacatcaatgatatgttgatggacgaagaagacttcgtaggtatatctcgtgacgatttagctttacaagccgctgagagatccttctacgagataattcaacagcaatctccagaatctgatcagaacactagctcctcctccgatcaaaactccggtgaccaagatttctgttttcccagcacaacaacagattcatcagcgttggtttcgagcggagaatcacagagaaagtaccgtcatcggaatgatgaagaagatgatcttgagaacaatcggagaaacaaacaaccagcgatatttgtctcggagatggaagagttagcagtgaagttagaacatgtgttgttggtatgcaaaacgaaccaagaagaagaagaagaaagaacagtaataacgaaacagagtactccaaacagagcaggaagagcaaaaggttcatcgaacaaatcaaagacgcacaaaactaataccgttgatctacgaagtctcttgacgcaatgtgctcaagctgtagcgagctttgaccagagaagagctacagataaactcaaggagataagagcacactcttctagcaatggagatggaacacaaagactagctttttactttgcagaggcgcttgaggcacgtatcactggaaacatctcaccgcctgtttctaatccgtttccttcaagcacgacatcgatggtggacattttgaaagcgtacaagctgtttgttcatacttgtcccatctatgtaactgattacttcgctgcgaacaaatcgatttacgaacttgctatgaaagcaactaagcttcacatagttgattttggagttctctacggctttcaatggccttgtttgttacgagctctgtctaaacgaccgggcggaccaccaatgcttcgggtgactggaatcgagctgccacaagcgggttttcgtccttcagaccgcgttgaagagactggtcgaagactgaaaaggttctgcgatcagtttaatgttccttttgagttcaacttcatagccaaaaaatgggaaaccatcactcttgatgaacttatgatcaatccaggagagacaacggtcgtcaactgcattcatcggttacaatacactcctgatgaaactgtgtcattagactctccaagagacacggttctgaagctattcagagatatcaatcctgacctctttgtgtttgcagagattaacggaatgtacaactctcctttcttcatgacgaggttccgagaagcgctttttcattactcttcactctttgacatgtttgacaccacaatacacgcagaggatgagtacaaaaacaggtcactgttggagagagagttacttgtgagagacgcgatgagcgtgatttcctgcgagggtgcagagcggtttgcgaggcctgaaacctacaagcaatggcgagttaggattttgagagccgggtttaagccagcaactattagcaaacagatcatgaaggaggctaaggaaattgtgaggaaacgttaccatagagattttgtgatcgatagcgataacaattggatgcttcaaggatggaaaggaagagtcatctatgctttttcttgctggaaacctgctgagaagttcacaaacaataatttaaacatctgaaaaatgttacttctcaattacatcatttttgtttcccaatggttttgtagaatatgtttgatcccgtgagtggatgcaactcttttttcctgcaagtacatattgtattcaaatccttgtggaaatgataaattgtttaatc

SEQ ID NO: 37968 - protein, 610 aa, Arabidopsis thaliana
  peptide (1)..(610): Ceres Seq. ID no. 12326864
  misc_feature (198)..(505): Pfam Name: GRAS family transcription factor Pfam Description: GRAS family transcription factor
  misc_feature (406)..(610): Homolog of NCBI NO: 11358823 NR Description: scarecrow-like protein 11
  misc_feature (141)..(596): Homolog of NCBI NO: 8778540 NR Description: F22G5.9 [Arabidopsis thaliana]
  misc_feature (23)..(599): Homolog of NCBI NO: 34908186 NR Description: P0406G08.7 [Oryza sativa (japonica
  misc_feature (141)..(600): Homolog of NCBI NO: 15222433 NR Description: transcription factor scarecrow-like 14, putative
  misc_feature (32)..(132): Homolog of NCBI NO: 15224338 NR Description: putative SCARECROW gene regulator; protein id:
  misc_feature (145)..(602): Homolog of NCBI NO: 15224338 NR Description: putative SCARECROW gene regulator; protein id:
  misc_feature (61)..(599): Homolog of NCBI NO: 38346720 NR Description: OSJNBa0086O06.18 [Oryza sativa (japonica
  misc_feature (136)..(599): Homolog of NCBI NO: 32813435 NR Description: SCARECROW-like protein [Lilium longiflorum]
  misc_feature (104)..(602): Homolog of NCBI NO: 21593017 NR Description: scarecrow-like protein [Arabidopsis thaliana]
  misc_feature (104)..(602): Homolog of NCBI NO: 15232593 NR Description: scarecrow-like protein
MDALLQVSVDGFRFENGSGSCCKPRNNLESGNNLFPDFHESQNQSSPNDSPPTVCLDNSPVLKYINDMLMDEEDFVGISRDDLALQAAERSFYEIIQQQSPESDQNTSSSSDQNSGDQDFCFPSTTTDSSALVSSGESQRKYRHRNDEEDDLENNRRNKQPAIFVSEMEELAVKLEHVLLVCKTNQEEEEERTVITKQSTPNRAGRAKGSSNKSKTHKTNTVDLRSLLTQCAQAVASFDQRRATDKLKEIRAHSSSNGDGTQRLAFYFAEALEARITGNISPPVSNPFPSSTTSMVDILKAYKLFVHTCPIYVTDYFAANKSIYELAMKATKLHIVDFGVLYGFQWPCLLRALSKRPGGPPMLRVTGIELPQAGFRPSDRVEETGRRLKRFCDQFNVPFEFNFIAKKWETITLDELMINPGETTVVNCIHRLQYTPDETVSLDSPRDTVLKLFRDINPDLFVFAEINGMYNSPFFMTRFREALFHYSSLFDMFDTTIHAEDEYKNRSLLERELLVRDAMSVISCEGAERFARPETYKQWRVRILRAGFKPATISKQIMKEAKEIVRKRYHRDFVIDSDNNWMLQGWKGRVIYAFSCWKPAEKFTNNNLNI

SEQ ID NO: 37969 - protein, 543 aa, Arabidopsis thaliana
  peptide (1)..(543): Ceres Seq. ID no. 12326865
  misc_feature (131)..(438): Pfam Name: GRAS family transcription factor Pfam Description: GRAS family transcription factor
  misc_feature (339)..(543): Homolog of NCBI NO: 11358823 NR Description: scarecrow-like protein 11
  misc_feature (74)..(529): Homolog of NCBI NO: 8778540 NR Description: F22G5.9 [Arabidopsis thaliana]
  misc_feature (1)..(532): Homolog of NCBI NO: 34908186 NR Description: P0406G08.7 [Oryza sativa (japonica
  misc_feature (74)..(533): Homolog of NCBI NO: 15222433 NR Description: transcription factor scarecrow-like 14, putative
  misc_feature (1)..(65): Homolog of NCBI NO: 15224338 NR Description: putative SCARECROW gene regulator; protein id:
  misc_feature (78)..(535): Homolog of NCBI NO: 15224338 NR Description: putative SCARECROW gene regulator; protein id:
  misc_feature (1)..(532): Homolog of NCBI NO: 38346720 NR Description: OSJNBa0086O06.18 [Oryza sativa (japonica
  misc_feature (69)..(532): Homolog of NCBI NO: 32813435 NR Description: SCARECROW-like protein [Lilium longiflorum]
  misc_feature (37)..(535): Homolog of NCBI NO: 21593017 NR Description: scarecrow-like protein [Arabidopsis thaliana]
  misc_feature (37)..(535): Homolog of NCBI NO: 15232593 NR Description: scarecrow-like protein
MLMDEEDFVGISRDDLALQAAERSFYEIIQQQSPESDQNTSSSSDQNSGDQDFCFPSTTTDSSALVSSGESQRKYRHRNDEEDDLENNRRNKQPAIFVSEMEELAVKLEHVLLVCKTNQEEEEERTVITKQSTPNRAGRAKGSSNKSKTHKTNTVDLRSLLTQCAQAVASFDQRRATDKLKEIRAHSSSNGDGTQRLAFYFAEALEARITGNISPPVSNPFPSSTTSMVDILKAYKLFVHTCPIYVTDYFAANKSIYELAMKATKLHIVDFGVLYGFQWPCLLRALSKRPGGPPMLRVTGIELPQAGFRPSDRVEETGRRLKRFCDQFNVPFEFNFIAKKWETITLDELMINPGETTVVNCIHRLQYTPDETVSLDSPRDTVLKLFRDINPDLFVFAEINGMYNSPFFMTRFREALFHYSSLFDMFDTTIHAEDEYKNRSLLERELLVRDAMSVISCEGAERFARPETYKQWRVRILRAGFKPATISKQIMKEAKEIVRKRYHRDFVIDSDNNWMLQGWKGRVIYAFSCWKPAEKFTNNNLNI

SEQ ID NO: 37970 - protein, 541 aa, Arabidopsis thaliana
  peptide (1)..(541): Ceres Seq. ID no. 12326866
  misc_feature (129)..(436): Pfam Name: GRAS family transcription factor Pfam Description: GRAS family transcription factor
  misc_feature (337)..(541): Homolog of NCBI NO: 11358823 NR Description: scarecrow-like protein 11
  misc_feature (72)..(527): Homolog of NCBI NO: 8778540 NR Description: F22G5.9 [Arabidopsis thaliana]
  misc_feature (1)..(530): Homolog of NCBI NO: 34908186 NR Description: P0406G08.7 [Oryza sativa (japonica
  misc_feature (72)..(531): Homolog of NCBI NO: 15222433 NR Description: transcription factor scarecrow-like 14, putative
  misc_feature (1)..(63): Homolog of NCBI NO: 15224338 NR Description: putative SCARECROW gene regulator; protein id:
  misc_feature (76)..(533): Homolog of NCBI NO: 15224338 NR Description: putative SCARECROW gene regulator; protein id:
  misc_feature (1)..(530): Homolog of NCBI NO: 38346720 NR Description: OSJNBa0086O06.18 [Oryza sativa (japonica
  misc_feature (67)..(530): Homolog of NCBI NO: 32813435 NR Description: SCARECROW-like protein [Lilium longiflorum]
  misc_feature (35)..(533): Homolog of NCBI NO: 21593017 NR Description: scarecrow-like protein [Arabidopsis thaliana]
  misc_feature (35)..(533): Homolog of NCBI NO: 15232593 NR Description: scarecrow-like protein
MDEEDFVGISRDDLALQAAERSFYEIIQQQSPESDQNTSSSSDQNSGDQDFCFPSTTTDSSALVSSGESQRKYRHRNDEEDDLENNRRNKQPAIFVSEMEELAVKLEHVLLVCKTNQEEEEERTVITKQSTPNRAGRAKGSSNKSKTHKTNTVDLRSLLTQCAQAVASFDQRRATDKLKEIRAHSSSNGDGTQRLAFYFAEALEARITGNISPPVSNPFPSSTTSMVDILKAYKLFVHTCPIYVTDYFAANKSIYELAMKATKLHIVDFGVLYGFQWPCLLRALSKRPGGPPMLRVTGIELPQAGFRPSDRVEETGRRLKRFCDQFNVPFEFNFIAKKWETITLDELMINPGETTVVNCIHRLQYTPDETVSLDSPRDTVLKLFRDINPDLFVFAEINGMYNSPFFMTRFREALFHYSSLFDMFDTTIHAEDEYKNRSLLERELLVRDAMSVISCEGAERFARPETYKQWRVRILRAGFKPATISKQIMKEAKEIVRKRYHRDFVIDSDNNWMLQGWKGRVIYAFSCWKPAEKFTNNNLNI

SEQ ID NO: 37971 - DNA, 1612 bp, Arabidopsis thaliana
  misc_feature (1)..(1612): Ceres Seq. ID no. 12329884
  misc_feature: MA Experiment ID: 108462 Result: Up-regulated in Transcription
  misc_feature: MA Experiment 108462 PARAMETER Experiment Name: At_Germinating_Seeds_cDNA_P Parameter: Age (day) Value: 2 vs. 0
  misc_feature: MA Experiment 108462 PARAMETER Experiment Name: At_Germinating_Seeds_cDNA_P Parameter: Tissue Value: Germinating Seeds
  misc_feature: MA Experiment ID: 108464 Result: Up-regulated in Transcription
  misc_feature: MA Experiment 108464 PARAMETER Experiment Name: At_Germinating_Seeds_cDNA_P Parameter: Age (day) Value: 4 vs. 0
  misc_feature: MA Experiment 108464 PARAMETER Experiment Name: At_Germinating_Seeds_cDNA_P Parameter: Tissue Value: Germinating Seeds
  misc_feature: MA Experiment ID: 108573 Result: Up-regulated in Transcription
  misc_feature: MA Experiment 108573 PARAMETER Experiment Name: At_Drought_cDNA_P Parameter: Timepoint (hr) Value: 6
  misc_feature: MA Experiment 108573 PARAMETER Experiment Name: At_Drought_cDNA_P Parameter: Tissue Value: Aerial
  misc_feature: MA Experiment 108573 PARAMETER Experiment Name: At_Drought_cDNA_P Parameter: Treatment Value: Drought vs. No Drought
  misc_feature: MA Experiment ID: 108668 Result: Up-regulated in Transcription
  misc_feature: MA Experiment 108668 PARAMETER Experiment Name: At_2mM_SA_cDNA_P Parameter: Plant Line Value: WS
  misc_feature: MA Experiment 108668 PARAMETER Experiment Name: At_2mM_SA_cDNA_P Parameter: Timepoint (hr) Value: 6
  misc_feature: MA Experiment 108668 PARAMETER Experiment Name: At_2mM_SA_cDNA_P Parameter: Treatment Value: 2mM SA vs. No Treatment
  misc_feature: MA Experiment ID: 20000180 Result: Up-regulated in Transcription
  misc_feature: MA Experiment 20000180 PARAMETER Experiment Name: At_Germinating_Seeds_P Parameter: Age (hr) Value: 24 vs. 0
  misc_feature: MA Experiment 20000180 PARAMETER Experiment Name: At_Germinating_Seeds_P Parameter: Tissue Value: Germinating Seeds
  misc_feature: MA Experiment ID: 20000185 Result: Up-regulated in Transcription
  misc_feature: MA Experiment 20000185 PARAMETER Experiment Name: At_Roots__P Parameter: Age (day) Value: 7 vs. 21
  misc_feature: MA Experiment 20000185 PARAMETER Experiment Name: At_Roots__P Parameter: Organism Value: A. thaliana
  misc_feature: MA Experiment 20000185 PARAMETER Experiment Name: At_Roots__P Parameter: Tissue Value: Roots vs. Whole Plant
  misc_feature: MA Experiment ID: 20001558 Result: Down-regulated in Transcription
  misc_feature: MA Experiment 20001558 PARAMETER Experiment Name: At_Drought_Soil_Dry_P Parameter: Age (day) Value: 27
  misc_feature: MA Experiment 20001558 PARAMETER Experiment Name: At_Drought_Soil_Dry_P Parameter: Organism Value: A. thaliana
  misc_feature: MA Experiment 20001558 PARAMETER Experiment Name: At_Drought_Soil_Dry_P Parameter: Plant Line Value: WS
  misc_feature: MA Experiment 20001558 PARAMETER Experiment Name: At_Drought_Soil_Dry_P Parameter: Post Timepoint (hr) Value: 6
  misc_feature: MA Experiment 20001558 PARAMETER Experiment Name: At_Drought_Soil_Dry_P Parameter: Post-Treatment Value: Re-Water vs. No Drought
  misc_feature: MA Experiment 20001558 PARAMETER Experiment Name: At_Drought_Soil_Dry_P Parameter: Timepoint (day) Value: 13
  misc_feature: MA Experiment 20001558 PARAMETER Experiment Name: At_Drought_Soil_Dry_P Parameter: Treatment Value: Drought vs. No Drought
acgccgtgtcgtttctcatctcgccggtcaacttttgagagagagaagaagaaaaatgcatttgagtgagaatgaaggtgtcgaaggtaacaccttcgtggtcactggaggtcttggcttcgtcggtgcagctctctgcttagagctcgttcgtcgtggtgctcgccaagttcgctcttttgacctccgtcactcttctccttggtccgatgatctcaaaaacagtggcgttcgctgcattcaaggtgatgtgactaagaaacaagatgtggataacgctttagatggagcagactgtgttttgcatcttgcttcttatggtatgtctgggaaggagatgcttcggtttggtcgttgtgatgaggttaacatcaacgggacttgtaatgtcttggaagctgcgtttaaacatgagattacaagaattgtgtatgttagcacttacaatgttgtgtttggtggtaaagagattctcaatggtaatgaaggtttgccttatttccctcttgatgatcatgttgatgcatatagtcgaactaaatcgattgcagaacagttggttctcaagagtaatggtcgaccttttaagaatggaggcaaacggatgtatacatgtgcgattcgtccagcggctatatatggacctggcgaagataggcatcttcctaggattgttactctaacaaagttgggtttggctctcttcaagatcggtgaaccgagtgtcaaatcagactggatttatgtcgaaaaccttgtcctagcaatcatcttggcaagtatgggactcttggatgacattcctggcagagaaggacaacctgttgctgctggtcaaccatattttgtctctgacggttacccggtgaatacctttgagtttctgcgtcctttactaaaaagtttagactatgacctgcccaagtgtacaatctctgtaccttttgcgctgtccttgggtaagatcttccaaggtttctacactgtgctatatccatggctatcaaagagctggttaccacagccccttgttcttcctgctgaagtctacaaggtcggtgttacccattatttctcatatcttaaagccaaggaggagcttggatatgttccattcaagagctccaaggaaggtatggctgcaactatctcatactggcaggaaaggaagcggagatctttagacggtccaaccatgttcacttggatagctgttacaataggaatgtctgctctttttgctgccggatggttacccgacataggacctgtgcctttcttaagagccatacacctcttctttttccggacaatcacgattgtaaaggctgtcttcattgtagcagtggtactacatgttgcagaaggaatctatgcgtggtttctggctaaacgagtcgacccaggaaatgcaatggggtggttcttgcaaaccagcgctctcgggtttttctcaatgcggtttttattgaagagagcgaaagagcaccagatttaaacccagccttgttttgatgttgtaatcaaaaaaagttttacatgacttgaatgttttcaagattgaaaaacacaaaataaaagatctacattaatcaggatattccaatttctg

SEQ ID NO: 37972 - protein, 498 aa, Arabidopsis thaliana
  peptide (1)..(498): Ceres Seq. ID no. 12329885
  misc_feature (27)..(390): Pfam Name: 3-beta hydroxysteroid dehydrogenase/isomerase family Pfam Description: 3-beta hydroxysteroid dehydrogenase/isomerase
  misc_feature (27)..(390): Pfam Name: 3-beta hydroxysteroid dehydrogenase/isomerase family Pfam Description: 3-beta hydroxysteroid dehydrogenase/isomerase
  misc_feature (33)..(312): Homolog of NCBI NO: 477637 NR Description: cholesterol dehydrogenase (EC 1.1.1.-) - Nocardia
  misc_feature (33)..(398): Homolog of NCBI NO: 15225272 NR Description: 3-beta-hydroxysteroid dehydrogenase; protein id:
  misc_feature (33)..(386): Homolog of NCBI NO: 15608246 NR Description: hypothetical protein Rv1106c [Mycobacterium
  misc_feature (33)..(393): Homolog of NCBI NO: 21553411 NR Description: 3-beta-hydroxysteroid dehydrogenase, putative
  misc_feature (33)..(393): Homolog of NCBI NO: 30694041 NR Description: 3-beta hydroxysteroid dehydrogenase/isomerase
  misc_feature (33)..(312): Homolog of NCBI NO: 477637 NR Description: cholesterol dehydrogenase (EC 1.1.1.-) - Nocardia
  misc_feature (33)..(386): Homolog of NCBI NO: 15608246 NR Description: hypothetical protein Rv1106c [Mycobacterium
  misc_feature (33)..(393): Homolog of NCBI NO: 30694041 NR Description: 3-beta hydroxysteroid dehydrogenase/isomerase
  misc_feature (19)..(498): Homolog of NCBI NO: 15226138 NR Description: putative steroid dehydrogenase
  misc_feature (33)..(402): Homolog of NCBI NO: 21553311 NR Description: NAD(P) dependent steroid dehydrogenase-like [Homo
  misc_feature (31)..(418): Homolog of NCBI NO: 21311981 NR Description: RIKEN cDNA 4632417N05 [Mus musculus]
  misc_feature (31)..(288): Homolog of NCBI NO: 34851797 NR Description: similar to RIKEN cDNA 4632417N05 [Rattus
  misc_feature (33)..(393): Homolog of NCBI NO: 18401656 NR Description: 3-beta-hydroxysteroid dehydrogenase, putative
  misc_feature (33)..(393): Homolog of NCBI NO: 21553411 NR Description: 3-beta-hydroxysteroid dehydrogenase, putative
  misc_feature (33)..(398): Homolog of NCBI NO: 15225272 NR Description: 3-beta-hydroxysteroid dehydrogenase; protein id:
  misc_feature (33)..(393): Homolog of NCBI NO: 18401656 NR Description: 3-beta-hydroxysteroid dehydrogenase, putative
  misc_feature (31)..(288): Homolog of NCBI NO: 34851797 NR Description: similar to RIKEN cDNA 4632417N05 [Rattus
  misc_feature (31)..(418): Homolog of NCBI NO: 21311981 NR Description: RIKEN cDNA 4632417N05 [Mus musculus]
  misc_feature (33)..(402): Homolog of NCBI NO: 21553311 NR Description: NAD(P) dependent steroid dehydrogenase-like [Homo
  misc_feature (19)..(498): Homolog of NCBI NO: 15226138 NR Description: putative steroid dehydrogenase
RRVVSHLAGQLLRERRRKMHLSENEGVEGNTFVVTGGLGFVGAALCLELVRRGARQVRSFDLRHSSPWSDDLKNSGVRCIQGDVTKKQDVDNALDGADCVLHLASYGMSGKEMLRFGRCDEVNINGTCNVLEAAFKHEITRIVYVSTYNVVFGGKEILNGNEGLPYFPLDDHVDAYSRTKSIAEQLVLKSNGRPFKNGGKRMYTCAIRPAAIYGPGEDRHLPRIVTLTKLGLALFKIGEPSVKSDWIYVENLVLAIILASMGLLDDIPGREGQPVAAGQPYFVSDGYPVNTFEFLRPLLKSLDYDLPKCTISVPFALSLGKIFQGFYTVLYPWLSKSWLPQPLVLPAEVYKVGVTHYFSYLKAKEELGYVPFKSSKEGMAATISYWQERKRRSLDGPTMFTWIAVTIGMSALFAAGWLPDIGPVPFLRAIHLFFFRTITIVKAVFIVAVVLHVAEGIYAWFLAKRVDPGNAMGWFLQTSALGFFSMRFLLKRAKEHQI

SEQ ID NO: 37973 - protein, 480 aa, Arabidopsis thaliana
  peptide (1)..(480): Ceres Seq. ID no. 12329886
  misc_feature (9)..(372): Pfam Name: 3-beta hydroxysteroid dehydrogenase/isomerase family Pfam Description: 3-beta hydroxysteroid dehydrogenase/isomerase
  misc_feature (9)..(372): Pfam Name: 3-beta hydroxysteroid dehydrogenase/isomerase family Pfam Description: 3-beta hydroxysteroid dehydrogenase/isomerase
  misc_feature (15)..(294): Homolog of NCBI NO: 477637 NR Description: cholesterol dehydrogenase (EC 1.1.1.-) - Nocardia
  misc_feature (15)..(380): Homolog of NCBI NO: 15225272 NR Description: 3-beta-hydroxysteroid dehydrogenase; protein id:
  misc_feature (15)..(368): Homolog of NCBI NO: 15608246 NR Description: hypothetical protein Rv1106c [Mycobacterium
  misc_feature (15)..(375): Homolog of NCBI NO: 21553411 NR Description: 3-beta-hydroxysteroid dehydrogenase, putative
  misc_feature (15)..(375): Homolog of NCBI NO: 30694041 NR Description: 3-beta hydroxysteroid dehydrogenase/isomerase
  misc_feature (15)..(294): Homolog of NCBI NO: 477637 NR Description: cholesterol dehydrogenase (EC 1.1.1.-) - Nocardia
  misc_feature (15)..(368): Homolog of NCBI NO: 15608246 NR Description: hypothetical protein Rv1106c [Mycobacterium
  misc_feature (15)..(375): Homolog of NCBI NO: 30694041 NR Description: 3-beta hydroxysteroid dehydrogenase/isomerase
  misc_feature (1)..(480): Homolog of NCBI NO: 15226138 NR Description: putative steroid dehydrogenase
  misc_feature (15)..(384): Homolog of NCBI NO: 21553311 NR Description: NAD(P) dependent steroid dehydrogenase-like [Homo
  misc_feature (13)..(400): Homolog of NCBI NO: 21311981 NR Description: RIKEN cDNA 4632417N05 [Mus musculus]
  misc_feature (13)..(270): Homolog of NCBI NO: 34851797 NR Description: similar to RIKEN cDNA 4632417N05 [Rattus
  misc_feature (15)..(375): Homolog of NCBI NO: 18401656 NR Description: 3-beta-hydroxysteroid dehydrogenase, putative
  misc_feature (15)..(375): Homolog of NCBI NO: 21553411 NR Description: 3-beta-hydroxysteroid dehydrogenase, putative
  misc_feature (15)..(380): Homolog of NCBI NO: 15225272 NR Description: 3-beta-hydroxysteroid dehydrogenase; protein id:
  misc_feature (15)..(375): Homolog of NCBI NO: 18401656 NR Description: 3-beta-hydroxysteroid dehydrogenase, putative
  misc_feature (13)..(270): Homolog of NCBI NO: 34851797 NR Description: similar to RIKEN cDNA 4632417N05 [Rattus
  misc_feature (13)..(400): Homolog of NCBI NO: 21311981 NR Description: RIKEN cDNA 4632417N05 [Mus musculus]
  misc_feature (15)..(384): Homolog of NCBI NO: 21553311 NR Description: NAD(P) dependent steroid dehydrogenase-like [Homo
  misc_feature (1)..(480): Homolog of NCBI NO: 15226138 NR Description: putative steroid dehydrogenase
MHLSENEGVEGNTFVVTGGLGFVGAALCLELVRRGARQVRSFDLRHSSPWSDDLKNSGVRCIQGDVTKKQDVDNALDGADCVLHLASYGMSGKEMLRFGRCDEVNINGTCNVLEAAFKHEITRIVYVSTYNVVFGGKEILNGNEGLPYFPLDDHVDAYSRTKSIAEQLVLKSNGRPFKNGGKRMYTCAIRPAAIYGPGEDRHLPRIVTLTKLGLALFKIGEPSVKSDWIYVENLVLAIILASMGLLDDIPGREGQPVAAGQPYFVSDGYPVNTFEFLRPLLKSLDYDLPKCTISVPFALSLGKIFQGFYTVLYPWLSKSWLPQPLVLPAEVYKVGVTHYFSYLKAKEELGYVPFKSSKEGMAATISYWQERKRRSLDGPTMFTWIAVTIGMSALFAAGWLPDIGPVPFLRAIHLFFFRTITIVKAVFIVAVVLHVAEGIYAWFLAKRVDPGNAMGWFLQTSALGFFSMRFLLKRAKEHQI

SEQ ID NO: 37974 - protein, 391 aa, Arabidopsis thaliana
  peptide (1)..(391): Ceres Seq. ID no. 12329887
  misc_feature (1)..(283): Pfam Name: 3-beta hydroxysteroid dehydrogenase/isomerase family Pfam Description: 3-beta hydroxysteroid dehydrogenase/isomerase
  misc_feature (1)..(283): Pfam Name: 3-beta hydroxysteroid dehydrogenase/isomerase family Pfam Description: 3-beta hydroxysteroid dehydrogenase/isomerase
  misc_feature (1)..(205): Homolog of NCBI NO: 477637 NR Description: cholesterol dehydrogenase (EC 1.1.1.-) - Nocardia
  misc_feature (1)..(291): Homolog of NCBI NO: 15225272 NR Description: 3-beta-hydroxysteroid dehydrogenase; protein id:
  misc_feature (1)..(279): Homolog of NCBI NO: 15608246 NR Description: hypothetical protein Rv1106c [Mycobacterium
  misc_feature (1)..(286): Homolog of NCBI NO: 21553411 NR Description: 3-beta-hydroxysteroid dehydrogenase, putative
  misc_feature (1)..(286): Homolog of NCBI NO: 30694041 NR Description: 3-beta hydroxysteroid dehydrogenase/isomerase
  misc_feature (1)..(205): Homolog of NCBI NO: 477637 NR Description: cholesterol dehydrogenase (EC 1.1.1.-) - Nocardia
  misc_feature (1)..(279): Homolog of NCBI NO: 15608246 NR Description: hypothetical protein Rv1106c [Mycobacterium
  misc_feature (1)..(286): Homolog of NCBI NO: 30694041 NR Description: 3-beta hydroxysteroid dehydrogenase/isomerase
  misc_feature (1)..(391): Homolog of NCBI NO: 15226138 NR Description: putative steroid dehydrogenase
  misc_feature (1)..(295): Homolog of NCBI NO: 21553311 NR Description: NAD(P) dependent steroid dehydrogenase-like [Homo
  misc_feature (1)..(311): Homolog of NCBI NO: 21311981 NR Description: RIKEN cDNA 4632417N05 [Mus musculus]
  misc_feature (1)..(181): Homolog of NCBI NO: 34851797 NR Description: similar to RIKEN cDNA 4632417N05 [Rattus
  misc_feature (1)..(286): Homolog of NCBI NO: 18401656 NR Description: 3-beta-hydroxysteroid dehydrogenase, putative
  misc_feature (1)..(286): Homolog of NCBI NO: 21553411 NR Description: 3-beta-hydroxysteroid dehydrogenase, putative
  misc_feature (1)..(291): Homolog of NCBI NO: 15225272 NR Description: 3-beta-hydroxysteroid dehydrogenase; protein id:
  misc_feature (1)..(286): Homolog of NCBI NO: 18401656 NR Description: 3-beta-hydroxysteroid dehydrogenase, putative
  misc_feature (1)..(181): Homolog of NCBI NO: 34851797 NR Description: similar to RIKEN cDNA 4632417N05 [Rattus
  misc_feature (1)..(311): Homolog of NCBI NO: 21311981 NR Description: RIKEN cDNA 4632417N05 [Mus musculus]
  misc_feature (1)..(295): Homolog of NCBI NO: 21553311 NR Description: NAD(P) dependent steroid dehydrogenase-like [Homo
  misc_feature (1)..(391): Homolog of NCBI NO: 15226138 NR Description: putative steroid dehydrogenase
MSGKEMLRFGRCDEVNINGTCNVLEAAFKHEITRIVYVSTYNVVFGGKEILNGNEGLPYFPLDDHVDAYSRTKSIAEQLVLKSNGRPFKNGGKRMYTCAIRPAAIYGPGEDRHLPRIVTLTKLGLALFKIGEPSVKSDWIYVENLVLAIILASMGLLDDIPGREGQPVAAGQPYFVSDGYPVNTFEFLRPLLKSLDYDLPKCTISVPFALSLGKIFQGFYTVLYPWLSKSWLPQPLVLPAEVYKVGVTHYFSYLKAKEELGYVPFKSSKEGMAATISYWQERKRRSLDGPTMFTWIAVTIGMSALFAAGWLPDIGPVPFLRAIHLFFFRTITIVKAVFIVAVVLHVAEGIYAWFLAKRVDPGNAMGWFLQTSALGFFSMRFLLKRAKEHQI

SEQ ID NO: 37975 - DNA, 713 bp, Arabidopsis thaliana
  misc_feature (1)..(713): Ceres Seq. ID no. 12384460
  misc_feature: MA Experiment ID: 108434 Result: Down-regulated in Transcription
  misc_feature: MA Experiment 108434 PARAMETER Experiment Name: At_Root_Tips_cDNA_P Parameter: Tissue Value: Root Tips
  misc_feature: MA Experiment ID: 108462 Result: Down-regulated in Transcription
  misc_feature: MA Experiment 108462 PARAMETER Experiment Name: At_Germinating_Seeds_cDNA_P Parameter: Age (day) Value: 2 vs. 0
  misc_feature: MA Experiment 108462 PARAMETER Experiment Name: At_Germinating_Seeds_cDNA_P Parameter: Tissue Value: Germinating Seeds
  misc_feature: MA Experiment ID: 108463 Result: Down-regulated in Transcription
  misc_feature: MA Experiment 108463 PARAMETER Experiment Name: At_Germinating_Seeds_cDNA_P Parameter: Age (day) Value: 3 vs. 0
  misc_feature: MA Experiment 108463 PARAMETER Experiment Name: At_Germinating_Seeds_cDNA_P Parameter: Tissue Value: Germinating Seeds
  misc_feature: MA Experiment ID: 108464 Result: Down-regulated in Transcription
  misc_feature: MA Experiment 108464 PARAMETER Experiment Name: At_Germinating_Seeds_cDNA_P Parameter: Age (day) Value: 4 vs. 0
  misc_feature: MA Experiment 108464 PARAMETER Experiment Name: At_Germinating_Seeds_cDNA_P Parameter: Tissue Value: Germinating Seeds
  misc_feature: MA Experiment ID: 108473 Result: Down-regulated in Transcription
  misc_feature: MA Experiment 108473 PARAMETER Experiment Name: At_Drought_Flowers_cDNA_P Parameter: Timepoint (hr) Value: 7 d
  misc_feature: MA Experiment 108473 PARAMETER Experiment Name: At_Drought_Flowers_cDNA_P Parameter: Tissue Value: Flower
  misc_feature: MA Experiment 108473 PARAMETER Experiment Name: At_Drought_Flowers_cDNA_P Parameter: Treatment Value: Drought vs. No Drought
  misc_feature: MA Experiment ID: 108474 Result: Down-regulated in Transcription
  misc_feature: MA Experiment 108474 PARAMETER Experiment Name: At_Drought_Flowers_cDNA_P Parameter: Timepoint (hr) Value: null
  misc_feature: MA Experiment 108474 PARAMETER Experiment Name: At_Drought_Flowers_cDNA_P Parameter: Treatment Value: Drought vs. No Drought
  misc_feature: MA Experiment ID: 108501 Result: Up-regulated in Transcription
  misc_feature: MA Experiment 108501 PARAMETER Experiment Name: At_ap2_floral_buds_cDNA_P Parameter: Plant Line Value: ap2 (Ler.)
  misc_feature: MA Experiment 108501 PARAMETER Experiment Name: At_ap2_floral_buds_cDNA_P Parameter: Tissue Value: Closed Flower
  misc_feature: MA Experiment ID: 108573 Result: Down-regulated in Transcription
  misc_feature: MA Experiment 108573 PARAMETER Experiment Name: At_Drought_cDNA_P Parameter: Timepoint (hr) Value: 6
  misc_feature: MA Experiment 108573 PARAMETER Experiment Name: At_Drought_cDNA_P Parameter: Tissue Value: Aerial
  misc_feature: MA Experiment 108573 PARAMETER Experiment Name: At_Drought_cDNA_P Parameter: Treatment Value: Drought vs. No Drought
  misc_feature: MA Experiment ID: 108595 Result: Up-regulated in Transcription
  misc_feature: MA Experiment 108595 PARAMETER Experiment Name: At_Ler-pi_Ovule_cDNA_P Parameter: Plant Line Value: null
  misc_feature: MA Experiment ID: 108609 Result: Down-regulated in Transcription
  misc_feature: MA Experiment 108609 PARAMETER Experiment Name: At_100uM_ABA_cDNA_P Parameter: Timepoint (hr) Value: 24
  misc_feature: MA Experiment 108609 PARAMETER Experiment Name: At_100uM_ABA_cDNA_P Parameter: Tissue Value: Aerial
  misc_feature: MA Experiment 108609 PARAMETER Experiment Name: At_100uM_ABA_cDNA_P Parameter: Treatment Value: 100uM ABA vs. No Treatment
  misc_feature: MA Experiment ID: 20000070 Result: Down-regulated in Transcription
  misc_feature: MA Experiment 20000070 PARAMETER Experiment Name: At_100uM_ABA_Mutants_cDNA_P Parameter: Plant Line Value: CS24
  misc_feature: MA Experiment 20000070 PARAMETER Experiment Name: At_100uM_ABA_Mutants_cDNA_P Parameter: Timepoint (hr) Value: 6
  misc_feature: MA Experiment 20000070 PARAMETER Experiment Name: At_100uM_ABA_Mutants_cDNA_P Parameter: Tissue Value: Aerial
  misc_feature: MA Experiment 20000070 PARAMETER Experiment Name: At_100uM_ABA_Mutants_cDNA_P Parameter: Treatment Value: 100uM ABA vs. No Treatment
  misc_feature: MA Experiment ID: 20000071 Result: Down-regulated in Transcription
  misc_feature: MA Experiment 20000071 PARAMETER Experiment Name: At_100uM_ABA_Mutants_cDNA_P Parameter: Plant Line Value: CS8104
  misc_feature: MA Experiment 20000071 PARAMETER Experiment Name: At_100uM_ABA_Mutants_cDNA_P Parameter: Timepoint (hr) Value: 6
  misc_feature: MA Experiment 20000071 PARAMETER Experiment Name: At_100uM_ABA_Mutants_cDNA_P Parameter: Tissue Value: Aerial
  misc_feature: MA Experiment 20000071 PARAMETER Experiment Name: At_100uM_ABA_Mutants_cDNA_P Parameter: Treatment Value: 100uM ABA vs. No Treatment
  misc_feature: MA Experiment ID: 20000089 Result: Down-regulated in Transcription
  misc_feature: MA Experiment ID: 20000090 Result: Down-regulated in Transcription
  misc_feature: MA Experiment ID: 20000117 Result: Down-regulated in Transcription
  misc_feature: MA Experiment 20000117 PARAMETER Experiment Name: At_100uM_ABA_Mutants_cDNA_P Parameter: Plant Line Value: Columbia
  misc_feature: MA Experiment 20000117 PARAMETER Experiment Name: At_100uM_ABA_Mutants_cDNA_P Parameter: Timepoint (hr) Value: 6
  misc_feature: MA Experiment 20000117 PARAMETER Experiment Name: At_100uM_ABA_Mutants_cDNA_P Parameter: Tissue Value: Aerial
  misc_feature: MA Experiment 20000117 PARAMETER Experiment Name: At_100uM_ABA_Mutants_cDNA_P Parameter: Treatment Value: 100uM ABA vs. No Treatment
  misc_feature: MA Experiment ID: 20000180 Result: Down-regulated in Transcription
  misc_feature: MA Experiment 20000180 PARAMETER Experiment Name: At_Germinating_Seeds_P Parameter: Age (hr) Value: 24 vs. 0
  misc_feature: MA Experiment 20000180 PARAMETER Experiment Name: At_Germinating_Seeds_P Parameter: Tissue Value: Germinating Seeds
  misc_feature: MA Experiment ID: 20000185 Result: Up-regulated in Transcription
  misc_feature: MA Experiment 20000185 PARAMETER Experiment Name: At_Roots__P Parameter: Age (day) Value: 7 vs. 21
  misc_feature: MA Experiment 20000185 PARAMETER Experiment Name: At_Roots__P Parameter: Organism Value: A. thaliana
  misc_feature: MA Experiment 20000185 PARAMETER Experiment Name: At_Roots__P Parameter: Tissue Value: Roots vs. Whole Plant
  misc_feature: MA Experiment ID: 20000224 Result: Down-regulated in Transcription
  misc_feature: MA Experiment ID: 20000234 Result: Up-regulated in Transcription
  misc_feature: MA Experiment 20000234 PARAMETER Experiment Name: At_Siliques_P Parameter: Age (day) Value: 21
  misc_feature: MA Experiment 20000234 PARAMETER Experiment Name: At_Siliques_P Parameter: Organism Value: A. thaliana
  misc_feature: MA Experiment 20000234 PARAMETER Experiment Name: At_Siliques_P Parameter: Plant Line Value: WS
  misc_feature: MA Experiment 20000234 PARAMETER Experiment Name: At_Siliques_P Parameter: Tissue Value: Less Than 5mm Siliques vs. Whole Plant
  misc_feature: MA Experiment ID: 20000235 Result: Up-regulated in Transcription
  misc_feature: MA Experiment 20000235 PARAMETER Experiment Name: At_Siliques_P Parameter: Age (day) Value: 21
  misc_feature: MA Experiment 20000235 PARAMETER Experiment Name: At_Siliques_P Parameter: Organism Value: A. thaliana
  misc_feature: MA Experiment 20000235 PARAMETER Experiment Name: At_Siliques_P Parameter: Plant Line Value: WS
  misc_feature: MA Experiment 20000235 PARAMETER Experiment Name: At_Siliques_P Parameter: Tissue Value: 5-10mm Siliques vs. Whole Plant
  misc_feature: MA Experiment ID: 20000264 Result: Up-regulated in Transcription
  misc_feature: MA Experiment 20000264 PARAMETER Experiment Name: At_Open_Flower_P Parameter: Age (day) Value: 21
  misc_feature: MA Experiment 20000264 PARAMETER Experiment Name: At_Open_Flower_P Parameter: Plant Line Value: WS
  misc_feature: MA Experiment 20000264 PARAMETER Experiment Name: At_Open_Flower_P Parameter: Tissue Value: Open Flower vs. Whole Plant
  misc_feature: MA Experiment ID: 20000265 Result: Up-regulated in Transcription
  misc_feature: MA Experiment 20000265 PARAMETER Experiment Name: At_Open_Flower_P Parameter: Age (day) Value: 21
  misc_feature: MA Experiment 20000265 PARAMETER Experiment Name: At_Open_Flower_P Parameter: Plant Line Value: WS
  misc_feature: MA Experiment 20000265 PARAMETER Experiment Name: At_Open_Flower_P Parameter: Tissue Value: Closed Flower vs. Whole Plant
  misc_feature: MA Experiment ID: 20000269 Result: Up-regulated in Transcription
  misc_feature: MA Experiment 20000269 PARAMETER Experiment Name: At_1mM_KNO3_L-vs-H_Roots_P Parameter: Age (day) Value: 7,10,12
  misc_feature: MA Experiment 20000269 PARAMETER Experiment Name: At_1mM_KNO3_L-vs-H_Roots_P Parameter: Organism Value: A. thaliana
  misc_feature: MA Experiment 20000269 PARAMETER Experiment Name: At_1mM_KNO3_L-vs-H_Roots_P Parameter: Plant Line Value: WS
  misc_feature: MA Experiment 20000269 PARAMETER Experiment Name: At_1mM_KNO3_L-vs-H_Roots_P Parameter: Timepoint (day) Value: 7,10,12
  misc_feature: MA Experiment 20000269 PARAMETER Experiment Name: At_1mM_KNO3_L-vs-H_Roots_P Parameter: Tissue Value: Roots
  misc_feature: MA Experiment 20000269 PARAMETER Experiment Name: At_1mM_KNO3_L-vs-H_Roots_P Parameter: Treatment Value: 1mM KNO3 vs. 50mM KNO3
  misc_feature: MA Experiment ID: 20000286 Result: Up-regulated in Transcription
  misc_feature: MA Experiment 20000286 PARAMETER Experiment Name: At_Open_Flower_P Parameter: Age (day) Value: 21
  misc_feature: MA Experiment 20000286 PARAMETER Experiment Name: At_Open_Flower_P Parameter: Plant Line Value: WS
  misc_feature: MA Experiment 20000286 PARAMETER Experiment Name: At_Open_Flower_P Parameter: Tissue Value: Half Open vs. Whole Plant
  misc_feature: MA Experiment ID: 20000438 Result: Up-regulated in Transcription
  misc_feature: MA Experiment 20000438 PARAMETER Experiment Name: At_Shoots__P Parameter: Age (day) Value: 14
  misc_feature: MA Experiment 20000438 PARAMETER Experiment Name: At_Shoots__P Parameter: Tissue Value: Shoots vs. Whole Plant
  misc_feature: MA Experiment ID: 20000453 Result: Down-regulated in Transcription
  misc_feature: MA Experiment 20000453 PARAMETER Experiment Name: At_100uM_ABA_P Parameter: Age (day) Value: 15
  misc_feature: MA Experiment 20000453 PARAMETER Experiment Name: At_100uM_ABA_P Parameter: Organism Value: A. thaliana
  misc_feature: MA Experiment 20000453 PARAMETER Experiment Name: At_100uM_ABA_P Parameter: Plant Line Value: WS
  misc_feature: MA Experiment 20000453 PARAMETER Experiment Name: At_100uM_ABA_P Parameter: Timepoint (hr) Value: 24
  misc_feature: MA Experiment 20000453 PARAMETER Experiment Name: At_100uM_ABA_P Parameter: Tissue Value: Aerial
  misc_feature: MA Experiment 20000453 PARAMETER Experiment Name: At_100uM_ABA_P Parameter: Treatment Value: 100uM ABA vs. No Treatment
  misc_feature: MA Experiment ID: 20001458 Result: Down-regulated in Transcription
  misc_feature: MA Experiment 20001458 PARAMETER Experiment Name: At_50mM_NH4NO3_L-to-H_P Parameter: Age (day) Value: Undefined
  misc_feature: MA Experiment 20001458 PARAMETER Experiment Name: At_50mM_NH4NO3_L-to-H_P Parameter: Organism Value: Undefined
  misc_feature: MA Experiment 20001458 PARAMETER Experiment Name: At_50mM_NH4NO3_L-to-H_P Parameter: Plant Line Value: Undefined
  misc_feature: MA Experiment 20001458 PARAMETER Experiment Name: At_50mM_NH4NO3_L-to-H_P Parameter: Timepoint (hr) Value: 2
  misc_feature: MA Experiment 20001458 PARAMETER Experiment Name: At_50mM_NH4NO3_L-to-H_P Parameter: Tissue Value: Siliques
  misc_feature: MA Experiment 20001458 PARAMETER Experiment Name: At_50mM_NH4NO3_L-to-H_P Parameter: Treatment Value: 50mM NH4NO3 vs. 100mM Manitol
  misc_feature: MA Experiment ID: 20001557 Result: Up-regulated in Transcription
  misc_feature: MA Experiment 20001557 PARAMETER Experiment Name: At_Drought_Soil_Dry_P Parameter: Age (day) Value: 27
  misc_feature: MA Experiment 20001557 PARAMETER Experiment Name: At_Drought_Soil_Dry_P Parameter: Organism Value: A. thaliana
  misc_feature: MA Experiment 20001557 PARAMETER Experiment Name: At_Drought_Soil_Dry_P Parameter: Plant Line Value: WS
  misc_feature: MA Experiment 20001557 PARAMETER Experiment Name: At_Drought_Soil_Dry_P Parameter: Post Timepoint (hr) Value: 3
  misc_feature: MA Experiment 20001557 PARAMETER Experiment Name: At_Drought_Soil_Dry_P Parameter: Post-Treatment Value: Re-Water vs. No Drought
  misc_feature: MA Experiment 20001557 PARAMETER Experiment Name: At_Drought_Soil_Dry_P Parameter: Timepoint (day) Value: 13
  misc_feature: MA Experiment 20001557 PARAMETER Experiment Name: At_Drought_Soil_Dry_P Parameter: Treatment Value: Drought vs. No Drought
  misc_feature: MA Experiment ID: 20001761 Result: Down-regulated in Transcription
  misc_feature: MA Experiment 20001761 PARAMETER Experiment Name: At_50mM_NH4NO3_L-to-H_P Parameter: Timepoint (hr) Value: 4
  misc_feature: MA Experiment 20001761 PARAMETER Experiment Name: At_50mM_NH4NO3_L-to-H_P Parameter: Tissue Value: Siliques
  misc_feature: MA Experiment 20001761 PARAMETER Experiment Name: At_50mM_NH4NO3_L-to-H_P Parameter: Treatment Value: 50mM NH4NO3 vs 100mM Mannitol
aacgagtactttgtcacggacgacaacgtaggaatgctcaagttggccaaggaagctaactccatcttgtttgattaccggattccgccgatgggatgtgccggcgcantgcgaccgacagtccaatccaaatgaacggtcttccgatcagcatttacgcaccggagacagtcgggtgcgttgtggttgacgggaaaggacattgtgccgccgggacatccacgggtggtttaatgaacaagatgatgggaaggattggtgactcgccgctgataggagccgggacgtatgcgtcggagttttgtggtgtgtcgtgtaccggagaaggagaagccattataagagcaaccctagctcgtgatgtgtcagctgttatggagtataaaggacttaacctccaagaagcggttgattacgtcatcaagcatcgacttgacgaagggttcgctggactcattgctgtctcgaataaaggagaggtggtttgtggttttaactctaatgggatgttcaggggatgtgcaactgaggatggattcatggaggttgctatttgggagtgagaaatatttttagattaagaaaatgtcttactagtatttaatcagtcatcgctctattaatttggttattcattatcataaagctggagtagtaaatttagttctgtcgttatcaccagtcctatattgatttgtgtttaatgcggttcc

SEQ ID NO: 37976 - protein, 155 aa, Arabidopsis thaliana
  peptide (1)..(155): Ceres Seq. ID no. 12384461
  misc_feature (1)..(155): Pfam Name: Asparaginase Pfam Description: Asparaginase
  misc_feature (1)..(155): Homolog of NCBI NO: 26451560 NR Description: putative L-asparaginase [Arabidopsis thaliana]
  misc_feature (1)..(155): Homolog of NCBI NO: 18401029 NR Description: putative L-asparaginase
  misc_feature (5)..(5): Xaa is any aa, unknown or other
MCRRXATDSPIQMNGLPISIYAPETVGCVVVDGKGHCAAGTSTGGLMNKMMGRIGDSPLIGAGTYASEFCGVSCTGEGEAIIRATLARDVSAVMEYKGLNLQEAVDYVIKHRLDEGFAGLIAVSNKGEVVCGFNSNGMFRGCATEDGFMEVAIWE

SEQ ID NO: 37977 - protein, 143 aa, Arabidopsis thaliana
  peptide (1)..(143): Ceres Seq. ID no. 12384462
  misc_feature (1)..(143): Pfam Name: Asparaginase Pfam Description: Asparaginase
  misc_feature (1)..(143): Homolog of NCBI NO: 26451560 NR Description: putative L-asparaginase [Arabidopsis thaliana]
  misc_feature (1)..(143): Homolog of NCBI NO: 18401029 NR Description: putative L-asparaginase
MNGLPISIYAPETVGCVVVDGKGHCAAGTSTGGLMNKMMGRIGDSPLIGAGTYASEFCGVSCTGEGEAIIRATLARDVSAVMEYKGLNLQEAVDYVIKHRLDEGFAGLIAVSNKGEVVCGFNSNGMFRGCATEDGFMEVAIWE

SEQ ID NO: 37978 - protein, 109 aa, Arabidopsis thaliana
  peptide (1)..(109): Ceres Seq. ID no. 12384463
  misc_feature (1)..(109): Pfam Name: Asparaginase Pfam Description: Asparaginase
  misc_feature (1)..(109): Homolog of NCBI NO: 26451560 NR Description: putative L-asparaginase [Arabidopsis thaliana]
  misc_feature (1)..(109): Homolog of NCBI NO: 18401029 NR Description: putative L-asparaginase
MNKMMGRIGDSPLIGAGTYASEFCGVSCTGEGEAIIRATLARDVSAVMEYKGLNLQEAVDYVIKHRLDEGFAGLIAVSNKGEVVCGFNSNGMFRGCATEDGFMEVAIWE
